United States Patent Application Publication US 2011/0214205 A1 - sequence listing, part 10

SEQ ID NO: 33227 - DNA, 540 bp, Setaria italica
  Peptide Sequence Number=SeqID_99201
gcgcccgacggccccctaaccgcggtggccgtgcgggagcgacgccgggtgtacgcgctggtggaggcggggacgacggacgggggcaaggagtggcggatcgaggaggcggcgtggaaatcggagtccgagggggagatggtggtggggctcgtcttcgttggcgctgccctcgccatcttcatgttctggaggttccagatgcgccagcttgccggcaacatgaacaagaagatcagatagtaacaatgcaaattcctcccttcctttgttttagaagaatctgtatccaattgcttttggtatgcacacgagttagtgtaggtagatacttgtggattaggcagttacttatctatgaactgtgaatctgctatctttcttggttagttcttgataagttaaggcacaattctggagcgatgctcctggttgccaattgtacctgcaaatctacacattgtaatggaaaaggccgtgctaaagttttgtaatgatggtgaattccacttggtgcaataaactgatatttagttttgt

SEQ ID NO: 33228 - DNA, 398 bp, Setaria italica
  Peptide Sequence Number=SeqID_99202
cgaacctgttcgacgccatggtggacgccatctacgccgcgctggagaaggccggcgcgccgggcgtcggggtcgtcgtgtcggagagcgggtggccgtcggccggcgggttcgcggcgagcgtggagaacgcgcgggcgcacaaccagggcgtgatcgaccacgtccggcggggcacgcccaagaggcccggggtgctggagacgtacgtgttcgccatgttcaacgagaaccagaagccgggggaggagatcgagaggcacttcggcttgttcaacccggacaagtcgccggtctacccgattaccttccctaattaacacaccattgtaatttgctacggactatgccacgtcaataaataataaatcaacacgtgttgtttagtaaaaaaaaaa

SEQ ID NO: 33229 - DNA, 344 bp, Setaria italica
  Peptide Sequence Number=SeqID_99203
caggggcgccggatgggaggaagacggtcgcccggaggggacgtccctgctcggagaagggagacggcctggagagggggtcgcgggccgagctcgttccttcgtccagcggccgtccgtccagaggggatctgcagggctcgcggggaaaggagccgcgccggcgtccgaaaccgagcaaggaaggcgtgccggggacgacaggggcgccgcgccggccctcgcccttgccccgccgcgacggatcgacgggggatctcgacgagaaggggcgctgcgagcgatgccgatgggggtagcgggcggtgcggctgttcgacgggtaccgaaggaaaaaaaaacag

SEQ ID NO: 33230 - DNA, 352 bp, Setaria italica
  Peptide Sequence Number=SeqID_99204
tagactaatttttgctatttttattatgttcggatactgatacccctataagatggtggtaaaatctttgggagctccacacgtacaatgtacgttttgtttgccctgaagattttaccaccatcttataggggtatcagtatccgctatttttattatgttcggagtgccttatttggaaggttggtggtactgggtaatggagaccaaaacaaaagacctgtgaatagttcaattcaattggaagctcgagtcccattacagatatgtgtttcccagaaaagcagcaacctgctaaatgaagaagggactttgccatttgcaattgatcaactgggcatattttggaggg

SEQ ID NO: 33231 - DNA, 725 bp, Setaria italica
  Peptide Sequence Number=SeqID_99205
acctgaagcaattattactttagagaccagtgacggtgctgaacaatccagaaacatatgttcacctctcctttgtttagatcctggtaagggctttggaacagagaaccattgactgtccagcttctcaatccctttaagttcgaaggaaagcacatctagcaatagtgaggaggcatcttcgcccgacactgcctgcccagcatcgtccttcaaactagctgggctatggatttctacagtcacaatgactgaatcaccgggtctgtacacctccttatctgtctggagcttcaatgttggggataattgctgcttggcagctgaaccaaccttccgatcttctaaccatccaacacttcttaagaaggaaagcccttgcggaagttgaagtttcagtgacatctcatcagagtatcagatcagtacctctaacttgacagatttttcaccactctggagcggccggcctggagctgctggagcaggggcgccggatgggaggaagacggtcgcccggaggggacgtccctgctcggagaagggagacggcctggagagggggtcgcgggccgagctcgttccttcgtccagcggccgtccgtccagaggggatctgcagggctcgcggggaaaggagccgcgccggcgtccgaaaaccgaagacaaaaggaaaaggaacgtaagaaccggggaaaacgaaaacaaaaggggaacgaaccgaa

SEQ ID NO: 33232 - DNA, 574 bp, Setaria italica
  Peptide Sequence Number=SeqID_99206
tgtacaagctcctgtctccaatttgctgagtagtttctgaatagctctccttctcccctttcctcccttgagcctgaggctccgacatggtcatctgaaatctctgacactgacaatcgaggaattgggctgtatgatgagaaattgggtcgttctaattgattataaaacagctcacttgtggagaggcgtgatgacagagattgcatcgacaatgagttcctgagggagaattcaggatttgctttggaagggttgtatgaggaaatagatgaaacttcatcttttgaactatcatatcctccttctagatcagcactaacatttgctttgatctgcagtaagagtgagagcaatcaagtaaaaagaagtgtgttttttattcttaatttagttaagttactgtctacatctacatggaagataccttttgatggaaataccttttgatggaaaaactgttccatatgaatgttccatccaagtaacgaataaaataattaaaccaacattttgccagcccatgcaggaaaatgtgtagaataaaaatcaatgatgaaatatgggaacaact

SEQ ID NO: 33233 - DNA, 2085 bp, Setaria italica
  Peptide Sequence Number=SeqID_99207
agcgtgagaaccactgtataatattatttttccacaaaataaaaggaattaatggccaaatgtctcacgtgtactatttaacaatgtaatagcatataggcaccccaaatgagtccatctgtcaattacatctttttcttcctttgaggctacgagactttttaattttacacggtgacaataaaaaaaataacacctgttgaacaaagtctggggtctaacaaaccaggcacatccctgacacagcgctggacgtaaacatgcatcgcttgtgtggcattcatgatcagtattgatgttgcaccaagtaaattaagtactggaatccatgaacaaatgcagccctcttgatgcaaaacattgcaacttatgatcaatctccttgctctgtttgtcctctgcttctgaagtgcttttgtacaaataggccccacattgcacatcctcggaacaactgaggaactttcttttgatgttagtgtagcagtcagaataatttggcattccttacagctgaaaggaactatactttggcaagcaaaggatgaaaaatccaggtgttgttagcagcagctcacttcaagagttgaagatgtttccaggtaagacagatctatcgtttctcccatgagttggtcgtctacgcaatggaggtgcataaacagttattgggaggacccattcacccttttctcttttctcaacaaggagtgggtgctcgtacctagctgggtctgttccttcaggagttgtgaagaactcgaatcggagagaccactgtacagtgacctttgaggtagaaaatgacataggaccatcaatgggaatggaaaagagaaagcttgtctggtgaagatcagcaacaacctcatgatgttcactatgcagcttggttattgtcggcgagccccttcttgaaggatgtaatgcacggggattaattgtttctgatgtttccagggttattgatacctcaaggcacctccgctttccagttccatgaaaaaaggtaagtgctccaccaatcatatcaccaaagtaataagttgagtccgaattcttaggtgaaaaccgaagcaagacttggtcatcaattcttatattataagatcttcctctcgtaaaaccttcagacccagccggatcaacatttttcggtgtaagggggagtccaacatccgaatctggagaaaacctctgcccatttgatggatgatctggaagcaaatggtttagcttcctttgaggtgacactaaacctccatcatggtcgtctgaaatctctgacactgacaatcgaggaattgggctgtatgatgggaaattgggtcgttctacttgattataaaatggctcacttgtggagaggcgtgatgacagagattgcatcgacaatgagttcctgagggagaattcaggatttgctttggaagggttgtatgaggaaacagatgaaacttcatcttttgaactatcatatccttcttctagatcagcattatcatttgctttgatccattctgaatcttcatctttttccctccaaaatatgcccagttgatcaattgcaaatggcaaagtcccttcttcatttagcaggttgctgcttttctgggaaacacatatctgtaatgggactcgagcttccaattgaattgaactattcacaggtcttttgttttggtctccattacccagtaccaccaaccttccaaataaggcactccgaacataataaaaatagcggatactgatacccctataagatggtggtaaaatctttgggagctccacacgtacaatgtacgtttttgtttgccctgaagcaattattactttagagaccagtgacggtgctgaacaatccagaaacatatgttcacctctcctttgtttagatcctggtaaggctttggaacagagaaccattgactgtccagcttctcaatccctttaagttcgaaggaaagcacatctagcaatagtgaggaggcatcttcggacactgcctgcccagcatatacaaacaatttttacggtagtaaagggggaagtaccaaacaaataccgaaaataactaaggaa

SEQ ID NO: 33234 - DNA, 396 bp, Setaria italica
  Peptide Sequence Number=SeqID_99208
ctgtacaacagacaacacacagatggatgatttttctagcaacgaaatgcggacaatcagttgttcgcagtagtcaataggctagctatagtatactctagtcaaaagcaagctacatattatcaaactaggggtgtaacaagattagtgaaattagttgctccgcaagcacaccacaaacgagaatcaaaatgcataacaaataaaatgaacatcacaattaggtattttccatggcaaagaatcagccagaaatcagatagcagccaatattctgccactccacctgtctgaagcgagtatgttttcttcgatggaagctcaaaatttgcacaatccaaagggccaatacacaaccacccataaacctaatactaaaacctacctagtaaaata

SEQ ID NO: 33235 - DNA, 657 bp, Setaria italica
  Peptide Sequence Number=SeqID_99209
gacccgacggcccggccgtggccgcagccggcatctccggccagccgagcgcgtacgagatgctggaggggttcgtaccttagaaccggtatcctgcccgatagcgtgacggggtacacgtaccgggcgtccgacggcgcgttcgaggtgttcatgggcggcgactgcgagttcgacgtcgacggcgggtaccggctcacgtaccggcggaggatctacggcaacgtcgagggcggcagcatccggaacctcggcggcgtctcggtgcgcatgttcctcctcaactggggcatcgaccgcgtcgtcatggaggacgccggacacctcatgttctacgtcggcccgctctcgcaggccttccccgccgacaacttcgaggagtcgccccagtgccggggccgccgctgcggcggcgtggctgccggtgatgttggtgccgccggtggcgtggcggcgatgtaggacgatccggagctacgtggtgggtccatgtggattaattattgaggcgccgacgacggaggggaggaggatcaaacgatcgagatgttgattccattgtagtacgtgtacaacttaaaagtcaattgtattgcaccacgacgctctgtttggtttgaggagatctagtgcgtttgcgactttgcgttacgtgaa

SEQ ID NO: 33236 - DNA, 368 bp, Setaria italica
  Peptide Sequence Number=SeqID_99210
tgctccattcctcacggggctatccatactaattccgctgaaacctccaccatctccacgaaatccccgaaaaaagctcggatcttttggctaaagccagcggtcgtctccacaaaaaccacgagaaagattgcagccggagcctccctgcgagtttgcgctggctttagtgctgcccgcttctagaacgcgtccagaattcgtggactcacccagtccacccccgccccgacccagctcccacgccaagtcccgggtacaaagcccacggaatatccccgattccaattcgagttcttccctttcagtcagtcgccggctcgccgccgccgccgaattgaacccagctcgtcgccgggttctggttt

SEQ ID NO: 33237 - DNA, 261 bp, Setaria italica
  Peptide Sequence Number=SeqID_99211
tctaggctggcgagctaggtagggtttggttgttctaggacatagcttgaccttgcagatgtgtagcttgcggcgaaatagaagggtgagtgtttggcatgtttctggatgagtcgctataaatcgctggtttcctagtccttattgcattgtctccctcattgctgctgctgtttgtaccaagtttagtacaagattattacggacagtagcttccccaagcaaatcaagaggcccaatgtgtgcttctttcagaaattt

SEQ ID NO: 33238 - DNA, 836 bp, Setaria italica
  Peptide Sequence Number=SeqID_99212
cctaactcgtgtctgtgccttggtaaagaaatcagccagctgcaactctgaaggcacatactgaagagcaataaccccatcctgaacctgtgatcgtgtataagaaacatccgcaccaatatgcttagtaagctcatgcttcactggatcacgagcaatactaatagcacctgtactgtcagacaaaagaggagtcggcacagaaactaaaacaccaaaatcctcaagcaaccatcgtaaccaagtcacctctgccatcacaagcgccatagcacgcaacttagcctcagcactcgaacgagaaaactgctacctacttcttagtcttccaagcaataagggaaccaccaagaaaaaacacaataggcagaaagagattgacggtcagagggatcactagcctaggtagcatcacaatttgcctggagatgtaaggagctagagcgtggaaagaatagacggcgtgaaagagtcccacgaaggtaacgtaagacacgaagaagatgactataatgaagatgagaaggagctgaaacaaactgactcagaatatgcacagcatgagatatatcaggacgagtaacaccaagataaacaagactcccaacgatatgtcgataacgagtgggatcctcaaggggctcaccatcagttgcgcgaagatgaacattaagttccatgggagtctcaacagtccgatgatcagtaagagaagcccgatcaagaagatcctgaatatatttttcttgagacagatagaagccttcgggcatagaagaaacctcaatcccaagaaagaaactaagaggaccaagatcaaacataagaaacgtctc

SEQ ID NO: 33239 - DNA, 836 bp, Setaria italica
  Peptide Sequence Number=SeqID_99213
ttttttttaggcctgctgacgagcatgttcaacttccattagacatcattctttcatgccatcgagctgtttggttcttactacggctaggcttacgccgacaaattggagatccaccacagcagggaaggaatttctctaacaacggcaaaagcgagtacaagcttacaggtatcagattcctgtgacatacaagcttgctgcaaacacaatgtcacgcttaatagcattggacgcgacctccatcttcttgtacagcgcagagttccccattatcgaagctgcattcctgaattctctgcatgtttcatccagccgaacgatcgttcttacaatgagcccctcggatacatctgtcagctcacatatgtcggcgaaaggtgttccctttgcccactcgtagacaacctcaacaaggccaaacttgagattgtcacgtgcatactcctcgggatccacaggcaccttgaactgtgcttggagctgtcctagtctgattgccgtgtcataaagcctctttttggcttcagccaattttggagtaagagatggttctgatgcattcctctgttggaagacaaatgcagacataatggccacagcttcttcaggttctaggtcatccaattgattctcaaacagacattctgtggatattaactcctctcctgagttcatttcacaggctactcgtcccttaagttgcacaactagatcagaatcaatgtagttgattacctttagtacatcaattctgccttgaaactccggcatctgttgaagcgcctcatctgacatctggaatttcaatttcattcagctgatccttgtacatc

SEQ ID NO: 33240 - DNA, 1267 bp, Setaria italica
  Peptide Sequence Number=SeqID_99214
gcggcacggcggtacctgcacaccacagaccacagatccatttaaaacacctgaacatctccacgcttccgccgctttacagctccccacgacccaccccaacgaatccaccgccccacacctagtgcggcggccgccggctatggcggcggcgcatagcggcgactacctcgggcgcttcgtcgcggagacggggtggtacaacgaggtcgtcctcagcgcggtgacgcccggcaactggtggcgcggcctgccgcacccggttcagtcgtggatgcgcaactgcgtcggcggctacctcctctacttcatctccggcttcctctggtgcttcgtcatctactactggaagcgcaacgcctacatccccaaagattccgtccctacaaatgaagctatgaggaagcaaataattgtcgcgtcaaaggctatgcctttatattgtgctcttccaactgtatctgagtacatgattgagagtggatggacacggtgtttctttaatatcagcgaagttggtgtgcccatgtacttcattaatttggctttatatctcatctttgtggagtttggaatttactggatgcacagagagttgcatgacataaagccattatacaaatatctacatgcaacccaccatatttacaacaaggaaaatactctgtctccatttgccgggctggcatttcatccagtggatgggattttgcaagcaataccacatgtgtttgccctcttcattttcccaacacactttaggacgcacatcgccctcttattcgtggaggccgtgtggacagcaaacatccacgactgcattcatggcaagatatggccagtcatgggtgctggctaccataccattcaccacacaacttaccgccacaactatggccactacaccatctggatggactggatgtttggcacgctgcgcgaaccagtagatatcctcaagaacgagtgagctgtgtcttctcccgtgtgctgtgctgtgtggggtttctattctgcttggcactttgtgtcgcctgaagcatcggtttgtttacttcagtatgctaggtccatatatgttgtgtttctcccgtaatttagtactgtttcttgtgatgcaatggaatccaggaacgaataaaagtttggtagacgcattctggattccagacgcctgtacaattcggcacttccaagtcaatatagaatgtacaattctttcctgtaaaaaaaaagtaaaaaaaagtttctgaccttaaaaaaaaaa

SEQ ID NO: 33241 - DNA, 292 bp, Setaria italica
  Peptide Sequence Number=SeqID_99215
tctacctaaattgtattccgtttccaaacgttgcacattctatttctctagaatgatgcagaggctgctaaagctgccaaagataaggcaaaagagctttcattgggtctcaagagtatcactcaactatataatgactatgctgttccgtttaatctctgggaggtttgcctggaaatgctgagctttgctaattactccggagatgctgatagcaaaattgttcgagaaatttgggccaactcttttcaccacagaacatgcttctgcaacacccccctcttgtaagtgc

SEQ ID NO: 33242 - DNA, 1697 bp, Setaria italica
  Peptide Sequence Number=SeqID_99216
ctcactttacatcggagcctgcaaagtggcagatttaggtgcacctatctcgactagccaaacaaagtatcttgagctcctagcaaggtactatgttcttaagggggagcatattgctgctgccaggatgttgttaatattggcagagagacaatgctccaattctgaagaagcacctactcttgacaagaggtacgaatatctcagaaatgcagtgcttcaggccaaaagcgcaggcatcgctgctgattcatccagaaatcctattgatagtagcacagtggatttgcttgaaggcaaacttgcagtgcttcgcttccaaatgcaaatcaaacaagaactggagctcatggcagcacgggttgaaaatattctgagcaattctgaatcaccaaatgatccgttccctcgtgacaacattcttgctgatgcagaggctgctaaagctgccaaagataaggcaaaagagctttcattgggtctcaagagtatcactcaactatataatgactatgctgttccgtttaatctctgggaggtttgcctggaaatgctgagctttgctaattactccggagatgctgatagcaaaattgttcgagaaatttgggccagactccttgaccaggcacttacaagagggggtgttgcagaagcatgttctgtggtgaaaagagttggctcgaaacttgatcctgcagatggagcttgtttgcctttggatataatatcccttcatcttgagaaggctgcattggatagattaagttcaggagaagaattagttggcgatgatgatgttgcaagagctcttcttggtgcctgtaaaggtcttcctgaaccagtgcttgctgtgtatgatcagctgttatcaaatggggcaatcatgccttcacttaatataaagttgcgccttttgagatcagttcttgcgatccttcgtgagtgggggatgtctgtcattgcacatagactaggcaccacaagtgctggggcttcattcttttttgatggaacattttcgctgaatcaaacaggaactgcaaatcaaggtgctcgagataaaataattagtttggcgaacaggtatatgactgaagtgaggcgattaaaccttccacagaaccaaacggagaatgtctaccgtggtttccgtgagcttgaggagaaattactctcaccttattagccatttttcaattgtatcctcagcattgtaaagtatgggtcctgcatcagttgttgtatcaagaagagaaagagccaaaggcctccagattcacctgtgcttgatctctattgtttctgtcttacactttatgtctgaaagaacccaaggctgcgctgaccatcactcagagtttatccatgtgcagccttcttttatttgatttcgagtcaacgtgaattatggagctgctgtgtaaagttgtttctgagctcggtgttgattacttgctaatcccgtgggcagatgctcctcctctggttttacctgaagtgggaaaacagctggaaaactcagtttggctttacagcaacaaagatctatctgttgaatacatgtcggttttcatataggaaattgaaaattagtatgtaccatgagattgtacagtttgatagtagaatattctttcagggttgtaagctccgtagctccttgtgtttattggcatcaaggtatactgtatttc

SEQ ID NO: 33243 - DNA, 537 bp, Setaria italica
  misc_feature (462)..(462): n is a, c, g, or t
  Peptide Sequence Number=SeqID_99217
taggcccgcaggatgatgatccaccagaaccccgagtcgacgggcgcgacgcggccgatggcgctctcgccgaagtccgccaccagcttgtccacgccgcgcttggggtccttgagcaccttgaagctcgccggcatggcgccctcgcccagcttgaaccggtcgatccgcttctcccacccctgcagcagcagcgtcttgagcaggaagttccgcaccacctccggctccccgttcatcaggaacgccagcgcgctcggcacgaagtcccgcacgaacacctggtcgtagttgagcacctcgtcggtggagtggtcgacggcggcgatggtgccgaggggctggccgcggaaggacacgagggagcggcggagcgcgtcccaggcctcgccgacgagcgggtggggctcgaacgagagccgcgtggacgaggccggcgtgccgcagtaggaccgcagcccnccgccgggcgagtacatgctctcgtagctctccatcatcccgccgccgtacccccatcccccgcggctgccggcg

SEQ ID NO: 33244 - DNA, 279 bp, Setaria italica
  Peptide Sequence Number=SeqID_99218
cgtctctggcaaccgttcgccccggccgccttcccgcgccgctcacgcactcctcccggcgcgcccatgacgacggtgtcgcgcgcgctcggctccgcgttcgcgggcttcacgcggacccctgtcgcggcgccggccgcgacgaccctgcactccccgtgcggctcgtcggcgctgctccgacactggcagtggagccgggccagccgcgcccggcggttctcgtccggccgcgcggcacggattagcatgagcctccgtgcaggaattgtcgggctg

SEQ ID NO: 33245 - DNA, 1401 bp, Setaria italica
  misc_feature (1)..(35): n is a, c, g, or t
  Peptide Sequence Number=SeqID_99219
nnnnnnnnnnnnnnnnnnnnnnnnnnnnnnnnnnngttttaatgtgctgctgctacattgagcattattctgagatactgcatagctatcaaaaataaagctgaaaagggacctgcaaaatgtgtagccatgctcccagaatatttgcatgcagaacagcaaaagaaagctaaacttatatacatcactaagtgctgtcaatttgagggtagaacactgaatgttgtcaaattggtaatataattctggtggcaaaagagaatgaggtgtggcataatccagtgccaccagatgaccatgctcccagcactgaacaacagagttgcatattgctcacttgcaaaatgagctttcgcttgcttcaccagaacacaagctctccagcaaaaaggtcatcggagcgaactgtgcattcattgattttgtcttcaatttgcttaccaaggatgtcaagtgcactatctactaagacgaagcattctggaaaggtggctgctcgatgtgccaaattgagaaatttgtgagacataaatttgtagcgaagcatagcatccattggattctcggttatatttcttccttggttgtcttgtatagtttccatccatgcttcccatgtccatcgctttaacacatattgtggtggtagtaatttgatattcatcaaatcaagaactttaagagcatgggcacataatatcccagttctatcaaagtgcctgcagctgcatgaaactgtttgcttcaaaggatcaccaataactttgtactcctccttaaaggtaaaatctcctactagatattcattatcaccctccaatgccttggtgcaagctgccaaggatttttcatattcaccttgaaaagcttcaaatataataggtgtatacagcttgctagcctgcaccaaaataggtggtggtctcttcatacatattttaggcaaatttttccttgaatcaaattctgaattcaattcattatccctttttccttgcaccaccctttcgaaatgcttgaaaaacttgatgatgtcaaaatcagatttgaaatggattttcaagtcattgttcagactctcactctcattcaactgtgttcttctcattcctaatgtgaatacatccttcatataacattcagcccatttttctttcaacttgtatataccatccaaccaagtttgcttgctcacctttttcctcatgatgtcaaatttatgttcaaattctgccatgtccacatactcgaacatgcatgcgctaaaatctgatagaatacttgtatcttcattcttctctgcatgtagatgtttggcagcattctgcataatgtgaaaggtgcataatccatgccatgcttccacaaacacttctgcaactgcctttcccattgcagaat

SEQ ID NO: 33246 - DNA, 611 bp, Setaria italica
  Peptide Sequence Number=SeqID_99220
accgcgacaaacggagagggtggtagccaaggagacggcgccgaattgcttcggtgaagtagtggacgattacaagctgaacgaactggtgaggtatgcgggcaaggccaagacgcaggtaagaccgagcacggcaggcctggtgtgccgtgaacgaggatgacaagaagggcaaggcgctcaggtatgtggacatcctcaaagccttgtacggcaacgggcagtccacgttgtgcttggtctacaacgcaacgggcgatacgctctaccatgtcgcccaccatgactggtacggctacattaatgacagcaaagaggggtaccctgccgagatcggcaatagccagtggggagtcttccatcatgtccacaggcagggcgaaccgtcaggctcaatgggagctgtcgtgtaccgcggcaagaagaaagatggccaggaccaagactacctgctggcgtggagtaccccgtggggtatctggtaccgcaacaaggcttactgcgagattggtggtgtcgactacttcaaacgacggtgggatgagatatatgtgaaactggagaatgccgattattcttcacgtaccaagtccggtggttgtgagattgaa

SEQ ID NO: 33247 - DNA, 374 bp, Setaria italica
  Peptide Sequence Number=SeqID_99221
tttgaatgcgtagctgagaaaccctgggtccgcagctacagtggatgttgaaggctctaactcatggagtcatggtgtgtgtgcctctaactcgtggtgtgcagctggggcgcaggagctaaggaacctgctgtcttgctagtagcccccatcccctcttggtcattctattttcttattcagtggcatttttcttatttctgtttttttgttaccaatttgcattgtaatcacaactccttattaatgtaatgacacgtagctctcctgcatgtttgagaaaaaaaaaattataccttcaaatatttcattccttttccatatgcaaggagcacgatggagaaagtttattaatacctgatgcaattaatgtt

SEQ ID NO: 33248 - DNA, 469 bp, Setaria italica
  Peptide Sequence Number=SeqID_99222
caggagtgctgcggcagtcagtctccactctccactcccccagttcgtcctcactagtcacttctattggcggcgggcggcggcgtcggccgcggttcgtcctttcccgcggcggcttcttggtgccgtctccgtctgtgaggagttcctccgtgcgcgtctgggaaagggaggaggaagaaagggctcttctttgaggacaaaatcagcttcgcttgagatcttctggagtatcccttcttcacagccaatcagatctttgggcgtaacaatatgtcgcccaagcgactacagggcgtggttatgttgttaatgctcatggttctcaatgtttcaggtgcatttgttggtatcactattggtaatgatatgtcaaacctaccatcagcaacagatatagtggctatccttaaagcaaagaagattcagcatgttcgcctgattgattcagaccatcagatgttgactg

SEQ ID NO: 33249 - DNA, 429 bp, Setaria italica
  Peptide Sequence Number=SeqID_99223
tcgcgccgcccggaggccatccactcacactaccgccgcctctccttcctcctcagtcgctcccgccccgaccgcccctgctcgcttgccttcgccgaagccgcccgcctcgtcgccgatgcctgggctttcctctctgatcccgttcttaaatccgccctcgacgcggagctccacaccgccgccgcagctcgcgcataccactctcctgctccaaatctaccgcagccgcactcgcagccacctctgcctgcacggccaactccaccggcagctactccctctccacgccaaactccaccggcggctattttctctccacgcccaactccgccggtcgctgctgcctccccgtggccgactccgccgccggtttcctacccctccggggccgacaccgccgcctgtttctccccctccgccgtccga

SEQ ID NO: 33250 - DNA, 508 bp, Setaria italica
  Peptide Sequence Number=SeqID_99224
agacacagagaagagggagctgctcgctgaacgagcagagggcctgctaatatgcttgaagcaaaggtttcctggattgacacagacaagcttggacatgagcaagattcagtacaacaaggatgtgggcaaatcaatcctggagagttattcaagggtgctagaaagtttggcttcaaacatcgtcacccgcatcgacgatctgctgaacatcgatgagctgaacagacacgccgaacagttctcagcaacaggtgatgcagactgcaagattgcttgcagccaagctgcagttacatccttcccagtgcctgcctcaggcacaccattcatgacggcatatgccacgcctagcttctcgccggcgcaactggcgagcccgtcaaagaaagagaggacgtccctgactccaggcagacggtctcagcatagcaggagtaccggtgcaaagaaggccttgacggatcatgtcagtacagaagtgaagggggtgataattagcagcggt

SEQ ID NO: 33251 - DNA, 677 bp, Setaria italica
  Peptide Sequence Number=SeqID_99225
tctatgttcctcggtgacagcgacggagaaggctttagcctggtcttgtacttcaggatatccgaatactatgacaaagaggtttcggaacatttcaaggattctatcatggttagccttttccaattcacaatctatacttcccaaacagaagtattttctggaagctaacagaatctttctatcaacagagattttttgagaatgaatctgagaaggtaaaagggttcacatcagaatctaccatcatgtacagagatcgattgaaaatcatggctggattggttaacccagatgacctccagttgggttccacggagaggaagctggtccaagcatacaatgagaagccagcctttcaggccccaacataatttctacgagggagagaattactttgaggtagaccttgatatacaccggttcagctacatcgctaggaagggactggactcatttagggaacgcctaaagaatggcatcctcgatttgggtttgacaattcaggcccagaagcaagaggagctccctgagcaggtcctctgctgcgttaggctgaacaagattgaatttgttaaccatgggcaagttccaacaatagtcacagttgatgaaaagtgacacatttgatcatagcgattgcatgtgcgagctgttggaaggctagacccattcca

SEQ ID NO: 33252 - DNA, 439 bp, Setaria italica
  Peptide Sequence Number=SeqID_99226
ccccaacataatttctacgaggtaaagagatgtccttgtttgaattgtaaagtaacacactcaatgttgttaggtggtaatcagattgtaaaggtacgtggtattctgagaaaccaccagttaatgtttcatctcttacgtcaccagggagagaattactttgaggtagaccttgatatacaccggttcagctacatcgctaggaagggactggactcatttagggaacgcctaaagaatggcatcctcgatttgggtttgacaattcaggtaagtttccctttagattctccaccaaatatgtatctatcaatcttcttcagcttcttctacttatttgcagacaacttatgtccttaagtgtttctttgggtgtgagccaaatttcagattcgtctaaatgcttgttttaacttggtttaatcctattagggtttct

SEQ ID NO: 33253 - DNA, 346 bp, Setaria italica
  Peptide Sequence Number=SeqID_99227
gcctcctctcccacaagccggtaacccggagtacgctccagccgcggccaggcctgccaggattagcgacagcaccgccgtcgcggcggcgacgcccggcgacatgcgcgcccgcttcgggctcggcaccttcctgaccttgaagtagcccaccttccggtcgtcggcctcgtacaccagcgtctccacggggaagtccatgaggtagcagtacccgctcgcgccgttgtacaccgcgccccagcagctgcagttgcccgcgcacgccgcctcgcactcctccgccgtcctgttcgtctccggcggtagctcctccttgtacgccaccgacacctgcttccgccgc

SEQ ID NO: 33254 - DNA, 448 bp, Setaria italica
  Peptide Sequence Number=SeqID_99228
aaattgtcactagcgaaaccgcagctttcatttctatccacataacatacttcttgtacatggttgactgcttcttacttaattaaaccttttccgtacacccttttagcaagatcaaaataaaatctactaaagccggggttgctttcgcacaggaacagctcaggaccatcagcacgctgccagcttggctctcaggtccttcctcaaaattttgccagatggcgccttaggaatagtctccacaaagaaaatcttgtgcagcctcttgtagaacacaacctgttttgccacgtactgcttgatctcgtcctcggtgatctcggagccgtcggacctcacgacgaacgccactgggatctcgccgcaggagtcatcctttatcgggacgacggcggcgtcggcgatgcccgggtgcgcgatgagcatggcctcaagctccgcgggg

SEQ ID NO: 33255 - DNA, 457 bp, Setaria italica
  Peptide Sequence Number=SeqID_99229
ctgtctatttttcctttcgtttcttctgtttcttttatttcacaatcttgaactctgatgttccccttccccataaattggagagatcctcccttttgcttcaagaagaagaggcagcatgcttctgttgcatgctacaccagatcaaggtttggaacatatccctcaagtctcatctcatctaccagtatgtccataagttgatacatatcttccgcaccatgctgtggttcagcgcttgcatagaactcaaggactttgcctttaacctcaacccagctgcaacctggagtcttgctgacacccctctccctcattaatcctatcatccttgctgagtcatccattctatccgaggttgcgtatattttggatgacaccacgtagttccaggagtttgatggctccagctccataatcctattgatgaccctctcaccaacctcaacattcttgc

SEQ ID NO: 33256 - DNA, 420 bp, Setaria italica
  Peptide Sequence Number=SeqID_99230
gccatgcttaagtgctagataaagtgacaaaagggtaaattggtgagctaattgtgttcagcaaaataagagcacttgacaacagacaaagtaaatgcagccaaagaaccatctaactgcaaatacaaatttcacatttcatatacttggcaacttcattgcatatttgaaacttaaaatgcatagaaaacttacatattcttagcatgggaatgctttactcaataatatgggggcacaataaatcaaacaggcaactcatgatcaagcatagaaggtgaaacagatgttgaacatttatatataatgacgcatggtataatgccatgcaaatctgcagtgagaaaatctggtaggcaggtacccagcaattattggcatgcaaatccactgtaaggaaatcttgtaggtgggtactta

SEQ ID NO: 33257 - DNA, 277 bp, Setaria italica
  Peptide Sequence Number=SeqID_99231
cgcatacttgactttgacaatggtgtcttcaagggtctccataaggattatcccagctgggttggcatccctaaggagacccttgaagacaccattgtcaaagtcaagtatgcgagatcgggggacgaaaaggtttagccatgggtggggcacctcccacactccggctgaccggagcaccctctcctcctccagcacacgatcaaggaactgcacgaatgtcacatccttggtgaacacaaaccctggctcgaagcttaggttgtccattagtgcc

SEQ ID NO: 33258 - DNA, 912 bp, Setaria italica
  Peptide Sequence Number=SeqID_99232
cgccaacaacgtctccgaccccaacaaggtcgccgtcggccagcagctctggatccccgtgccctgcagctgcgaccccgtcggcggacagcccgtcgtgcacttcacgtacgtcgtgccggccgggagctccgtcgccggcatcgcgcaggagttcggctccacggaggagaacattctcgcggtgaacaagatgcccgacgccaagggccttctcgccgggcaggttcttgatgtgccgctccgagcttgtggttctgccattagcaacacggccattgaccgcaaccttcttgttccaaatggaagctacatcctcaccgccaacaactgcgtgatgtgtggctgcagctccagcacttggcagttggactgccagccgacacagggattaagctcgtcgttctgccccgccgccaagtgcggggacatgttcctcggcaacacatcctccacctcatcctgcgagagcaggacgtgctcctacgccgggtacaccaacagcacgtctttcgccatcctcgccaacatcaccacaagcaacgtgtgcaacgctgggatgtctccaatggcgcagccggctcactcctcggccttccggttggagccgtcatggttcagatggacggagctggttgtctcgcttcacgtcgtcctgctttgtgtaggctatctgcgccaggactgaatgtttttatcattagtatctctcgttaagaccctggccctctgattcctagtttgatgtttgtgagtaatctatgcggtgtttgtgcgaatttgacctgtagctggttgggtttgcaagtgcaaacgcgaggggaacactttgttttgtgttagaaggtagatcaggaaacatttgtacttcgtcaaacttttgcaaagatacttttcttgttggctaaaaaa

SEQ ID NO: 33259 - DNA, 486 bp, Setaria italica
  Peptide Sequence Number=SeqID_99233
gttaacttacctgaagagcattctaaacagcctccaagcaatggaccagcaagatctagtcttttgttgccataatgatctcggtcgtcctcagctcttcgaccaagagcacacatcagtaggcggtgaataatgtatccaaaatagtatgccttctagtttcacaaaattcccccacaccaacatgaggcaacatttccttttgaagtatttcttttgcatacttaattctcttttctcgagtgacaccaactgtagctccacgctttccaatatagtccagagcaacctgttgattttgaatgacaaaagcttcctccagggatgggcgtagtaattccatcatttgtgtatcagaaaagtcataacatatgtgctccagtatatctttgtcagcaacaaatccctatattcgtgcggacattcccattatcattgtttttcgagcattaggatttgttgctgacaaagatatactggagcaca

SEQ ID NO: 33260 - DNA, 3697 bp, Setaria italica
  Peptide Sequence Number=SeqID_99234
catactcggcaccactgtacgttgatgtatcatacagagtaatgaagaaaggacatgactgtgaggaagttacagaaacttcagattacccgaaagtgttcattgggaaggttccaatcatgttgcgttctagttactgcacactatatcaacaatctgagaaggaccttaccgaactcggggagtgcccttatgaccaaggcggttatttcattatcaatggaagcgaaaaggttcttattgcccaggagaagatgagcaccaaccatgtttatgtctttaagaagaggcaaccaaacaaattttcatatgtggctgaagtccgttccatggctgagaaccagaacagaccagccagcagcatgtttgtaaggatgctttcgcgagcaggagcaaaagggggttcatctggtcaatatatccgtgctactctgccctatattcgtgcggacattcccattatcattgtttttcgagcattaggatttgttgctgacaaagatatactggagcacatatgttatgacttttctgatacacaaatgatggaattactacgcccatccctggaggaagcttttgtcattcaaaatcaacaggttgctctggactatattggaaagcgtggagctacagttggtgtcactcgagaaaagagaattaagtatgcaaaagaaatacttcaaaaggaaatgttgcctcatgttggtgtgggggaattttgtgaaactaagaaggcatactattttggatacattattcaccgcctactgatgtgtgctcttggtcgaagagctgaggacgaccgagatcattatggcaacaaaagactagatcttgctggtccattgcttggagggctgtttagaatgctcttcaggaagttaacaagggatgtgagatcttatgtgcaaaagtgtgtagataatggaaaagaagttaatttgcaatttgctatcaaagcaaaaactattaccagcggcttgaagtattcccttgctactgggaactgggggcaggctaaccaagctggaaccagagcgggggtttctcaggtgcttaatcgcctgacttatgcttctacgctgtcacatctccggaggctgaactctcccattgggcgtgaagggaaattggcaaagccccgccagttgcataactctcattggggaatgatgtgtcctgctgaaacaccagaaggacaagcttgcggcttggtgaaaaatcttgccttgatggtatacatcactgttggttctgctgcaaatccaattttggaatttttggaggagtggggcacagaaaattttgaggagatatcaccagccgtcattccacaagctgctaaaatttttgtcaatggttgttgggttggaattcataggaaccctgacctgctggtgaagactcttaggcgtttaagaagacagattgatgtcaacactgaagttggtgtggttcgtgatatccgtcttaaagaacttcgactctacacggattatgggcgttgcagtcgtccattgtttattgttgagaaccagaggctgctcatcaagaaggcgcatatccgagcattgcaacaaagggagactcctgatgaaggttggcatgagttggtctcaaaaggatatatagagtacatagataccgaagaagaggagactaccatgatctccatgactataaatgaccttataaatgcaagacacaacccagaggaggcgtattctgagacctacacgcattgtgagatccatccttctttgattcttggtgtttgtgcatcaattattccttttcctgatcacaaccagtcacctcgtaatacatatcagtctgctatgggaaagcaagccatgggaatttatgtcaccaactaccagttaagaatggacacattggcctacgttctctactacccacaaaagcctctagttactacacgtgctatggaacatttgcacttcagacagttaccagctggcattaacgcaatcgtcgctatctcttgctactctggttataaccaagaagattcagttatcatgaatcaatcttccatagatcgtgggttcttccgatcactatttttccgctcttacagagatgaggagaagaagatggggacacttgtcaaagaggaatttggtcgcccaaatagggagaatactatgggaatgcgccatgggtcatacgataaactagatgatgatggccttgcaccacctggaacaagggtctcgggtgaagatgtcattattgggaagacatctcctattccacaagatgacgctcaagggcaagcttctagatattctaagcgcgatcatagtacttctctgcggcacagtgaaagtggtatggtagatcaggttctgttaacaacaaatgctgatggtctaagatttgtcaaggttagaatgcgatcagttcgcattccacaaattggagacaagtttagcagtaggcatggacaaaaaggaactgttgggatgacttacacacaagaggacatgccatggacgattgaaggcatcacacctgatattattgtgaatccacatgctattccatcccgtatgactattggacagctgattgagtgtattatgggtaaagttgcagctcacatggggaaggaaggagatgcgactccattcactgatgttactgtggataacatcagcaaagctcttcataaatgtggttatcaaatgcgtggatttgagaccatgtacaatggtcacactggaaggaaactgacagctatgatttttctgggtcccacatattaccaaagactcaagcacatggtggacgacaagatacattctagaggtcgtggtcctgttcagatactcacccgacagccagcagaggggcgttcgcgtgacggtggtctccgctttggagaaatggaaagggattgtatgatcgcccatggagcagctttcttcctgaaggaaaggctgtttgaccagagtgatgcatacagagtccatgtatgcgagaaatgtggtctcatcgcaatcgccaacctaaagaaaaactcatttgagtgtaggggctgcaagaacaaaactgacattgtccaagtacacataccctatgcttgtaagcttctgttccaggagctcatggcgatggccattgctcctagaatgctcacccatgatatgaagacagggaaggatcagaaaaaacgctgaaccagtatcccatgggatgcttagctggccctcttccttctagggttcatacgacgtgatcttttatcagctagtaccatgttgagaaacttctttgtgaccacttcttttttaatttggacttcggttcttcacgaatgatgtctccatgggtatcatgcccgtctctgttctggatgtctcaaatctacgctagcaagcaaatggcgtatgagttttagttacttttgtacattagaaattgactcatgggtaaagggactgctcttgtaaggttttttgaaggactcgtgtgctgcactgtattgagtaaaaatatttggacacttggcgtgccaacttgggcgcttgctgtaacttcaattgacaattgtatgggccactggcactgtatcttagtagtgttcgacttagatctatataaaccaaggattgttcaaggataaggaaaggaatactttaaagaaaactaaaaggaaaaacaaaaa

SEQ ID NO: 33261 - DNA, 495 bp, Setaria italica
  Peptide Sequence Number=SeqID_99235
gacagcgaagggcgggcgcccgcggcgcgggcgggaccgagcggtaggagaggccctcgtagtcgtggccgccgcttcggacgcggaccgtgagcccgtggcgccggcagcaggcgacgcaggcacgcgcatcggcgacggtcgccggggtgaggagcagcgccgggcgcggcgtacgcggcgaggcgaagcggaggttctggatggtggcgttgagcagggaagggtaggagacctaccgacggcgcatggacgagccgggacgggtcggtggtggccggcgagaggctcgcgacgcagcggaggaagctctcgtggagggcgccgtcgccgtcgtgctcttgctcctgcggggaacaaggccagactaggaggaagacgaggaggaggagacagaggtgcgcgaagcttggctgcatcaccgccttcgtcttgatcctggccttgccttcttctacctccaggctccagcgacactgggcttggtgtggctaa

SEQ ID NO: 33262 - DNA, 663 bp, Setaria italica
  misc_feature (607)..(663): n is a, c, g, or t
  Peptide Sequence Number=SeqID_99236
tcgtaactagttccgtacctaagtaggtctaccttgtaggaagaaggcagctcacatggtcaaacatgcgggcaaaaccaccgcccataacctgaagagcatgttcagcaggaagggcctagataagagcaaggaagagtgccaaaatgatgaggaaggtgatgtggttgcgatgaaaatagacgggatggcagctgatcctcctgtaccgagcaacgatgccgtagatgcgccagagtctgtagctgatggcaaagacaaggtgcagtgaaacgtagtctgtgttctgctgtatatgcaaatagccatggtctgagcctgcgtaggatggtaggtactagttaccacttaccaaatagtcccctagcaaccaacatagacatacaacaggatataaggcgttaagaaaaaaaaagacatagacgtcagatcttgagaagtgctaggctggtcgtcgagggttcctgagtgtccttgatctatatggtttctgttgtgtattcaggactcgaggaacttgtgtaaatacatgtagattttggaagagttcttttatggctcaattgaatccaagagttccaagtttagcgacaaaaaaaaaaaaaannnnnnnnnnnnnnnnnnnnnnnnnnnnnnnnnnnnnnnnnnnnnnnnnnnnnnnnn

SEQ ID NO: 33263 - DNA, 1001 bp, Setaria italica
  misc_feature (934)..(934): n is a, c, g, or t
  misc_feature (955)..(955): n is a, c, g, or t
  Peptide Sequence Number=SeqID_99237
caccgcccataacctgaagagcatgttcagcagggtggaacacccaaagtgggcaaagctagcacaccgaggtcaagcttttcatcgaggaccaataacgaaagtgagtcctccgaggaattccagaagatgtctgatgaatttgagcctgttgacattgaagggtcagaaaagcctgatgtttgggtacatcgcccgggcagcgacgtcactagtacatgggagccccggaaaggccgtcctcggtgccaggattccaaaatccagcgggagaatgatgcttgcagcgatagcccaaggtcatcagtgtcagaatctcaaagaagcgactccagtaccgaagaacccacgggtggtagatcgcaccgtcacctccgcaaggtcaagaagggtttgggcaagctagctggagcagtgttccatcggagccccaagaatgagaccgatgatgacgcttccccatgcgtgacaccccacccaaacattcagcctgttggagaaagcagggtgtcagtaacatatgtggtcgatcaagatcctgggagcaacagaaagggtacggtaacagatgaggagcagcactcaagccctgagagggaggagccgaacagtccgaccaagaggcacctgaggaagaaggcagctcacatggtcaaacatgcgggcaaaaccaccgcccataacctgaagagcatgttcagcaggaagggcctagataagagcaaggaagagtgccaaaatgatgaggaaggtgatgtggttgcgatgaaaatagacgggatggcagctgatcctcctgtaccgagcaacgatgccgtagatgcgccagagtctgtagctgatggcaaagacaaggtgcagtgaaacgtagtctgagttcggctgtatatgaaactaaagtaaaataaaaataaaagaaaacaaaaaataaaanaaacaaataaagtaaataaanaaaataaactaaataaaattaaaagttaaaatttaaaagtttaaaa

SEQ ID NO: 33264 - DNA, 314 bp, Setaria italica
  Peptide Sequence Number=SeqID_99238
cacttgttctgttcacaatgcaatgcatcattatctaaagacaaggtccttaatgactacaccagtcgtcaaattgaagaacttacccgggatgtcacagcagtaatatcgatattcgatagaaggttctctttaaaatttgctgatatagctgagaagattctaatcttttgttgccatgatagtttattgtttattgcgtatgttttgttatgggggtgtaaatcaccagatgtctcgattgatcgtcacggtcttgaatgctgctctctccgtccgattaattatctgttattggtttcattcaaggagag

SEQ ID NO: 33265 - DNA, 230 bp, Setaria italica
  Peptide Sequence Number=SeqID_99239
ttccgagtacaacaccagtagcaaagatttccttcagcttccagctgtcaggaagggagacggcttaactctgtccacaatacggatggtgatggagacagcgtaaatggtgtagttcttcatcctttggaagatgcatctgctggtgaggacagcgctgataatgacgctaagacctggctcagttaggacaatatcggaggcgctccttgcagcatcagtagcatcag

SEQ ID NO: 33266 - DNA, 506 bp, Setaria italica
  Peptide Sequence Number=SeqID_99240
ttttttttaatttgtactattgattatatatatatgactcaaaagtgaggagagaacacaacagcactatgggatgtggcagaaaatttttgttgcattatttctccatctcgcattccgcgagatcaccgggctagttaggggaaaacgcaagtaaaaacgattacaccacgcgcacactccactagtgaaaagcgtaagagtgaaaggagagagaaaaaaaaaagctccctagcaagacggggcacccaaccataccatcatatagcagtatctggtggtggtatagcgctttacaactagggctgctcggtcagatcagccacacggtttttttctttgttttggttcatcaccggaaaaattcctgtagtaatcagatgactccattcgcaaatactgggcgggcgggcaaaggtttcgtcgacatcccggcggtgtctcacaccgtgtagttctgctggatggtgtcggtggtgaagctcaaggggctggacatcgacacc

SEQ ID NO: 33267 - DNA, 898 bp, Setaria italica
  Peptide Sequence Number=SeqID_99241
gatgatctcgataacgataccgaccgcaatggagcagatacagaagttcccaatagcagtgaggaccttctggaagtgtccaaccttgcttgcatgttgagccggaaaagacctcatcgccagggcccttggtcaccgggagggactctccagtaagtgcagactggtcaaccttaagaggatcaccctcaaggagacgagcatcagcagggacaatgtcaccgagcttgatgctgatgatgtcaccaggaaccaagattgcagcctcctgctcgccccatcggccatctctcagcaccttggtcttgggggcaaggttggccatgagcgcagctgcagcattaccagcgttgttctcctcgatgaaagagatggtggagttaataacaagaagcacaatgataccgacgaagtcctcccagtccggaggcttgccaccaccgttggccagcgcaatggccatgatggcagccatctccatgacccacgacagcgggttccacatgaacccgaggaacttgagaatcttgctctccttcttctcctcgagcttgttggggccgaagatctcgagacgctgagcgccctcgttggaggacaacccctcgcgggtggcatttcagctgctcgaacacctcctcgatgggaatgttctccagatcgacggcttcattcttaatctcttcgagcccacccatggcggacgggtcctgtcagtccgcgccgagcccggccgggggaagcgagcgccggaaacagagcggggctctagaggccgagctccagcagcggcgagctctgggttctcgcttctctcctctcgcgagagggagggagagaagggaagggggagggagaggaatggaagtggtggtagtagtgggcgtcgacgggaacg

SEQ ID NO: 33268 - DNA, 3013 bp, Setaria italica
  Peptide Sequence Number=SeqID_99242
tttttttttttttatttgtagtaattgtactattgattatatatatatgactcaaaagtgaggagagaacacaacagcactatgggatgtggcagaaaatttttgttgcattatttctccatctcgcattccgcgagatcaccgggctagttaggggaaaacgcaagtaaaaacgattacaccacgcgcacactccactagtgaaaagcgtaagagtgaaaggagagagaaaaaaaaagactccctagcaagacggggcacccaaccataccatcatatagcagtatctggtggtggtatagcgctttacaactagggctgctcggtcagatcagccacacggtttttttctttgttttggttcatcaccggaaaaattcctgtagtaatcagatgactccattcgcaaatactgggcgggcgggcaaaggtttcgtcgacatcccggcggtgtctcacaccgtgtagttctgctggatggtgtcgatgtccagccccttgagcttcaccaccgactccacgtggcccttgagcgtgttcagctcccgccagcctcgcgatctcagctcgtctctttgcctgctccgcgatctcggacagctcgcggtagctgctcttgtcgttgaacagcgtgttggaggcggcctccggcggctggagaccgtggagtgtcctctgggcggtggcccattgcgcctccctctcctcccggccgtaatccttcttggtggtgaaggccgtcttgttctcaaggaggttgtcccaggccctgccactgagcacgaagcggatgaagaacttgaacaggtcgagcgggaagtagaacacgatgctgtacagccagacaacaccagcccagcccccagccgataccctcgatcctggcaaaaaccccagttggcgtacacagcaaggaaggtcgcaacaagttgagcaagcaggaaagcggtgaccaggagcagaccagggcgctccacgaaggaccagctacgggaacgggtgacgaagatcagagcctggctcacaatactgacttggaggtacagcgcagacatcatcttgccctcactgtccctgattggcttcacaccaaatttctccgggaagaagtcggtcttgtgcatggcccagaagaaaatgacagtcatcagagcaaggtagcttccgagtacaacaccagtagcaaagatttccttcagcttccagctgtcaggaaggggagacggcttaactctgtccttagagattgtcatgatagtaccgtcattgagaatggcaataataaggaccatgaagggcgagaagtcgtatttccagatcaaagcaatgagcataaacccaagcacaatacggatggtgatggagacagcgtaaatggtgtagttcttcatcctttggaagatgcatctgctggtgaggacagcgctgataatgacgctaagacctggctcagttaggacaatatcggaggcgctccttgcagcatcagtagcatcagcgacagcaataccaatgtcggccttcttaagagctggggcatcgttgacaccatcaccagtcataccaacaatgtgcttcttctcttgcaacctcttcacaatctcatacttgtgttcagggaagactccagcaaaaccatcagccttctcaatgagctcatctacaggaagtgattcaagtgtggagtccttgtttgtgccgagcaatgaggaggaaggatacatgttggtacccatgccaagcctccttccagtctccttaccaatagcaagctgatcaccagtgatcatcttgacgttaacaccaagaacaagagccttgcggatcgtctcagcactgtcgtgcctagggggatcaaacaggggcaacaaaccaacaaattgccatggtccaccagaggcgtcctttgatttctcaggtacttcctgtctggcaacagcaagtgaacgaagaccacgctcagcatacttgtcgattatagagtgcaccttcctcctcatatcctccctgcagttgcacaggtcgagaatctgctcaggagcacccttgctgacacggtgccagttgccgtcagaatcaatgtatgtcagcgcagtcctcttgtcgactgggttgaagggcaagaagtgcacctccctgataccagccctagcctccttaggatcagcaagcattccaaccatggcagcatcaatggcatcctggttctcagtccttgaagccctcgcagccaacagcaacacgtgatctttgtcgacgcctttgcaaaacacctcgacgaggttcttgtcaacactaagcttgttgagggtgagtgtgccagtcttatcactgcaaagcacgtccatgccagccatctcctcaatagcagtcatcctcttagtgatggcaccctgctgtgacagcttgtgggagccgatggccatggtaactgacagcacagtcggcatggcaattgggataccaccgatcaagaggaccaacaggttctcaattccactgcggtatgcacggtgctggatcgggaacatgacgatgatctcgataacgataccgaccgcaatggagcagatacagaagttcccaatagcagtgaggaccttctggaagtgtccaacctggttgggtgctgtccacaagatgagcagccttgccaaagaaggtgtgcactccagtggcaatgaccacagcctcaatctcaccttgcttgcatgttgagccggaaaagacctcatcgccagggcccttggtcaccgggagggactctccagtaagtgcagactggtcaaccttaagaggatcaccctcaaggagacgagcatcagcagggacaatgtcaccgagcttgatgctgatgatgtcaccaggaaccaagattgcagcctcctgctcgccccatcggccatctctcagcaccttggtcttgggggcaaggttggccatgagcgcagctgcagcattaccagcgttgttctcctcgatgaaagagatggtggagttaataacaagaagc

SEQ ID NO: 33269 - DNA, 715 bp, Setaria italica
  Peptide Sequence Number=SeqID_99243
aacctcactcagctcgaggttttcaacgcggcggggttcgggctccccggctccatcccggcgtggctcggcgacgggctcccgcccaccttccagtccctcgacatctccgcctgcaacgtctcgggggagatccccgcctcggcgcttgcggggctcacgcggctcaggaccctcaacctctcgggcaatgcgttctcgggcgcgctgcctgttgcggtctggtcgctcccggggctcagcgttctcgacgtctctcgggccaacctcaccggcccattgcccacgacagggatttcgctgccagccaatgcgcaggtggtggatctgtcggagaacctcttctatggcatcgtaccggaggccttccgccggctgttcgcccaggtgctgctgaccaatatctctggaaactactttgacggcaagctaagtgtgcccgatagtggtggtgggaatgtgtcttctgagttgaattgcttccttgatgctccggaacagcgtacccaggctgattgccagcagttctatgccagtcgtgggttgccgtatgatgggccagttaccccacccgcgccacagcctgctcctgcaccggcaaggaagaagaagcacaagaatctgaggtacatactgatcggggccataggtggaggcctcctgctgatagctgcggtggcagcggttgtgttctgcattgcgtgttctgggagga

SEQ ID NO: 33270 - DNA, 1260 bp, Setaria italica
  Peptide Sequence Number=SeqID_99244
gggtccataacggatcccaatgctcaaattctccatgcagatgcagtgacaagtatttaaatacgctttacaatcataacattcagttgcccacaaaaaaaacactctgcacctccaccatcattgtatacccgacacaccatacatcggagaacatcaatgtgtacgtcaggaacaactatttcacgccaacgttagctagcgcacccaagaggtctgttggctgtcgctccagtcgctcatcattgtccctgtaggatcaactcaacgagtaggcgctgcgcagactgtgcctgatccggtggtccagataccatgatcatagcttcattcccctcagaaggtgggtcgtagacggcaatgtctgcaccggagagctctgtaagctgggccaggttgtttccactctctccatagacaagatttaggatgctcccagaaacagcagtctcatatgtgatgcttgttatcgcagcatgctgaacttccctcacaagattgttttcctctggaaatacaattccatgatttaagttgttgattacaatgccattcggctcagtaggcttctgaatcccattatctgaatagtcgatcatgacaccattctcgttatcaggtttctgaatttctgaaggactgagctctaaagaactgaaagtcttttccacagaatccattccataactgagagagggtccatgatcaaccttatgggcattgtccattaaatattggcttgttgaatagatatttgcctgactggttgcatttgattcagcaatttctgaagagggaatatggccattgttgtagtcggttccgtcagagaaaacatgattacgcagtttccagcaaacaaggcataaagcatccctgacattcattagctccccagtgatctgtacaactagttcaaagcttgaggcacaatctggaacatctgtatcatccaatatctgaattcttgctcctgttgcattcaccatttccttgattatagacccacctaaaccaactaaacaatcaaattgggttttcagcacaagggccctggctgagaattgagatgtcttctcaaatgttgagcgtgtgttactttccacctccatcattctgtcaaatataaggagtagtgcgctttgcactatatgatattctgagtctggcttctctagggcacaaattgttatcacacgctccctgcaacagctaacaggagcactcacatcaatacaagcaccagtttcctcttcaatt

SEQ ID NO: 33271 - DNA, 300 bp, Setaria italica
  Peptide Sequence Number=SeqID_99245
cttccttcactctttgtgactgtggagatctcaccaagtttgcatcagaattattatcaggttccggagcaggtgcgagcgccctccccgcatccgcagcggtggcggcgccctcgtcctgtgcgatagcgccctcccccggctccccccgacgccagcgatgccgggccgacacgcgcctcggcccccgcggcctcccccggattacccctgtcctggtgatggcgatggtggctgcgcttgtggcgcttcgggaccgagccctcctccgcgtcttcccggtccatggaggcggacgcg

SEQ ID NO: 33272 - DNA, 1374 bp, Setaria italica
  Peptide Sequence Number=SeqID_99246
aatttcttggccaatacatatccgtcggtaacttggttttgcttgaagaaggaggcactatgttcagtttcggtgaagcaggcaaaaaatgccatgcgaaatctgtcctgcgtgtccatgatcccatgttttactggaaggttgcaacagaagcagaccttggcttggcagatgcctatattaacggttatttctcttttgttgacaagagagaaggtcttctgaatcttttcctgattctcattgcaaacagggatgcaaacaagagtactagcagtgggaccagtaaaaggggttggtggacacccctgcttttgacagctggggtcgcctctgctaaatactttctccgccacatttcaaggaagaattctgtcacacaaacacgtcaaaacatctctcaacattatgatttgagtaatgaattcttctcactttttctggatccatcgatgacttactcttgtgccatcttcaagacggaggatgaaagcttagaggcagcccagcgacgtaaaattggccttctaatagacaaggctaaagtcgagcgggatcaccatgttcttgagattggttgcggctggggcagcttagcgatccaattggtgaagcaaactggctgcaaatacactgggatcacattatctgtggagcaactacaatatgcgcagaaaaaagtgaaagaagctggcttagaggaccacataagcttcatgctgtgtgactatcgtcaaataccaactcgccgcaaatacgacaggatcatatcttgtgaaatgatcgagggtgttgggcacgagtacatggacgatttcttcggctgctgcgagtcccttttggctcaagacggcctgtttgtcctgcagttcatctcgatcccagaagaacggtacgaggagtacaggcggagctcggacttcatcaaagagtacatcttccccgggggctgcctcccttcgttggcccggatcacgtctgccatgtccgcagcatcaaggctctgcatcgagcaccttgagaacatcgggtaccattactacccgacgctgatacgctggagggacaacttcatggccaacaaggatgcgatttcggccctgggctttgatgataaattcatccgtatctgggagtattacttcatatactgcgccgccggtttcaagtcgcggacacttgggaattaccagattgtgttttcccgccctggcaacgacaagctgggcgacaacgacccttacgcaagcttcccggcagccaatcaagatagctcatgaatcgtctacagtggcacgtacaatgcctgcgcgatttttttttttggaaggggtacgtgtgcgattgatttcagtctagtctagtctacgtcct

SEQ ID NO: 33273 - DNA, 269 bp, Setaria italica
  Peptide Sequence Number=SeqID_99247
aagagggggagggccgcggaaatacggccggacgggagcctgctgcggccgctgaatgcgacgccgatctcggcgtcggtgccggacgacgccggcggggcgcagtacacgccggctgctgccgtcggggccgtcatgaagcggggcagggggcgcccggtggggttcgtcagccgcgcgacgccgatatccgtggcagtgacggccgccgcgcccacggcggcggtggtcgtgtcagcgccggcgccgcagacacttgttcgggccac

SEQ ID NO: 33274 - DNA, 330 bp, Setaria italica
  Peptide Sequence Number=SeqID_99248
gaagcggcacctacttcacgcccagagcacagtgtcagtgagtgtacagagggcatgtacgccatggcaagcgccggcggcacggaggagcctgctctgttcgtgaagcaggggagcaagctccactccaagatgctctccaaggaggcggcggcgcagctcgccgtgccgtctttccgggtgtactactccgtggcgtcggccggcgcggtgccgttcctgtgggagtcccagccgggcacgcccaagaacgactcgccctccgcgtccgcgctcccgccgctcaccccgccgtcgtcctactactccgcggaccggggcggcgccggc

SEQ ID NO: 33275 - DNA, 240 bp, Setaria italica
  Peptide Sequence Number=SeqID_99249
aaatcggcaatggaaccaatgtcgccagtggcaatcttttgtttaacacgctgaatgatgtggccatggcctggcactattggaggcatgcctgtggctacctcaagcagaacaactccgaaactgtatacatcgctactctcagtgagccttccagtgaggtagtactcagggtccatgtaaccagctgtgccagctgcagtggctgatatgtgagtctgagtatcgctgagatatgtc

SEQ ID NO: 33276 - DNA, 349 bp, Setaria italica
  Peptide Sequence Number=SeqID_99250
tgttatcaacccgcaggcgggggacccgacagcgtgcctccttgaaggcgcacgtcgaggaaggtccacttctcattgtcctggaagacccgacgcttgaaccgcacgttgccgtacttgcagtactccgtcgcgcggcgccaccgacccgtgcgagggcgtgcagcgttctcttccatggccggaggtggactagttggctgcaagtagaagtgcaataagtgcagcagatggagcgtcggcggcgtcagaggcggagccggccgccggtgcttgctgatgtagagctgtacctgcagcacctcctggacataatctgctatggattcggagggcggagctggtggta

SEQ ID NO: 33277 - DNA, 508 bp, Setaria italica
  Peptide Sequence Number=SeqID_99251
catacatggactggtcatggtccaaggatagcattttatcagtaccaaagtagaaagagaaaaaaacagcacctaacttcttttaaagtaaagattgggccaccttagctgcaaatatattgttgttgagtcttgagcacttagatgcagaaaacaagaatagaaataattataaagtgatgcaagattatgctaagatccctgcttgtgaagtgggcaagggagcccacaagatgatccttgctgcaaaagaaaagggtgagatttaaaggtgggtgaaggaatgaatttccatgatttggcctttttctttggagagattcctaaagtgctcgttcaactattttattttgaaagctaacagatttctgtattcagctcttgcaaaagggccgatgaactaactaccgaaaggctttcatctaggaaggcaagttggctacctaaaaattaggatcccattagaaaaaagagcaatcatatcatgctagttatggaaaaaaatagg

SEQ ID NO: 33278 - DNA, 465 bp, Setaria italica
  Peptide Sequence Number=SeqID_99252
ccacggcgggtgtcgcgcccgtccgcgcggcgcactcgcacgtcgtcaagctcgggtccgtcgaggacactttcgtggggaacgcgctgatcgacgcatactccaagagcggcgcggtctcggacgccacgaaggtgttcgacgaaatgccggtgcgggatgtcgtgtcctggaacacggccatggccgcgatggtgcggcaaggggaggttgctggtgcgaggaggatgtttgaagagatgcctgagaaggacacagtgagctggaacaccattctggacgggtacgccaaggctggggaggcggagcaggccttcgagctgttccagctcatgccagagaggaatgtggtgtcgtggtcgacggttctgtcagcctattgcatgaagggtgacatggagatggcacgggtgatctttgataagatgccgaccaagaacttggtgacatggaccataatggtgt

SEQ ID NO: 33279 - DNA, 269 bp, Setaria italica
  Peptide Sequence Number=SeqID_99253
gtcgcatggtgatcttgtattaatggaaggtatagcataagtaaaacaagtttaatcattgagtacattaaaaccaccataacctaagtatagcagctaagcatagctacccaacagaaagataaaacccaggttgataaggaatgataataaaaactagacaaaccttaataggacccatcaatattaaatgcagagcaatgcaaaagtgattaacttcatcttcacgctcttgaaaactcttgaactgtgtttgttctactcgtgga

SEQ ID NO: 33280 - DNA, 813 bp, Setaria italica
  Peptide Sequence Number=SeqID_99254
ttcaggccgctcttgaccatgagcaccgctgatcgatcagttttagacactttgcagaggttgtactactttacccacaagtcgcgtaaaagttcagatgaactttaaacccaaccatgctgtactaatcaggcactcatcacactaccaaggtgtgactgcatagggacactacaaggcctttacaaagattccctaataagaagtaacccactaaggtttcggtgcgtgcataaacctccctaatgggtatagtgttttagcaaagcccacttaccaagaggaccgggctatacaacgactcaagcctctcctcttgccctttcggtaagattacccttaactagaatctaattaattagctaagaccagagccatgtagttcttgtggttgtactgtttcctgggtggttgctccatgttccaattaagcatggtgatcttgtattaatggaaggtatagcataagtaaaacaagtttaagcattgagtacattaataccaccataacctaagtatagcagctaagcatagctacccaacagtaaagtaaacccaggttgatgaaggtggtagggataaaactaggcacaccttaaataggacccatcatgtttatattcttaaagtgcatagcatatgcgtatagagcataaaagtaaaggttgcataggaacaaattgtgatcaagggtacaacttgccttcctgaactggctcttgctgctcaaagtcttcaaagccttactcttcgaatccctcgaactgcgatcctcaatccagatgttgtcaactccgcctatcacagcagcag

SEQ ID NO: 33281 - DNA, 340 bp, Setaria italica
  Peptide Sequence Number=SeqID_99255
gaaataatgttatctagtgattctcagttcagagttcggacttgagacggagtcggccatagcggcttgtgcagctgcgcacgcagcgtcagcgtcaccggagctcgtattgggcaacagatacgcggcgccatctccgcaggccctcgcggacgttttcgctgtcgtcgtcgaggtcgcggaaggtctcgcggtcctccatcgtgttcacgaagctaatcgtgaacagctccatcttccagtcctccatgcgagggaggtccgtgtgcctgtagacgaactcgcagatctccttgcgatcgatgggcggggatggcgtgcgtgcgcctgacgggcacgg

SEQ ID NO: 33282 - DNA, 249 bp, Setaria italica
  Peptide Sequence Number=SeqID_99256
ccgcgcgcggacgacttcgtggttgacaactgcaagaacatctacttcgcgggccacgagacgagcgcggtcaccgcgacgtggtgcctcatgctcctcgccgcgcacccggagtggcaggaccgcgcgcgcgccgaggtgctcgaggtctgcggcggtgccgctggcgccgccgcaccggacttcgacgcggtcgccaggatgcggacggtgcacgcggtggtgctggagacgctgcgcctgttcccc

SEQ ID NO: 33283 - DNA, 312 bp, Setaria italica
  Peptide Sequence Number=SeqID_99257
gcctcggaacatcacctcgcccagcgtccggccgtcgtgcggcacgctctccatcgtgtccgggttcttgacgtcgacgtcctgcatcgcgatgtggtgggacccctgccgcgccttcagccgggcccgctcctccgccggcagcgcgtcccactccggcatccacgtgcacacggtcgccgggccgtacgtctccgtgaggccgtagatgtggtacaccacgaagccgagatcctccaccgcgaacaggacgcgcggcggcggcggcgcgccgccggtcatgacgcggaccggggccccggcgacggcggg

SEQ ID NO: 33284 - DNA, 2219 bp, Setaria italica
  misc_feature (1)..(17): n is a, c, g, or t
  Peptide Sequence Number=SeqID_99258
nnnnnnnnnnnnnnnnntttttttgtttgtgcaccttttgttcattcgaactgtttcattgtaccatagtacgccatcataggtgcacctacacgttttctttatttctcccataaaggtaacaagcatcagggagaatctctccagagttggcaattacatacagttcttttgatcggagagattagagggtacctagtttatttgagattcggaaatctgaaggacaaaaatcaatctgttgtgaggtatatctttctgagacgagcgatatcattagcagccatgtagaatagatcagtaaactcgtgcttttggtgggaaagattgaacttcgtcatccagggtattcatgtgaactggcctgtatgctagtctaaccttctcgttctcccaataccctagtgagtgcttcatccagttctcatcatctcttgtcgtaaaatcttcacgagcatgagctcctctgctctctttgcgagcctctgctgaatgcatggttatgcatgcatttatcagcaggttttctaactctatggtctctatcaagtctgagttccatattagacttctgtcactgatcttgacatcatggaaactctcccatgctttgctgatcagtccgcagccttccttgagagtttcctgtgtacggaaaaccgcagcattgttttgcataacacgttgcatgttgagacgaatctttgaagtaggcaacgatccatttgcattcctcagcttatccaaccaagcaatagtcttctctccgacacctttttcaagaggcttctgcttctctcctggtttggatatctcagcaaccctgtttgcacaagctctcccaaatacaactatatcaagaagtgaatttgcaccaagccggttagcaccatggacggatgcacaagcagcttccccagcagccatcagaccaggaacaacagtatcagggttatcaccctttatatgcaccacctccccatgataatttgttgggataccacccatgttatagtgcacagtaggcaaaacaggaatgggctctttggtaacatcaacaccagcaaaaatcgcagcagtttcagatataccaggaagtctttccttgagaacttctggaggaagatggttgaggtgtaggtagatatggtccttcagtggtcccacaccacgtccctccctaatttccatcgtcattgatctcgaaacaacatcacgagatgcaagatctttagcagttggagcatatcgttccataaacctctcaccttcactgttcctaagaatgccaccttcacctcgagaaccttctgttatcaggcatccagcgccataaatgcctgtaggatggaactgcacaaactcaagatcctgaaggggtaatccggcacgtgcaaccatagcgttgccatcaccagtacatgtgtgagctgaagttgctgagaagtaggctctaccataacctccggtggcaagaattgtatttgaagcacggaaacgatgaagggtaccatcctccatgtttagtgcaattaccccttggcaggtgccttcattgtccatgagaaggtccagtgcaaaatattcaacaaaaaactgagtgttgtgcttcattgcttgaccataaagtgtgtgtagcatagcatgccctgttctatcagctgcacatgcacaccgataggcctgcccaccttttccaaaatctaagctttggccaccaaaagcgcgttgataaatttttccatcttcagttctggaaaatggtaagccgtagttctcaagttctataacagcttttggtgcctctctgcacatatactgaatagaatcttggtcgcccaaccagtcacttcctttgactgtgtcatacatatgccatctccagtcatcttcggtcatgttgccaagagcagcatttatacctccctgagctgccacagtatgtgaccgcgtggggaagagcttggtaatgcaggcagtgttgaacccatgctccgagaggccaatggctgccctgagccccgcacctccagctcccaccacaacagcatcgtaggtgtgatccaccaccgtgtaggacgagctcgtggagaagagcctggaggccgaggcggcggcctgggccttgcggaggccccgcgacacgcagctgcgccacatctcgcagatcagggcggaccacccttggtcctcgcgcgcgcgtggaggttttggtttta

SEQ ID NO: 33285 - DNA, 411 bp, Setaria italica
  Peptide Sequence Number=SeqID_99259
tggggtcgatccggaccacgctgttccaccacttcggccacgacgccacgccccaaggtcaagaggttcgtgaaggtcatggtcgccaagctccggcacgacggcaaggaagtcgagcaatcgcacgctctcagggcggccctggagcaggacgtgcacagcgtcgaggaggtgtacgccgggccggctgctgctgcggcggccggcagggtgccccggaacggcgtcctggtcagcgggtgccagacggacgagacctcggcggacgcgacgacgcccgacggcgtgtcgtacggcgcgctgagcaacgcgatccaggccgtcctcgccgaggggaagcgcggggcggcggtgacgaaccgggagctggtggtcagggcgcgggagctgctggccaagcaggggtacacg

SEQ ID NO: 33286 - DNA, 758 bp, Setaria italica
  Peptide Sequence Number=SeqID_99260
ttcttgaactggttgattgcatcagccaaagcagaaccccagagcaccatgtacttatcgccaattccgtatggaacatgcaaccgtgacaccaaagcaatgtccagtaggctaattatggcaagaccaacatgagcaaacacaagaatattcctgagctgcttgtgcttaaaatagcggttgtaggtatatgtgccaagaattagactgaaccatccaatcacacgtgcagtcccaagaaaggatgcttccaaatgtagctcctctgtttgataatagaacatgactgtcgagatatttggaattattacatttgaaaagaaaaaccacaccataggtctggataaagaaaacaaattagtaacttcgatcaaagttaggtgtacacattggagagagtatatagcaagagagtctttggtcaccgcagaatggttggctgcctaaaagctgtgcacaaactgaagaaggctgatctcagagacagacatggcgatgaattaattgggccattgtgtttctcattagcctcagcccgctttgacagtggtctgcttttattacttttacgaattttctttcgccttctagtgccctcgtatccaagtgcttcactagagcatttttcagcaccctgattgtctacatacttatgttcatcaatggcactctgtaatccttttggagaatcctcaacaaacatgcaggaaacgagttgaaagaatgggagggctgagaaaacacatatatggcatgga

SEQ ID NO: 33287 - DNA, 1150 bp, Setaria italica
  Peptide Sequence Number=SeqID_99261
tttttttttttttacaagacagaaaaccttaaccccatttttcattgatatataaagaatgtttacaaagaggtcagctatctcgtgtactagctccataattattctagttttcaaaaatgtttaagtgctgatgaatgctgcactacaaaatcaaagttgtctgtaaaatcaggcaaacagttagttttgcctatcatttcccactcatcaggcgctcagccagaagcatgtcatccggagtggtcaccttaatgtttgtgtaagagccttccgtaatatagacagggtgcttgagatattctacaatggatacatcatcggtgacttcaaggccatcccgtttaacaagctcaaaaccagctttgagtaaatcaggcttcataacctgtggagtttgcatttcccatagagttttccggtcaagggtttttacgacaaaagaatcactattagcctcctttattgtagctttcacaggcacaccaagaacagctgccccatgcacagcagcatcttgtaagaccttttttacatcttcagaagaaactaagggccttgcagaatcatggacacaaacaagttccgaatccccatcaatttcctgaagtccattaaaaacagagtcctgtctctcttttcctgggcatgcaaatttaagaggtatttgcaagttctcaatagaaccttcaaatacatcactatagtctgggtcacacactaccacgacttctttcatttccttcagttgacagaatgttttcaaactgtgcaatgcaattggtagtcccagtagtggcagatactgcttcggcatacttgcccccattctctttccctgccctccggacaagaggatcaccgagacgctcctctccttcacagccacacccggcgcgccgtcggcttcggaagcgcgaatcgccggattcgaacgcctcgtgggccgccgaagagcaaccccgtagctcccaccagtccgaattcggcgggacgcggggagcaccgcgggcgccgcgaaaggcggcgggggcggcgtcgtggctggtgggaggcgcgcgtggagacgaaggcagaggcggagctccatctcggaggcgctgtccgcggcgaacgcgagggggaagccgaggtgggtggtggtgacgaa

SEQ ID NO: 33288 - DNA, 394 bp, Setaria italica
  Peptide Sequence Number=SeqID_99262
caatcccagtggacactgtttcgttgcatcaaagttgattgattcgataccggtctctgtggatgctcaacttcctagtgctaagaaacaagctgttgacaatggaaaccaccaccaaaattctgacgctggcactctgccaagagcattgtcatcggtcattgcggcaggtccctacacaaccaccgataatctgttgtttgagccattgcaagaacttctgtcatatgcttgtcgtaagcaacctcaactgctcatattgatgggaccctttattgattctgatcatcctgacataaaaaagggaactgttgaccagacatttcatgattatttttccattttgaaattctgagaaagatacaagacttttacccagttattttggggaaca

SEQ ID NO: 33289 - DNA, 353 bp, Setaria italica
  Peptide Sequence Number=SeqID_99263
cgctggtggtgtccaagaagaagaggaagctgctgcccttcaacccctgcgaggaccccgcgcagcggctccgccagatggcctccctcgccaccgcgctcaccgccaccggcgccgccttcagcaaccacctcacctaccagcccggcatggcgccccgctccgccaaccgcgccgccctcgaggccggcgggatgcaggtgctgccgaaggaggacgtggaggcgctgagccagtgccagcggatgatggagcgaggggagtgcccgcctctgctggtggtgtacgaccccgtggaggggttcacagtggaggcggaccggttcatcagggacctcaccatcatcaccgag

SEQ ID NO: 33290 - DNA, 654 bp, Setaria italica
  misc_feature (616)..(654): n is a, c, g, or t
  Peptide Sequence Number=SeqID_99264
tgatttattgcaatctttgctaaatatttggtattcatttggattcattttccctccatggctctactgcctttggaatttggttcgtaagcaggcaatcaatggagaactgaatcttatccgttgtatctctttgtaggaaaatgagtacaaaagttggtgtccactttattcaactacttgaagatgacgaggcggctttcgataaccttttctgtgtagcatttcaggtgcttgatgctcaatggctcgcaaggcaagcaagttatatggaatttaatgaggttctgaagtctacacgagttcagttagagaaagagcttactatggggtgcatttctagcgttcaagaattgccatcattcagaatgctaacaaggtagtcatgtttgtacttcgctggaaaagagatacttttacgctgtccataggttgtttaaatttgttgtccattcctttactggatgcttgtatgatgccttgaaaggaaaatacttatcaacaagttttgacatcaagatgtgatactggtgtatattggtcataatataaagctccactccatataataggcatatatgatgccttggggacaaaatacttaacttcctaattnnnnnnnnnnnnnnnnnnnnnnnnnnnnnnnnnnnnnnn

SEQ ID NO: 33291 - DNA, 602 bp, Setaria italica
  Peptide Sequence Number=SeqID_99265
ggatctctctctgaatctctggcaccgacgctcctctcctctgacctcgccaccttgccgacgaaaaggggaggaagagaaagcgcggagactgaggaattggggtctcaatcgggcggtgaacgctcgcgattagcgaggtaagtttcactatgaatatggttcatcaaatagttctttactggcaactgcctagttttgtgtgccagctgttgaacttctaaattattcctgggattcttgttcgccaaagcatattggttagtctggtcagctctctactggttagttgtttccaacgtatattttctgatattgctccattctctctcagagcaggcatgattcatacatccagttagtatggcctcaaaagctataaaaagaaggccttgcaggactgaaactgatagcacaagtgaaaaacgaatggagacaacaataccaaatcctgtgacagaacctcttctaggaaatggtcctcatgaagataaatccaagagatacgagcctgctacgtggtcaggtttctgggatgggacaagacaggagtgccttcgctgggcgcatcttctatcaatttttattgctcaatctgcaag

SEQ ID NO: 33292 - DNA, 472 bp, Setaria italica
  Peptide Sequence Number=SeqID_99266
cagttccacttaatctcagtccattacaggtataaagattgagattgttgagacaaaaggttagatgtgccatatgactgctcctctgtcaagcatcagggtgctctgaaagagcattggaggttggcttatcctgaccgacaacttcctcctctaaaatcagatctgtggaaggagatgggctggcaaaactctgacccatcaacagattttaggttccaagtgatgatgtttcatgataaattatcatgcattatgttgacaccacttgaaccaatatgatttttatgctgaacttgcagggcaggtgggttcctgtccttggagaatctaatttacttgccagaaattacccagatttcctttcataggctactgcacaaggtggagggtaagagagctgaatgggagtatccttttgcagcaggtggtgtaaacatatcttatatgttagttcaaatgctggatttac

SEQ ID NO: 33293 - DNA, 1493 bp, Setaria italica
  Peptide Sequence Number=SeqID_99267
cggctgccagtgttgggccaatagctgcgagttggtgaaattgcttctcgcgttttgagtagttgggcgtaaattctattgcacttaggtgttctaatttgttcaatacctggggttaaatttgctggtattgatctgtttctctatatttttaggtaagttttcactatgaatatggttcatcaaatagttctttactggcaactgcctagttttgtgtgccagctgttgaacttctaaattattcctgggattcttgttcgccaaagcatattgagcaggcatgattcatacatccagttagtatggcctcaaaagctataaaaagaaggccttgcaggactgaaactgatagcacaagtgaaaaacgaatggagacaacaataccaaatcctgtgacagaacctcttctaggaaatggtcctcatgaagataaatccaagagatacgagcctgctacgcggtcaggtttctgggatgggacaagacaggattgccttcgttgggcgcatcttctatcaatttttattgctcaatctgcaagaaagatagtaaatgttctttctgaatttggatctttgattgcaagactttttggttgctcttcggctccccaaagttcacaaaatggacagacagttccacttaatctcagtccattacaggtataaagattgagattgttgagacaaaggttagatgtgccatatgactgctcctctgtcaagcatcaggatgctctgaaagagctttggaggttggcttatcctgaccgacaacttcctcctctaaaatcagatctgtggaaggagatgggctggcaaaactctgacccatcaacagatttagggcaggtgggttcctgtcttcatgataaattatcatgcattatgttgacaccacttgaaccaatatgattttatgctgaacttgcagggcaggattcctttcataggctactgcacaaggtggagggtaagagagctgaatgggagtatccttttgcagcaggtggtgtaaacatatcttatatgttagttcaaatgctggatttacaatcaggaaaaatgagtacaaaagctggtgtccactttattcaactacttgaagatgacgaggcggctttcgataaccttttctgtgtagcatttcaggtgcttgatgctcaatggctcgcaaggcaagcaagttatatggaatttaatgaggttctgaagtctacacgagttcagttagagaaagagcttactatggggtgcatttctagcgttcaagaattgccatcattcagaatgctaaaaagtttcgctctgatcaggttgaggttcttggttgagtgctggcaccacctgtggatcctgttgtagctgcgccagtaacagcgggtggtccaggtagcagctaatgtcaaagttggtaacagcattggcacctcggtattcaatggctgcaagatcataggccttggctgcctcctcttgagtgtctgcagg

SEQ ID NO: 33294 - DNA, 634 bp, Setaria italica
  Peptide Sequence Number=SeqID_99268
ccttcttcaaacaaactgaaatctgccagacctacaccatccttgctgccttcatcaaccaaagaacaaccatcgaacaggcacccaatgttgctatcaaagtctgcatcagtgaaccactcattcaggttgattgagctgccaaagttagatcttgacatggtatccagctcatagtccatgcaagggctccataagctctcttcaatgctgtcatcgactgtgaggggctctgcattgttagcaggctctgcattagcatcaggctctgcattatcatcaggttctgcattgttatcaggtgtcttctcttcgcttgagtcagactcttggactgtagtttcgctctgatcaggttgaggttcttggttgagtgctggcaccacctgtggatcctgttgtagctgcgccagtaacagcgggtggtccaggtagcagctaatgtcaaagttggtaacagcattggcacctcggtattcaatggctgcaagatcataggccttggctgcctcctcttgagtgtcaaatgttcccaagtagaggtacttgttcccaaagactcgcccaatccgtgcctcccacctcccattgtggtgatgcctggccacgcctttgtacttggagacgcctctgg

SEQ ID NO: 33295 - DNA, 454 bp, Setaria italica
  Peptide Sequence Number=SeqID_99269
atttgatagatgatcagattcaatgttttcttcctttattttttagaaaataagacatagtagttaggatcacctgtatctgaatataggacagtaatgggattgtctagtctgcattgaagagaactaagaatgcaagctatttaattgtgccgaagtaaggttgatgaccttcataaaatacggttaaagcaggtggccttgttagtaagtaggacaattctacaacaaacaaagtagcccttaaatgctggtataagctaacttgttaaaagaggtgcaaagagcatgaaactataaacattacatcgaggaatatagtacactagtccataccaaatgttcccaagtagaggtacttgttcccaaagactcgcccaatccgtgcctcccacctcccattgtggtgatgcctggccacgcctctgtacttggagacgcctctggagaagcc

SEQ ID NO: 33296 - DNA, 462 bp, Setaria italica
  Peptide Sequence Number=SeqID_99270
cctgaaagtcaactattggtatttgatggaccgaaagaaacagacgtgttttcatggacagtgatactttcagggtatgttagagttgatgaatgtacgaggtaatagaatgcttccgttcaatgttgcaaggaaacaaaaggcctcatcacaccagtaatctcctgaagtgttgctctgatttggctactggcatccttaagctgcatgctccaactatattaataggcaatcaaaatcgtttggaagaatttgaatattccaatgctctagttgacatgggaagtgtgagaacgtaacagatgccgagatgctatttctatgagtcaacatatgatgaagttgcatggaatgtgaccatctgtggactgtggttgctctaacttctaagttctaaccgtggtcatgcatgcaaggcactggaaactttccaacagttgatagatggcaggaagaggccca

SEQ ID NO: 33297 - DNA, 560 bp, Setaria italica
  Peptide Sequence Number=SeqID_99271
ctcaaatattgcatcaattctactcttcttgatattcacattcgcaagccatgcagttaaataaaacctgtaaaacttcatgcgaagggtgactggcaggtcgctgactccctgaaatataggcgcaccaattttcaggcagtgggcaggtctcgcctgactgaaggccaatactctgaagttcatctgattcaccatcatatagctcatcaccccaatctaatgatgtctgatgttctgcaccttccttgaaagaaatcgagagaagttccaagacaagcagtctctaaaaatgcaaatggtttccattgtcaggtgactttgtccaaaaaagagaatgcgagcaagcaaaacaaacctgattacgaacagcacaagttaaaacacagatgtactgaaaactgaatgcaaagagggatgtaccttcaactttaggtctgaaacaaacatctcaacaagctcctgggcaagactctctaagatagttcacaaaataaaattaaacataagaattctattacagtggattagaaacatgccaacatgaacctgagcagcct

SEQ ID NO: 33298 - DNA, 1476 bp, Setaria italica
  Peptide Sequence Number=SeqID_99272
accaggatgtgttttttctcaaacatgagaagcaaggtatttaaagtaagtttgttcaatgagataatacagcataccgcagagaaaggtatgctataattaatagttgttctgccaatacatcaaactcatttaacttttgaaccttttataaaaggtaaggatataagataggaaatccttggcatatccaacagaggaaaggtcatagtgacttagcaagttaatccacatgcatttatcaaattcaaagtgtatgcaccactggaaatactctgatgtgattcataagggcagtgaatcgttataggtatgcattggaaagcaaaaggacaagtcacgtttttgcaggagcatgccctcagtaatgcatgcgaagatcgatattgcacacttacaacagccagaacaaacatgaagctaggcaaatgatcctcaaaaactcaggagctatcaagaaaagcaaaggagctatctaatgcagtttaaagaacagattatggtcaatgatcttctcccaaagcgattccgcggtgacccttcattgggtaactagcatggttttgtcctgacttagatctgtagttttcagcaactaaatcttgctggccataagcatttgagagcagtactaactgttttctcttttccatccgacttgaatggtccaacaagatgcatcaaaatcttcaagacaatttgattttcatctcctcctcaacaagctcaaatattgcatcaattctactcttcttgatattcacattcgcaagccatgcagttaaataaacctgtaaaacttcatgcgaagggtgactggcaggtcgctgactccctgaaatataggcgcaccaattttcaggcagtgggcaggtctcgcctgactgaaggccaatactctgaagttcatctgattcaccatcatatagctcatcaccccaatctaatgatgtctgatgttctgcaccttccttgaaagaaatcgagagaagttccaagacaagcagtctcttcaactttaggtctgaaacaaacatctcaacaagctcctgggcaagactctcaaactctagtattgaaaaccatttgaatactggggcgcctccaccatcccctaaatcatttaaatcatcttgtcgttcagaaaattgtgcaacagaaccatttggggacactttggaaaaacagcgcatggaacgggaagctttaaccaagcggcacaaagcacggaccatattcttgtagcacgacagaagcatgtcaccgtattgctcctctctaagcgccaacttggagctcgccttatctcggatccccggcatgtccttgagcacccccaaatccgtccccggcatgtccctgtgggagatgtgggcgttgacgaccaaggaggcgtgggagcggccgtcggcggcggcggccagccactgttccgtggcggcgtgcagatgcgaccattggttgcgcacgttgcga

SEQ ID NO: 33299 - DNA, 264 bp, Setaria italica
  Peptide Sequence Number=SeqID_99273
cgccactctcacttccagctgcattgcgcgcgcacagcggcggcaatggcaccgccgcgttcgcacctgctgcccgccttgctcgtcctatgcgcgtgcaccgtggcgccgccgccggctcccgtcgccgccgccaacgtcccgatcacgacgtgccggtccttctgcggcaacatcacggtggactacccgttcgcgctccaccccgggtgcggccacgcggggctccgcgacctgctcttctgcatcaacggcgcgctgatg

SEQ ID NO: 33300 - DNA, 236 bp, Setaria italica
  Peptide Sequence Number=SeqID_99274
tctcggggatagctggatctcgccggaggatttcacgctctcctacacgccgctgctcctgagcgtgtcgaggctcgacgacaacgccggcgacgaagccagcaagatggcggagacggtgaaggagcagatcgcgtcaggcaatttcaccgacgctgagggttcgtggaacgatctgctgcatttcataggcacctggagcggccacgtcgtaagtgctgacagttgacttctta

SEQ ID NO: 33301 - DNA, 1700 bp, Setaria italica
  Peptide Sequence Number=SeqID_99275
gcttgccgcagaccacgcccggctcttcgacatggacaggccctgctgcccgcttgctctgcttcccctgctcctctgcctcgcctcgctccgtgccggctccgccgcgtcgatcaccaccggcacccccgacggctcggagcggtggggttacgtcgaagtccggccaaaggctcacctgttctggtggtactacaagagcccgcagaggacgtcctcgccggcgaagccatggccgaccgtcctctggctgcagggtggcccgggcgcgtcgggcgtcgggctcggcaacttcctggaggtcgggccgctggacgtgaacctgaagccgcgcaattcgacatggctgcagaaggccgacctcatctttgtggataacccggtcggcgtcgggtacagctacgtggaggacgacaccctgctggtgacgacggactggcagcaggcggcggacgccaccacgctgctcaaggcgctcgtcaaggaggtgccgacgctgcagagtagcccactgttcctcgtcgccgagtcctacggcggcaagtacgccgccacgctcggggcctccgtcgccagggccgtccgcgccggcgagctcaaggtcaatctcgcaggtgtcgctctcggagatagctggatctcaccggaggatttcacgctctcgtacacgccgctgctccttagcgtgtcgaggctggacgacaacgccggcgacgaagccaacaagaaggcggagaacgtgaagcggcagatcacggggggtcagttcgcggacgcgcagcgctcttggacggacctgctggatatcatcggcaccaggagcggcaacgtcgatatgtacaacttccttctggacagcggcatggacccggtgtcggcggacacgccgacggtctcgtcgccgagcaacgtgcaggcgttgaggtacgcgacatacctcggcagccaggactcagactccaacaccatcgacagcatcatgaatggggtgatcaaggagaagctcaggatcgtccccaaggacctcaagtgggtggaggtctcccaggccgtttataacacgctggtcaacgatttcatgaagccaagaatcgatgagattgatgagctgctgtcttatgggatcaatgtgacggtgtacaatggccagctcgacgtaatctgctcgaccaatggcgcagaagcctgggttcagaagctcaaatgggatggcctgaagagcttcctgagcctgccgaggcaatctctgtactgtggacagagcaaaggcaccaaggcttttgtcaggtcctacaagaacctgcacttttactggattcttggagctgggcactttgtgcctgccgaccagccttgcatcgcgctgagcatgatcggcagcataacccaatctccagccagttaggggattctacatgatatgcaaagatcaaaaggaggcttcaacttcaagcagctaggactaagacactgcagcattctttaagtacagtaaaggttgcacatttgaaaagcaatggaattgatgatacatgtgttttttccttatgttttccatttaggggcagaaagaacactagtgtgattggaaaaggttgattctccaaatgaaaggaaataaatgcaatcatttatgaattctagtgtatatttattatgttgcactttggaattaaaagttagaagttataggcataaac

SEQ ID NO: 33302 - DNA, 140 bp, Setaria italica
  Peptide Sequence Number=SeqID_99276
cgtcgctctgcccaccgccgaccggcgcctccgctcactgcccagcatcctcgctcattgctcagcatcctcgctcactgcccagcatcctcgtgctgcctcgcttcacccgcgggccccacctggaggacgaacggtgg

SEQ ID NO: 33303 - DNA, 457 bp, Setaria italica
  Peptide Sequence Number=SeqID_99277
aggacgaagttagcgctgcccgttgttcgtcgagcgacgggcgcttcgccggcgacgaacatccgacaggggttgtgatctttcagccgtaggcgcgagatttgtctttgcttgaactgagtgacagtaaaacggagaccggttagcgttgttcctgaaatctgttggttcatggggagtcagacaatggcatcaaaggctggtggaggtggagggggcggggccggcggtggcggtgccggtgcagcacaacgcgggcagatgcagaacctgtcaagacaagggtctttgtataacctcacccttgatgaggtgcagagccatttgggagaacccctgcatagcatgaaccttgacgagttgcttaagagtgtctttcctgatggcctggagcatgatggtggcactaccagccagtatgagcagacttcgggcctcttgcgacaggggagcatca

SEQ ID NO: 33304 - DNA, 227 bp, Setaria italica
  Peptide Sequence Number=SeqID_99278
ggatgtcctgccaagggttggccaatggaacatgatgaataagaaaatggttaatggtggtagagtcagcaactgggcgtgcattaacttttctcggaatgtgcaagatagtgctgctaggggcttctgtcatgagctggctatcatgtgccaaatatctggaagatgtccagctcacgctcttgagggcgctgacaggtcactttcagcagagcagtgatttgttt

SEQ ID NO: 33305 - DNA, 161 bp, Setaria italica
  Peptide Sequence Number=SeqID_99279
gctggcattcagggaacaagccgccccgcgcattatcatgttttgtgggatgagaacaaattcacagctgatgggttacaatctctcaccaacaacttgtgctacacgtaacatttactgctccgtccatctgttcatcttttaaattgaactctttttaa

SEQ ID NO: 33306 - DNA, 514 bp, Setaria italica
  Peptide Sequence Number=SeqID_99280
gtttaggttaccgtggttgattcaaagatttgccatcctactgagtttgatttctacctgtgtagccatgctggcattcagggaacaagccgccctgctcattatcatgtcctgtgggatgagaacaagtttacggctgatgagctgcagactctgacaaacaacctgtgctacacgtaattatatactgctccatcgatccattactttccgcgcactcttgaactgctgcctattaaacattgtttcaacttttgcagatatgctaggtgcacccgctctgtgtcaattgtgcctccggcatactatgctcatctggcagccttccgagctcgcttctacatggagccagatacctctgacagcgggtcaatggcagtggcgccgtggccctccaccaggtgggcacgcagcagcagggctgcgggaagtgttgctgttaggccctgcccgctctcaaggagaacgtgaagcgtgtcattgttttactgctgagatgctgagcagtgagcag

SEQ ID NO: 33307 - DNA, 690 bp, Setaria italica
  Peptide Sequence Number=SeqID_99281
gttcttaaacctatttctttgctgagctgcctgataaagaaccttcatcactacgatgtttctataacgcctgaggttacatcacgtggcgtcaatcgtgctgttatgggagagcttgtaactctttatagacagtctcatttggatgggcgtctacctgcatacgatggaaggaagagcctttatacagcagggccattgccatttacttctaggacatttgaaattacactgcaagatgaggaagatagtcttggtggaggacaaggaggccaaaggcgccagagggtatttaaggtggtgatcaaatttgctaaccgtgctgatctccaccatttggctatgtttctatctgggaggcaaccagatgctcctcaagaggctcttcaagtacttgacattgtactacgtgaattgcctactgccaggtattgccctgttggcaggtcattttattctcccaatttagggagacgccagcaacttggtgacggtttggaaacttggcgtggtttctaccaaagcataaggcccacacagatgggcctttctctgaatattggtatgtcctctactgcatttattgagcccctccctgtgattgatttcgttgctgagcttcttaacagagatgtctcagttagaccattatctgattctgatcgtgtgaagattaaaaaggccttacga

SEQ ID NO: 33308 - DNA, 717 bp, Setaria italica
  Peptide Sequence Number=SeqID_99282
tttttttttttttaaagttagaagcggtcattatcatcaaacaagcaagcctcacagaaatagttcgtcgatacataccagtctaaggtgtggctggctacaacttacaagaaatagttcacaacactgccaacacagttcaggtacttgaaatccacagatccccatagcggagttcacaacactgccaacacagtacaggtacttaaaatccacagatcactgggctagtctgaatgcataaagatgggtgtcaaactgcaaacatcgaaatagcgcttctacatggagccagatacctctgacagcgggtcaatggcaagtggcgcccgtggccctccaccaggtggggcacgcagcagcagggctgcgggaagtgttgctgttaggcccctgcccgctctcaaggagaacgtgaagcgtgtcatgttttactgctgagatgctgagcagtgagcagcttccaccaaggagtatcctggagtattccatgtacccgcgctatttcgatgtttgcagtttgacacccatctttatgcattcagactagcccagtgatctgtggattttaagtacctgtactgtgttggcagtgttgtgaactccgctatggggatctgtggatttcaagtacctgaactgtgttggcagtgttgtgaactatttacttagtaagttgtagccagccacaccttagactggtatgtatcgacgaac

SEQ ID NO: 33309 - DNA, 1097 bp, Setaria italica
  Peptide Sequence Number=SeqID_99283
ttcgggtttctttctcctctcccacgccttcccgtctctctgccttcctttcttagcggcggcgacagagcgattggcgccgcccttgccagtttcgccgggcgcttcgccgggcgcttcgccggcgacgagcatccgacagggggtccatcatggtgaggaagaaaagaactggccctggagagagttctggggaggctcctggagtgcctggacagggctcctcacagcgacctgagacaactcaacagcatgggggaggacgtggtttactgcctcaacaaggtgcccgtggtgcagggcaacaccagggtcgtggtggatatcagggccgtggagggccacctgagtctcaaccgcgtgactaccagggccgcggtggatatcagggccgtggaggcccaccttcacaacatccaggtgggccacctgaggttcaactgcgtggttaccagggccgtggaggcccaccttcacagcatcctggtggtggaccacctgagtaccagggacgtggtggtccgcgccccagagggggagtgcctcagccacactatggcaggcgtgggggaggtagtgttggaccaagtgttcctccaggtccatcgagatcagttcccgagctgcaccaagccccatacgtccaatatcaagcccctgtggcggtatcaccatccacactgggagctagctcatcctcgcagcctgcagaggccgaggtgagcactgggcaagtccagcaacagtttcaggaacttgctattcgtggtcagagttcaactagccaagccgttcagatggcaccagcatcaagcaaatcagttaaattcccattgcgccctggcaagggtacttatggttccaggtgcatcgtgaaggcaaaccatttctttgctgagctgcctgataaagaccttcatcactacgatgtaagcccgtaataagaagacataattctgcgccatagttcttatatgtttctgacaaccagccttttgtcatcaggtttctataacgcctgagtttacatcacgtggcgtcaatcgtgctgttatgggagagcttgtaactctttatagacagttcttctaaaaaaa

SEQ ID NO: 33310 - DNA, 2179 bp, Setaria italica
  Peptide Sequence Number=SeqID_99284
gatcgtgtgaagattaaaaaggccttacgaggtgtaaaaattgaagtcacacaccgaggaaacatgcgaaggaaatatcgtatatctggcctcacttcacaagcaacaagggagttgtcattccctattgatgatcgtggtaccgtgaagactgtggtgcaatacttcctggagacttatggcttcagtattcagcacaccagtttgccttgcttgcaaggtgggcaatcaacaaagaccaaattatctgcctatggaggtctgtaagatagttgagggacagcgttactcaaaacgactgaacgagaaacagatcactgctctactgaaagtgacttgccagcgtcctcaagagcgcgagaaagacatcctgcagactgtgcatcacaatgcgtacttcgaagatccatatgcacaggaatttggcataaagattgatgagcgtcttgcagctgtcgaagctcgtgttctgcctcccccaaggctgaagtaccatgatagtggcagagagaaggatgtgttgccaagagtaggtcagtggaacatgatgaataagaaaatggtcaatggtggtagagttagcagctgggcatgcattaacttctcacgaaatgtgcaagataatgctgccaggatgttctgtcaagagctggctcagatgtgccaagtatctggaatggactttgcacttgaacctgtgcttcccccatcgtatgcgaggcctgaacatgtcgaaagagcacttaagggacgctatcaagatgccatgaacatactcagacctcagggccgagaactggacctactgattgtaatactgcccgacaataacggttcactttatggggatcttaaaaggatctgtgagactgatcttggattggtctcccaatgttgtctgactaaacatgttttcaaggcgaacaagcagcagtatcttgcaaatgttgcccttaaaataaatgtgaaggttggaggaaggaatactgtgcttgtagatgctttggcaaggagaatcccccttgtcagtgacagaccaaccattatatttggtgctgatgttacccatccccatcctggagaagattccagtccttccattgcagctgtggttgcttctcaagactggcctgaggtcaccaagtatgcaggattagtgagtgcccaagcccatcgccaagagttgatacaggatcttttcaaagtatggcaagatccccaaagagggactgtcactggtggcatggtcaaggaacttctcatttctttcaggagggcaacgggacagaaaccccagaggatcatattctacagggatggtgttagtgagggacagttctatcaagttttgttgtatgaacttgatgccattagaaaggcctgtgcatcattggagcccaattaccagcctccagttacttttgtagtggtccagaagcgacatcacactaggttgtttgctaacaaccataaagatcagcgttctgttgatagaagtggaaacatactgccctggcactgttgtggattcaaagatttgccatccgactgagttcgatttctacctgtgtagccatgctggcattcagggaacaagccgccccgcgcattatcatgttttgtgggatgagaacaaattcacagctgatgggttacaatctctcaccaacaacttgtgctacacgtatgctaggtgcacgcgctcagtatcagttgtgcctcctgcatactatgctcatctggcagccttccgagctcgcttctacttggagccagatacctccgacagtgggtcgatggtgagcggtgctacgatgagccgtggtcctcaaccagggagttctcgcagctccagggctgttggaaatgttgctgtgaggcctctacctgccctcaaggaaaatgtgaagcgcgtcatgttttactgctaagatggatgctgtggcctgctgctctgagagagcagtatcctcctaccttgcctacctattgcgtatatttcgagtacttgcactcttatggtgatgctggaacaccgttgcacctccaaagttaatttcctgagtttcaaatctgtggtactctctatactattgtaaactgcttgtggtaacattgtactgatgaagattggtttgcagtggacttatttggacatggtttgtagtggaattaaaaa

SEQ ID NO: 33311 - DNA, 3827 bp, Setaria italica
  misc_feature (3774)..(3774): n is a, c, g, or t
  misc_feature (3790)..(3790): n is a, c, g, or t
  misc_feature (3808)..(3808): n is a, c, g, or t
  misc_feature (3820)..(3820): n is a, c, g, or t
  Peptide Sequence Number=SeqID_99285
cccagcagccatcacacgcgcgcgcgcgcacgggaagaaacccctttccctcggcaacgacgtacgaagtggccgccgcgatccggctgcctcgcccccggcctcgcgcggcgcggcgcggcgcgtgaatgatttgtgaccttgacatggcgatgcgggtggagaacgggcgcccccatcaagtgcccatcatggtgaggaagaagagaactggccctggcggttccggagaaacttccggagagtcttcaggggcttctggacaaggttcctcacagcgacctgagcgaactcaacaacatggaggaggacgcggctggcctcaacagggtggccgtggtggtgggcaataccagggccgtggtggacattatcagggccgtggagggccagggccacatcacccaggtggtgggccacctgagtatcacccgcgtgactaccagggacgtggtggtgaataccagggacgtggtggcgactaccagggacgtggtggtgaataccagggacgtggtggcccccgtcccagaggtggaatgccgcagccatactatggcgggcaaaggggaggtagtgttggacgaaatgttcctccaggtccatccagaacagttcccgagctgcaccaagccccatatgtccagtatcaagccccgatggtttcaccatccccatcgggacctggctcatcctcacagcctgtgacagaggtgagctctggacatgtccagcaacaatttcagcaactttctattcgtggtcagacttccacaagtcaagaaattcaagtggcaccggcatcaagcaaatcagttcgattcccgctgcgccctggcaagggcacttatggggacaggtgcattgtgaaagcaaaccatttctttgctgaacttcctgacaaagaccttcaccaatacgatgtatctataacgcctgaggttacttcacgtggtgtcaatcgtgctgtcatgggagagcttgtaacgctgtatagacaatcccaattgggtgggcgtctacctgcatatgatggaagaaagagcctttatacagctggacctctgccatttacttctaggacatttgaaattaccttgcaagatgaggaagatagtcttagtggtggccaaggtgggcaaaggcgcgagagagtatttagggtggtgatcaaatttgctgcccgtgctgatctccaccatttggctatgttcctagctggaaggcaagcagatgctcctcaagaagctcttcaagtgcttgacattgtactccgtgaattgcctactgcgaggtattctcctgttggtagatcattttattctcccgacttagggagacgtcagcaacttggtgagggtttggaaagttggcgcggtttttaccaaagcataaggccaactcagatgggcctttcactgaatatcgatatgtcatcaactgcgtttatcgagcctctccctgtgattgattttgttgcccagcttcttaacagagatatctctgttagaccattgtctgattctgatcgcgtgaagatcaaaaaagccctgagaggtgtgaaggtcgaggtcacgcaccgaggaaacatgcgcagaaaatatcgtatctctggcctcacttcacaagcaacaagagagctatcattccctgttgatgatcgtggtaccgtgaagactgtagtgcaatattttatggagacttatggttttagtattcaacacaccactttaccttgcttgcaagtgggcaatcagcaaagaccaaactatctgcctatggaagtctgtaagattgttgaaggacagcgttactcaaagcgactcaatgagaaacaaatcactgctctgctgaaagtgacctgtcagcgccctcaagagcgtgagctggacatcttgcagattgtgcatcacaatgcatactatgaagacccatatgcacaggaatttggtataagaattgatgaacgtcttgcagcagttgaagctcgtgttctgccaccaccaaggcttaaataccatgatagtggccgagagaaggatgtcctgccaagggttggccaatggaacatgatgaataagaaaatggttaatggtggtagagtcagcaactgggcgtgcattaacttttctcggaatgtgcaagatagtgctgctaggggcttctgtcatgagctggctatcatgtgccaaatatctggaatggactttgctcttgagcctgtgctgccaccactgactgcaaggccagagcatgttgagagagcattaaaggcacgctatcaagatgcgatgaacatactgagaccccagggcagggaacttgacctgctgattgtaatactgcctgacaataatggttctctttatggggatctcaagagaatctgtgagactgatcttggattggtctcccagtgttgcttgactaagcatgtttttaagatgagcaagcagtatcttgcaaatgttgcactcaaaataaatgttaaggttggtggaaggaatactgtacttgtagatgctttgacaaggagaatcccccttgtcagtgacagaccaactattatatttggtgctgatgttacccatccccatcctggagaagactccagtccttccattgcagctgttgttgcttctcaagactggcctgaggtcaccaagtatgctggtctagtgagtgctcaagcccatcgccaggagctgattcaggatcttttcaaagtatggcaagatccacaaagagggacagtaaccggtggcatgatcaaggaacttctcatttcttttaagagggcaactggacagaaacctcagaggatcatattctacagggatggtgtcagtgaggggcagttctatcaagtattgctgtatgaacttgatgccatcagaaaggcctgtgcatccttggagcccaattaccagcctccagttacttttgtggtagttcagaagcgacatcacactaggttgtttgctaataaccacaatgatcagcgcactgttgatagaagtggaaacatactgcctggtaccgtggttgattcaaagatttgccatcctactgagtttgatttctacctgtgtagccatgctggcattcagggaacaagccgccctgctcattatcatgtcctgtgggatgagaacaagtttacggctgatgagctgcagactctgacaaacaacctgtgctacacatatgctaggtgcacccgctctgtgtcaattgtgcctccggcatactatgctcatctggcagccttccgagctcgcttctacatggagccagatacctctgacagcgggtcaatggcaagtggcgcccgtggccctccaccaggtggggcacgcagcagcagggctgcgggaagtgttgctgttaggcccctgcccgctctcaaggagaacgtgaagcgtgtcatgttttactgctgagatgctgagcagtgagcagcttccaccaaggagtatcctggagtattccatgtacccgcgctatttcgatgtttgcagtttgacacccatctttatgcattcagactagcccagtgatctgtggattttaagtacctgtactgtgttggcagtgttgtgaactccgctatggggatctgtggatttcaagtacctgaactgtgttggcagtgttgtgaactatttcttgtaagttgtagccagccacaccttagactggtatgtatcgacgaactatttctgtgaggcttgcttgtttgatagaaaaataaaaaaaaaaaaaaaaaaaaanaaaaaaaaaaaaaaanaaaaaaaaaaaaaaaaanaaaaaaaaaaanaaaaaaa

SEQ ID NO: 33312 - DNA, 887 bp, Setaria italica
  Peptide Sequence Number=SeqID_99286
tttttttgttaagcaagcatcatcattaaagccccatttgggacaagataactttcagatttctagtagagttgaactacaaaatgcttgtatttcttagttccaaaacagatccgaaacactccttggagacactagatgctccgtatgaacacatgtttaactcataatcttgcactagaggcatagaacagagtaacccaccaacataaagaaatcctgaagctactttgaaacaatatttgtggtgcacttgttaaggatgtgaaccaggcagtcgagcgaagaatctgggcagtattgtttcattaaccactacaccatgtttgttggagtaaacatcattaaccacactctccaggtctgccacatcctccacagacatcgcaatgtactcattaaggttatcggtggttccatctgcggccatgatgggatcatactttgggggtagctgaatccaattccccgcagggttcttcatgtggcttctatctgaagcaaatgattgaagaaacaaaggagcatgaaccacacggaagagccttctatatatggaatcaccaaatgctagtggttgaattgcatcggaaacatactggctgaatggggaagggaaaggaagatccgagtccagatcccaaacaagatcaagaacttctcctttgtttcgtttcgcctgggcgcagatcacatgataatcccagcagataaatccttcatcagagttacttgctttctgatgccagagaggaaccttcttttcctcgtttgatatgaaaacaacataaagatcagtgcccataggatcagccactccaattcttatcagttccttacatagcatgtagatattttcttcacttattgacttagttgtcgtactt

SEQ ID NO: 33313 - DNA, 366 bp, Setaria italica
  misc_feature (355)..(355): n is a, c, g, or t
  Peptide Sequence Number=SeqID_99287
gacagcagagcaaaatcttttgacgtttgagtaagtagtacttggcgctcattctggtatagtgtcaacagcccaggtgcgacaaacatgtccatgaacttgtcatcattcacagcaaagagctcgaagccaagtgccagaaacaacctttcacggcatggtgttaagaatccagagttcaatgcagagggaacatttctttcaatcaggacttcccgcattttggcaaaatatcgagcagatattgcacagatggtggagtatgatgaccctgactttgagcctatgtcatcagcaccaatgattaagttgttagttaataggtagaatttactaattaggtaataatagatanacaatacctta

SEQ ID NO: 33314 - DNA, 1901 bp, Setaria italica
  misc_feature (1869)..(1901): n is a, c, g, or t
  Peptide Sequence Number=SeqID_99288
ggcagtctcagacgaaattgatgaaaaagttgtgatttccgaggatttgaagggctctgattctttagccgagcaatgctgcccaagtgcgacaatatttgtgcaggaaatggaagcagaggaagaagagaattgcatccaggggcagggcctcatcttgtcagccgttgatgaggtcagcgatggtgttgaggaaaagagattggagtgtgacccagtgtcagtagagatcaagaaatgtgagccagagcaagcattggatatcaagaaattggagccggtggaaccaatggaggccaagaaattggagataaagaaatctgagtcagtgcatgtagtcgagatcaagaaatgtgagccagtgaaagcagggcagatcaagaaatctgagccagttaattcagtggagacccagaatcctaagcttgtgcaagcagtggagatcaataaatgtgagcatgcgcaagaactggaggtcaagaaacttgagccagtggaaccgcttgagatcaggaaatctgacccagttgaaccagtggagatcaagaagagtgagccagtgaagccacgttcttcgatagctcagcgcatcaagctatgggaggcacaagtatgtggcaacatcaaaccagtgcttgaagacgaggaaaattcagttgaatccagtttggaggtgggaccagtcaaggatttgaagaaatgcatgcgatttgaggctgatccttgcgtcaacaaccgcaacagtgagcagcaagctcaagatgctgcccacgatcaagaatcaaccaatgaacagcacgaacaagaatttaaggatgtaaaagaatatacgcgctcagagaccgaaacttccagtgcaaaatgcagccaaaacgatgaggctgaagaagtcgcccttgcagtttcactgcccgaagaagaactacaacaaggctgcaaagatgagcaacctgaaccagagctgcaagagcaggtgtacgaaatcgcgcaagctgagcaagagctgcaagagatggaggaggtgtacgcagacgtgacatcatctccggccatgtggaatgggagggagagcccgctgaagtcgtcatcgatcgccggccgtgtgcactcgcggacctcgtcggagaatctcgtcagcgaggggtcgccgtcgcggaaggacaaagagtggaagcggacgctggcgtgcaagctctacgaggagcgcatgcagctccggctgtgccgcgaccgcgccgtggtggagggaagcgacaacatggacatgctctgggaggcgtacgaggtgggcggcggtggcggcggcggcaagggcagaggcgggaagcgcagcgggagcaaggcgaaaagcgttgccaacgacaaggtggaggagctcgtcgatgaaggcgaggaagaggaggaagaagacgatgacgaagaggtgaggcagctgtgctgcctgcaggcgctcaagttgtccacgaggaagatgaacttcggaggcggcaagcccagcctgtccaagatcacgaaggtgctgaggaggatgaccgcgctgtcgaggatgggatcccggcgcaagcagtccggatgaaggtagccgcgtgaatttctgatcgatggatgtgtgttcttcctgagcttagattttctcaactgtctgcttgcttttttttgtttattttaagtttgtgtatatatgtgatatatacacccaatggtttcagtgagattggggtaattacagtgttgtcacttgacctgcagaatgtaataaaccttagtccggtgtgtgtcgtgtaattttcgtgctttcagtaaatgctattgctatcaacaattactgaaatgcagcaaatttcaaggagtgcaaatgcagccttgaannnnnnnnnnnnnnnnnnnnnnnnnnnnnnnnn

SEQ ID NO: 33315 - DNA, 217 bp, Setaria italica
  Peptide Sequence Number=SeqID_99289
atttagctgatcatttaagaatggaaaattacattgtgaggatgttttaattgttatgttctttatacaaactggaactttagttcgacaggcaaccttgatcttgtagcctctaatgtcgatgttgttttttttgtgacttctgttttcccaattctgttctttcattgtaatatacttttgtcattgcctaatccgttgccttgtgttctcttca

SEQ ID NO: 33316 - DNA, 531 bp, Setaria italica
  Peptide Sequence Number=SeqID_99290
ttctgtgtcttcatcctggaagaaataaaaatttacaaggatgcattgttagacttgtatatttcctccataaacaacaaaaaaatgaaagtgctgataataaaataccagaaaactcaaggcagaacgttgggaagcaacatgcagaagaccaaaaatacaaggaaatctcaaggtaccaggaggcccagatattcaaagatttagcaaaacatgcagataacaattctaatcagcaaaccctggacatagcaaagagagaacacaacactcagtcactaacaggtaatatgtagggtaccatcccaaactcacaacacttaaaagattaggctattaagccaacaagaaatcaaatactcccttcggtcactaaaaggtgacgtcccagaaatccaaaatgaactagatagaagttaaatatcatgtcctaaacatcaactttaggtgagcagagggagtataaaccatagtattgtgaatacaaacttgataaaataaagttcgctatcttgaaatatcatagcaaat

SEQ ID NO: 33317 - DNA, 447 bp, Setaria italica
  misc_feature (367)..(367): n is a, c, g, or t
  Peptide Sequence Number=SeqID_99291
cattatttatggaccacaaacaatatctcctgtggcaaaatcccttcccattcagtggatggatagtgttctttcacagggccaacaagttgagttctttaatgatgaattccgctgtcctgtttacgtcaaagatatggtggatgtaatattgtctttagcgaaaacttggttatcagatggcaaaaagtccaggtccttctgaatgtcggtggaccagatagggtatcaagactgcagatggctgactctgttgctactgttcgtggatataaccacagtataatcaaatctgtatctgcatcatcggttaaccgggggtagcttctccatcagacatatccatggatatcaccaagctaacccngatgctaagtatcaagccaatctcatttcaagatggagtcagagctacacttgatgcagaagctaattcatgatgcttcc

SEQ ID NO: 33318 - DNA, 281 bp, Setaria italica
  misc_feature (264)..(264): n is a, c, g, or t
  Peptide Sequence Number=SeqID_99292
cttgccaaggcccattcctttcttgtaccccatcatggccatcatcttggccaccttggagttagcctccaggctcccgagggccgccgccggctccccggcatccaccccggccgcctggcgacggcgcgccaccttctcgcgctcccgctccttctcctcccgccttgcacgggcgccctccctgatcctgccgaacatcgtcggcagcatctcggtgtccccctatcgtcctgctcctcctccgcctcctcctccttggcngcggcggcggcggcgcg

SEQ ID NO: 33319 - DNA, 476 bp, Setaria italica
  Peptide Sequence Number=SeqID_99293
acgacagggtatggattggtcatttccatattttccatgagcaaagcaagttgcagagtatagagcagtagcagcacccatactaaagccaccaacgccaagtttgatgtcagcgggttcagttgacaacaaatttgcaacatgtgctgctgaggcatccatcccctcaacatcatcaggagcatcctctgaaagatcagcaacatcaaaccctgcaaatccagaaagagcacagtagtgcatatgtattaagagtgaagacagatagtgatcctaaagggatttgataacaattaacatccttgagcaaggaaaaacaagtagatagcacaaagcttacatgcagtggaggggaaccctccaaacactgacacaggtcttgtaggagcagttgggcatatccattttatattaggaagaggaagagtttccaatagttgagaccagctggctccattgtccccgaggccgtgtgt

SEQ ID NO: 33320 - DNA, 683 bp, Setaria italica
  Peptide Sequence Number=SeqID_99294
aacagcataagaacatattaattgccagttgaagataaccttcaggtcaaagtttccttcagtggacatgatttataaccatcagagtacgcattgagaagttgtcaaccaggtatggttctccaacaatagacgacattgaagcatacacaatcgcataccgtgcaaagttggacgatgcagagtcagcaggaaaaataccacagaacatatccttggaggtgtcatcccctggtgtggagagagttgttcgtgtccctgaagagctcgaacgcttcaaagaacggacaatgtacgtcagatatactacaacaagcgatgaggcagcagccacacctcaggaaggtgatggcgtgctgaggctaatttcctatgacatggacctgcgagagtgcacctggggcatagctgacgtgaagataaaccggcagcaggccggcaagggcaggcccctgagcaagaagcagagggaatggcagctgcagacgccattcgagtccctgaagctggtcaggctgtactctgaatgttgagatgccagttttctgagaaaattttcagtgtccatttgcccgtagtccttcagtttgtccagtcttgctgaattctgataggtcacaatcaatgatgagataagcgtttctaactgctagcagataacaccagaggtttagccgtttagc

SEQ ID NO: 33321 - DNA, 384 bp, Setaria italica
  Peptide Sequence Number=SeqID_99295
ataatatgatatcagactttgaaagactgctgaaaagtgcaaactatcatcgagtgaataggtgtgaagtttgtaagcatagagaggagattgcctttagggctctaagaagctccattctcctgccaatagctgacacaattctccgtgccttgccccgctgcacccacaggcctcgctacacggaaagtctgtgcctgcctttggcgattctccgtgcgatcaccttgcgcccacccttggtcgacttacgtgtaagaaaaccatgggttcttttccgcttgatggtactgggctggtaagttctctttattagcagaaggggttcattagcagcaggattctcaacgtcgtcgatgaagaatcgcggtagtcggaggccgc

SEQ ID NO: 33322 - DNA, 706 bp, Setaria italica
  misc_feature (245)..(245): n is a, c, g, or t
  Peptide Sequence Number=SeqID_99296
ttcaactcttgtttgtatcactgctatttaagaacacaagggcaacactggatcactacgtccaataacataagtgactatccagatcaaagggcacaatggggtaaaaagagctttacctaacaataaagaggtaaaaaaataccttcagaagatgttgccatatagaagaacctccaaaatccaatgtttttgagtaataatcttctactgggcatggacaaagcatgatgctgaaaaaaagngaacatggtaattggtaaatagaaggtaaatttgaaatagaagttatgaaaacacctaagtaatcacatagtaagagtaaataaaataagatccactaagtacatgtaattgctaatctgcaccaggtaggtaggcataccgagaccctgattccaattgccaatccggcaattcacaggaaattcgtatattattagatcttggttgcgcttaacaaactattattgccaataaagaatgttacagggaaggaatacataacatggttgggctggcacattgcactatcagcatcgttttgggctttgcaaaccataagctcttgaggcacagcaggactgcattgttttggacttggaattgcatcaaaattgagtgtttcatcattattaatcattctgaatctcaagtttgcagtaattctattggaatttgtctatagctttctgaactgatggct

SEQ ID NO: 33323 - DNA, 1740 bp, Setaria italica
  Peptide Sequence Number=SeqID_99297
tgcgcaacaggcaggtcatctaaaaaagttacatcattcttgtatgtgcccaagaaatgagttgacagtaactgaaaatgttacattaattacaacaacaatcatgtcataggtacgcatcggttttgccaccaaacaactgcaatacaaagaaactgtttcgacgtaatctgcaaaagtctttcatggaaaaaaaatagatctcgtggtggtaagctaccgcatagcaccttaccctccatgtcacctgaaaggttctgcaaaaatgaggaattcctctagaaatcatatagcacgcttagtctgaagaggggaacaaacatattattttgattgtcaaagagctcccctccacgcataaaggtacagtcatgacaaccaaatacagataatatgatgtcagactttgaaagactgctgaaaagtgcaaactatcatcgagtgaataggtgtgaagtttgaaagcatagacaggagattgcttttagggctctaagaagctccattctctgccaacagctgacagcatccattaccagatgtgtggagctgtggggtaaatgggataacagaggtctacataacacacaatttcacgcagatatagaatatcatgttccttcaactttcagctatggatgactcaacatgttaactcctaaaaatgactgctggaaaatataatacggaaaatattcagggagtagtaaaatgcatatttattaagcaatcagttgttttcggttatacttggatgaagcgtcaagaatattgtgccatgcagttagctaaaatctgcctctaactgaatcactttagttggcaaagaaggaaacatattacaggatcaagtaaattaattgatgaactgaaaaatggaagacataaatctttgaagcggaccagtatgcaggaaagttaacttaatttcactcttgtttgtatcactgctatttaagaacacaagggcaacactggatcactacgtccaataacataagtgactatccagatcaaagggcacaatggggtaaaaagagctttacctaacaataaagaggtaaaaaaataccttcagaagatgttgccatatagaagaacctccaaaatccaatgtttttgagtaataatcttctactgggcatggacaaagcatgatgctaatgctttttcttgagaagtgtatcatagaggatacgcaaatagagttgggagctgcatcacaggattaagctgggtcatgtcggcgatgtagtattagcactacaagtcccaaggatccattcgggcactgcatcttattcttcttccaccctgtcgtgccttgccccgctgcacccacaggcctcgctacacggaaagtctgtgcctgcctttggcgattctccgtgcgatcaccttgcgcccacccttggtcgacttacgtgtaagaaaaccatgggttcttttccgcttgatggtactgggctggtaagttctctttattagcagaaggggttcattagcagcaggattctcaacgtcgtcgatgaagaatcggagcgaggggaggccgcaggggaacgagatctcgcaggggaccgaggtcagcctcgcgaccgcctccgcctcgtaggcatccaccgccgccgccggcggaggcgggacgtgcggctgcagcctagcgagcggcggcagcccggcgcggaggaggggctgtgatggggacgcgaggaggcggccgaggagggacgatcccgc

SEQ ID NO: 33324 - DNA, 262 bp, Setaria italica
  Peptide Sequence Number=SeqID_99298
cccaaccaatcccaaagagtagaccaaccttcaagttaccacacattgactgtgtgagtgcagaattcaggattgtgttccagaagatggtgtagttcagtagaaatgctaggatgcatgaaaatagcagcacagcctgaaacccaggagaataaaggtagggaaattctatggccctctttaggtcaccctgaatatatgtcaagaacagtactgaaggtccacagacaagtcctgaaaaaccgacaagacatgatataag

SEQ ID NO: 33325 - DNA, 878 bp, Setaria italica
  Peptide Sequence Number=SeqID_99299
actgtgtgagtgcagaattcaggattgtgttccagaagatggtgtagttcagtagaaatgctaggatgcatgaaaatagcagcacagcctacaagttattggattgttagtggcattcatagcctcacaggacaggcactatatgacatgacaaattacttgacactaaatatttagtaatagaatcacacccaagataatactcagatgttatagtaacatgcacaatccaagctaatttcttggtttgagtaatcttagagatagtggaaagaaacagatcaatgtgttggaagctaaaattccaggcataacatgtgtccaaagtactggctagcggctgacaaattgacatgatgtgtgtttttgaagtttgtaatgtgcatccacaaacactgcctttagatgcctactaaacctgacgacaaaaggagggctacagattatctttaaatccatggtgttacctgaaacccaggagaataaaggtagggaaattctatggccctctttaggtcaccctgaatatatgtcaagaacagtactgaaggtccacagacaagtccattgcaccacatcagtccaaagctattgagaccactagtttcctatacggtttatagtagcaagataaacagcagttgtaatgttggccacaaagacaatggcgtacccacgggcatcaaatgacaagtctcgagctccagcaataaatgctccgaatacgatcaaagccacactgatgaagccttggttagttggttaacaaccagataatgtaacattgcagattcaggatgtaaaaggttctgagaacgttcagcataacaaaagcaggtagaggtacaaagattttcctaagaaaaaataaaacaaca

SEQ ID NO: 33326 - DNA, 543 bp, Setaria italica
  Peptide Sequence Number=SeqID_99300
tacaagggtaggcacggaaacctattactactggatagaatatacacaattatataaatcaaaagcttctaaaaatgataatgtgttgaaatatggcactgccaaggacattaatgcattaaatgaaatgacacttatactagctaactactgcacagtattcattttagaacatgctgtgtgctgacaatgttagattgaagaaaacaaacaatagtaatagctatacacttacctgcctattataggtggggtgtgcttctgctttgccaagaaatattccatggtcattgtaaatactactgttgtgcgccgtagagttgtgtacataggaacgttgactccacggacagattccattgaagctagcttttttttaccaaggatggcaaacaccagtcagaatttaatgcaatcaagcaatgcatttgtctaaccattatacagttcaatttttatatgtaagggattcagcataccatgtagagtaaataagccaaagaaagaggtgtggttcgcaacaatatcctaaacggcacaaag

SEQ ID NO: 33327 - DNA, 1287 bp, Setaria italica
  Peptide Sequence Number=SeqID_99301
ctctagcttaaacgagaaacgatcatacagcagaagtcaaatctcggtatactctattttcttggtcattcttgtatttgtgaattgagtttatacatacaagaaaacctacaaaattgctctcccgtatgcaggagcaaacagcttgaacaacgctactttggttaaagcacactgcctattttcaccaccaatacctacttccatttgacctcagatgcctattttcctttgatcttgcagtaggcatacaatccagagcccagaaagcctagtccttgcccaataacattaagcagatcaaaaggaagcccaccgaacagtacccaaccaatcccaacagtgaagaaatccttcaagttaccacacattgactgtgtgagtgcagaattcaggattgtgttccagaagatggtgtagttcagtagaaatgctaggatgcatgaaaatagcagcacagcctgaaacccaggagaataaaggtagggaaattctatggccctctttaggtcaccctgaatatatgtcaagaacagtactgaaggtccacagacaagtccattgcaccacatcagtccaaagctattgagaccactagattttcctatacggtttatagtagcaagataaacagcagttgtaatgttggccacaaagacaatggcgtacccacgggcatcaaatgacaagtctcgagctccagcaataaatgctccgaatacgatcaaagccacactgcctattataggtggggtgtgcttctgctttgccaagaaatattccatggtcattgtaaatactactgttgtgcgccgtagagttgtgtacataggaacgttgactccacggacagattccattgaagctagcatgtagagtaaataagccaaagaaagaggtgtggttcgcaacaatatcctaaacggcacaaagaacagtgaatcagaaggcactgatgggtcactatttgtgaaggagatgatctttaaccgtctcagaacataaagaaggcacgttgagcacaccatctgaaggagggtgatgacatttgcgcaagggaaattatatgaagaaagagctgctttgttaaacatcactagcaacacggagcatgccatgtaggagagcgcggcgaaggcgccgcggcgggtcatggcggagcccttgaagagcgcggcatcgtcgcccgccccgcccccgccgttgcccttcccgtcgtccgcggagaccggcagcagctgccccctctccccgccgacccccagccattctttccccctttccgct

SEQ ID NO: 33328 - DNA, 1813 bp, Setaria italica
  misc_feature (1739)..(1813): n is a, c, g, or t
  Peptide Sequence Number=SeqID_99302
ggaggggaagcggcgcggggagaaggacgggaagcggaaggggacggggaaggctaaggctaaggcggcggcgttggtggtggaggacgcggcgccggtgaccggatgctggatccgcttcccgcgcctccgcggctgcatgtcgtcgcgcgccaaggtcgactcctccaccagcggcggcggcgggcaaagcaaaccagcgattgatggctgcaaagactgccaagaccaatcagtcccaccagcctcttgttccacaacaaccagtaacaccggaagtatctcaccttcttccatagttggagaggagcttaaactagcttttcaactgcgtagatttacttttaatgaactgaagtgtgccacgagaaacttccgacctgagagtcttcttggtgaaggaggttttggctgtgtctttaaagggtggattgaggagaatggaactgctcctgttaagccaggcactggattgactgttgctgtcaagacactcaaccatgatgggcttcaggggcataaagagtgggtggcagaagttgattttcttggaaaccttcagcatccacacctagtgaaattggtcggttactgcattgaagatgaccagaggttgctcgtatatgaatttatgccccgtggaagtttggagaatcatctttttagaaagtcgttgcctctcccatgggctattagaatgaaaattgctcttggtgctgccaaaggccttgcttttcttcatgaagaagccgaaagaccagtaatatatcgggatttcaaaacatccaatattcttttagatgcggactataacgcgaaactctctgattttggacttgctaaagatggtcctgagggtgataagactcatgtatcaactagagtcatgggaacctatggatatgctgcacctgaatatgtaatgacaggtcatctgacatcaaagagtgacgtatatagctttggtgtggtgctactagagatgatgaccggtagaaggtcaatggacaagaacagaccaaatggggaacataacctagttgaatgggcgcggccctatctcggggaacgacgccgattttacaagcttgtagatccccatttggatgggaacttctcgataaaaggcgctcagaagacggctcagctggcccacgcctgcctcagccgtgaccccaaggccaggcctctgatgagccaagtggtggaggtcctgaagcctctccagaacctcaaggacatggccagctcttcctacttcttccagtccatgcaacatgagcggcgcacagcccttgccagcccacaaggcagtcaaagcatgaaggcgcagagcacctttgcacggaacgggcagcagccactaagaagcctctcatatggtccgcatgcttccccgtaccgccagtccccaaggcctgatggcaagaggcagtgaaactcatggtgcttatcttgccaccatgatcgatttcaagacctgcgttccatccagaactggaagattgatgggacctgccgtgctgtaccatccatggcatctcagctccctaagctgtggataaagcagcgacgacgattggtggtgtgaaaagtttttcttgttattgcctaattttagctgtcctatgtttacaaaaactcttgataccttgacccggaaggtgggattaaacagggttttggtcgtctctcaaacaatgatcaggcagcagatgcttagctctactaaaagaagnnnnnnnnnnnnnnnnnnnnnnnnnnnnnnnnnnnnnnnnnnnnnnnnnnnnnnnnnnnnnnnnnnnnnnnnnnn

SEQ ID NO: 33329 - DNA, 553 bp, Setaria italica
  Peptide Sequence Number=SeqID_99303
cgattcagcagcgcgcaatcctgatcatttggaagttgccatcacagaaccaaatgatcaggattgcgcgctgctgaatcgatccacgtcccaccaatttagaaaaatgtagcgaggatacattcaagcaagggagtaatcacgaatcatgaagcctactgaacaatttgtgcacgagttcgtgttccatttacgacagatatgatgcagtatcgcctgcagctgccggatcttcttcagctgctccacagacatggctcgccgccggcgccgagaacgcggctccaggctcattcatcgacaacagctgctcttcctccaccatgttgacctcggcgtgcgccacggccacgctgccgcacccggcggcgttgacgacgcggcaccgctccccggtgacggcgccgcaccggctgacgtcgatggccctgcacatctcgacctccacggtgccgcaccagtcgagccgcgcggccttgcaccgcgccaggcgcaccccgccgaaactctccacgtcggcgcgccggcaccgcgcggcgacggccgccccgcc

SEQ ID NO: 33330 - DNA, 923 bp, Setaria italica
  Peptide Sequence Number=SeqID_99304
caaccacgcaccgccggcgccgctcgccctccctctctcgaccggcatcaggcgacgctgcttcggctcccgggcgaagcccgctgctaccccagcgtctgcttcggttcgcctcggcggatccagatgctgtcgaggctctctcgcgccggcctccaggccctgaaccgggcgagaccaggtcaaaattcagttccttcaaggagccatgaagtagaggcaattagcacttatatgatccgtgcggggaggaatttattctgttcttccacaaacgctacaacaggtgacagtaacaacaaactggaagctagaatatctgtgacttttgtcgataaggatggtgaggaaaagctcgttaaagttcctattggaatgtcaatgctagaggctgcccatgagaatgatatagaacttgaaggagcatgtgagggctctcttgcatgttcaacatgccatgtgatcgtaacggatgtaaactactacaacaaaatggaagatcctgtggatgaagaaaatgatatgctggaccttgcttttgggcttacagagacatctcggcttggttgccaagtaattgcaagccctgagcttgatggcatacgcttggcactgccagcagcaaccagaaattttgctgttgatgagtatgttgcaaaatcacactgactgaccaagagcacttagttcatgaaagtcacatgttggaatttggatacctgctcagtttgacagaataagagaatgagatatattgtttgttacgctcgtcttgtcatatcttcaattctggatttcacattaaactggtttccttctctaattttggagagatggaaaatctgtcagtttactatttcagtaacttcttgaggatgcagagtcatacattaatgatcattactgttgattatatagaattt

SEQ ID NO: 33331 - DNA, 933 bp, Setaria italica
  Peptide Sequence Number=SeqID_99305
cactcagaagcccaccaatgcactgagcaaatgcatcttgtatagcagcctctgtctcaatgaatgaaaaggtcccaccagaagtttgtgaaatggagtgcagcgagactgagtcatggtcagcaccaaatccaaagacatgaacaggtacctgctggttaccattagtggatggcaagagcgcacaatactcaggtgctcctttgtgaacaccagcagttggcgagaccgtgtaggtatcttgaccatccgataaaaggatgatgctgcagactggattcttggccttgcgttcttcgataaccttggagcctttcctgaggccctctgcgatattggtcccgccatttgatgtcaatgaattaacagccatcaagctttgctgtcggccagactcagtcatcctacgaagggggaaagcctgcgtgcggatgatgagaaggcgatgacggaaagacgatctgaagagccaaggttttgaatgacaaatcccatagccctcttaaacatgcaagtttggtaccagccatgcttccactaacatcaagaactgtgatgagatcaacaggggcgcgagttgtgcatggtcctttgctatcttcgagattgctgggtgtctgcaaatgctgagcaaggggtgccttaagatgaattagaacagtgaagtttctttctgacgtgttttcaggtacttcagtgaactcaggatgtgtctttatctctactgttctcaaactgccctgctgagggtcttcagttgcttcacatgacaattccaagggttcatcatcgttgaaagtactagggtcattgtcaggcagcaatgcggccagatgatgaagcctaccagaagagcgagcacgaggaagtggtcgcaatatagtcatatggcctccattttgatacccattacctggattaatccttgcattt

SEQ ID NO: 33332 - DNA, 1010 bp, Setaria italica
  Peptide Sequence Number=SeqID_99306
gccctgctgagggtcttcagttgcttcacatgacaattccaaggagtttgtcgaggggttgacgagcggctcattgtcaggcagcaatgcggccagatgatgaagcctaccagaagagcgagcacgaggaagtggtcgcaatatagtcatatggcctccattttgatacccattacctggattaatccttgcatttacttggggtaattcagcaggcaacgggccccgaaatggaagctccttccatttgatacggcaaactgggcagctgctgcttccatgcttaacatttgcagaaatacaatggaagtggaaggtatgcgagcactcagctgtgaagagagcatggccctgaccaggcttcattgtggtcaggcatatggcacatgttttcttgaaggatttgctgccggatttggagaggcggaggccggcggaggtgggcgtcggtgtggtcggcatcagcgcgccggcaccggcgttcgccttgccgttgctctgctccgccgaagcggccgtcggggtggtgttggcgctcgtggcggcggacgacgaggacgccacgggcgacacgagcgccgccgtggaggagcctgtgttgggcgagttggagtcgtcgccttccagcgtccggggcacgtagacgcagaggttgagccccagcgacatcttggccttccgccatctgctctccattatactcgtgcagatgcagctcggcctgaagctgctgctgctaacttgccaataagctgagctgactgtgagttgagctacttgttgttgcaggaagaagaagaagaactgaagaaggttggtgggttatggttgggtatttggtgggtggagaggtcagaggcagcagatttggcggcgcctttgctgggtttggccgctggcaggagccggcgcggaagccatgaccatgagaagcagcagcacccgggaaccggagctcgtagtagcttggaaaatcaagaaagggagggtaaagaggaaagagaaagggc

SEQ ID NO: 33333 - DNA, 633 bp, Setaria italica
  Peptide Sequence Number=SeqID_99307
agtgctaagcaagctgccccaggaagagggtgtaaaatcagcacaacttgggactaaggatccttgggaagagtgtggttgcattctgtgggaccttgctgctagtaaacctcaagcagaactgatgatgaaaaatcttgtacttgaagtgctgttggcaaacctccatgtgactcaatctcctagagtgaaggaaatctgtattggaatcatgggaaatttagcctgtcatgaatctctagttaatgcaatcagcatgcaaaatggtttgattgcgacggttgtgggtcaactattcctagatgactctgcttgcctttctgaaacattcaggtttttagctgctgttcttcgtagcagtgcatctgtttcttgggcggaagctcttttacctgatgaaattctttcacgtgttctgtggatagttggaaacacactgaattctacattactcgagaagagcattgactttctatcaactgtcattgataatcaagatgtgactgccattcttcttcagcctttgataaaagtgggattggttgaccatgttatcagtttgttagcaagtgagatcgaaaaattatcagatgagagcaaatttgacaggtccgtctctcttgatttgatcct

SEQ ID NO: 33334 - DNA, 674 bp, Setaria italica
  Peptide Sequence Number=SeqID_99308
attttatataccctagctgtttgttcatctagctatccatcttccaaataaatgaagatataaactactctcttttgaaacacactccctccgtcccatgaaaagtgcaatcctagcgtttgaaaaacatcccacaaaagagtgcaattctaggaattagatctaactacttgcctaattaagcggttagatttgatttgcatgccaaaactaactgcatgtggccaacaattgagggcatgggagtcttttcacaccaccactaatctgtctgaagactcttcgtgggactgagggagtagaaggacgaccattcttgcatcagtactccttagtagtagggccaggttatcaaggtgcagaagactcccttcattttaaatatgacgtctaggacaagctaattagtgcacttttgaaataattggtgactatctttcatttaacagttgcaaacgagtaaatatttataaacacagagtagcgacgagttgttttggtcctaggtaactccagatgagcaaagcacctttacaacaacccagctaagaggaggaggtgaagataaacaaacacattctaggtatttactagtttaaacagacacattgcaggaactttggtccatgtatttacctgtgatgaaccttatcattatttggtagtagtattta

SEQ ID NO: 33335 - DNA, 473 bp, Setaria italica
  Peptide Sequence Number=SeqID_99309
gttcctgaatggctggatcttgccatagtttcttacatcctgtacaagctctttgttcagcaatgggtaatccaattttgcaccaatttctgatagtttctccccgatctcctgattatctggggatagaacatattttgaggaatctgattccacttgggctagctctttagctccgtcatatagaatctgtgcacattaactcattactgaggcaaaagatgtgcaaatacacccccataggagcagcataccaatctacaatcaaattttttctacataatacccactacgctgttagtgaaaaaaaatgacaaaccctttctagtatagcatactttaattgtctgatacacgttcgcgtggatgactgaagtatagctcctaagttctccctcatcgaaaccagtttggaaaatgagctttatctgtttaaatattgtagactttcccaattctccaagtctaccttt

SEQ ID NO: 33336 - DNA, 557 bp, Setaria italica
  Peptide Sequence Number=SeqID_99310
agtttctccccgatctcctgattatctggggatagaacatattttgaggaatctgattccacttgggctagctctttagctccgtcatatagaattttaattgtctgatacacgttcgcgtggatgactgaagtatagctcctaagttctccctcatcgaaaccagtttggaaaatgagctttatctgtttaaatattgtagactttcccaattctccagcaccttacaaaggccctgtttggaaccgcggccgggagaagcgctgctcagataagatgtataaatattgaaataacgcttatttgagaagcggatctgaactagcttctgcgttttagtacaaatgaaggtggtggggagaagcgcggccaaaaaagctgcaaaaaagcacgccgtttggcttctagtttcagcttattttgaccataagctggatttaagctgttccaaacagggccaaaagaaagacagacaggcaaaagaaatttattgatgaccagcatgcaaagatagcatttacaagtctgaatgatacacaaagacaattgactaggga

SEQ ID NO: 33337 - DNA, 889 bp, Setaria italica
  Peptide Sequence Number=SeqID_99311
agttacctaaactgaacttctaccgacaaccaattcgtctgtactcttgcataaagcatgtcctcctttggtggtacataatctacttcagctaatctgtccaaattgctcatgaagtaccgtgcacagtcagggacttgcagaatacttccacgtgaataagtttcctgaatggctggatcttgccatagttttcttacatcctgtacaagctctttgttcagcaatgggtaatccaattttgcaccaatttctgatagtttctccccgatctcctgaagttaggacaaggtggacgatgagaagcttctatgagctagcaaaggcatcgcaatgcctgattatctggggatagaacatattttgaggaatctgattccacttgggctagctctttagctccgtcatatagaattttaattgtctgatatacgttcgcatggatgactgaagtatagcttctaagttctgcctcatcgaaaccagtttggaaaaggagctttatctgtttaaatattgtagactttcccgattctccagcaccgagaagtaagagcttgtggatgtgttgctctgcctttgtctcttgcaaaatccgccggtcgatgtcagcagactttgcattttcagctgcttcagcctcgtttaaggaatgatgtctgctacaggatgagcccatgctttcaatcacgcaggtaagcacagacattattctagaggcacattctcatccctgagcctcctctcgagtaatgcatctaggcctggatcttggcgcccataagcttcagccagcagaagacttgctgtggggcagtaatcacagcaccagacttggcaaatcagctcgccaccctcgatccgccaccaccgccgtgcctactgcccg

SEQ ID NO: 33338 - DNA, 1108 bp, Setaria italica
  Peptide Sequence Number=SeqID_99312
ccatggtatctactttagaggctgcttcacaatgcaccactttgttggtacataatctacttcagctaatcggtccaaattgctcatgaagtactgtgcacagtcagggacttgcagaatacttccgcgtgaataagtttcctgaatggctggatcttgccataatttccttacatcctgtacaagttctttgttcagcaatgggtaatccaattttgcaccaatttctgatagtttctccccgatctcctgattatctggggatagaacatattttgaggaatctgattccacttgggctagctctttagctccgtcatatagaattttaattgtctgatacacgttcgcgtggatgactgaagtatagctcctaagttctccctcatcgaaaccagtttggaaaatgagctttatctgtttaaatattgtagactttcccaattctccagcaccttacaaaggccctgtttggaaccgcggccgggagaagcgcgagaagtaagagcttgtggatgtgttgctctgcctttgtctgttgcaaaatctgccggtcgatgtcagcagactgtacacacacaccatgagtaccagaaggaatcaaatgcagttgcttagtgctaaccagctcaaaaatcaaaacctactaatagcatttacttggtctatacgacaagttacccttgcattttcagctgcttcagcctcgtttaaggaatgaggtctactacaggatgagcccatgctttcaatcacgcaggtaagcacagacattattctagaggcgcactctcatatctgagcctcttctggagtagtgcatctaggccagtccataagctttagccagcagcagacttgctttgggggaacggggttgaattgaaccctctgcaatttcagaatagaaacgagcgacacctgcagctcaactcctggcgggcggagcccaatccctgcagtgcgcctcgctcctcgcgcgcccctccctgcagagcctggtccccccggcacgcggctccaggtggctgggacgctcgatccccgcggcgctgcctgctcaaggcggctgcgacgctcgatccccggcggcgcggcctgctccaag

SEQ ID NO: 33339 - DNA, 653 bp, Setaria italica
  Peptide Sequence Number=SeqID_99313
ataacatgtcctttggcaactgattctgagagtaagatataaacggcagcttcatgggccttttttagtctactgaaatcccttcttttgtgcaacttctttgctattttgggtgattcctttctttgatgatttaggtgaaacagtgaccaactggagattcccaaccgaaatacttgtagctgtatcagggtgtattagcacagcatagctgagaaccacccctatgtcaacacctttatatttgaacgtatgtgtatacttcccatcagccggttgaacacgcaggagtgcctttgttttaacttgttcgtccagtgcactttgctttttcacatcctgagaaggctctttgcgatttttgggtgcaacggcaacttcagttcctggcacaagttgaacaactgacttctctgggtatgatgacaccacaacaaacttcacaatattatggccatccaaccacaatgggaatttcataccctcataaacaatgccgacctgcttcaagattgtttcttcagccaaatcagcacggctctccagtatctcccagtcatcctcactgtagggttctatactgaccgagtcagctttggcaagagaacgggttacgctcaactgtgctatagttccgtcaggtagggaaatgc

SEQ ID NO: 33340 - DNA, 1105 bp, Setaria italica
  Peptide Sequence Number=SeqID_99314
atgacatcatacgacatcatatatttaagaacggaaggagtacaatgtgaacaagactggtgcttattcagcagagctaagtggcagcactacaaatcacacttattccccaaaatcaacacaatcctagcaaaacccttgcttatccctgtagccatggttcaagcccacactgagctgagctgagctgagcacgtgattccgcgcgcaaagaacagctgaatcaaccaggcccaccggtagaggaacaacattttccctctggctctgtatcacaacgttctttacagaagagccattgtttttctgttagcatttctatgtactatactataagccatcgtacaaaaaattgtgacaatgctatcaacatctggtagcagcaccgttggccattgattccttcaatggctgtcctccttgccaccgcggcacgcagcacaagtgaaccttggttagttgtcttcatatatgttgttcctttcggatgacaagttaagcacaaatctcctgcttgacaaccacggtgcttcgcaatcttcttgatctgttcgatttagcaacacgttgatgtgttgaagagactcaggctagtgtgacctttttgcctttcgactctcttgcctttgtggaaacagacttcctggatgacacaaattcaccaaactccctatcataccgcctcttctcgtctgcaggtgtagaaggtctagccttcctagcgacagacataagaagttctttgctgatgcacggttcgctttctgggaccccgttctcccggttgtccaaaagttcatgaactgctgccaacccagcatccgttagaatagcggcgagatcagcaccagtaaatccttcagtcagagaagcaacatcttccagactggcatcacttgcaagtgaaaccgtcctagaatgaaccttcagaatttccaaacgttcatcccattgagggaaatcacaaaagattagacgatcaaaccttccaggtcgcaggagagcagcatcaattagttgtggcttgctggtagctgcaaatacaaatactccagtcaaggtttccacaccatctagttctgtcaagacctgattaataacacga

SEQ ID NO: 33341 - DNA, 2348 bp, Setaria italica
  Peptide Sequence Number=SeqID_99315
taaacaaaagtaaagtaaagaaaagtaaagtaacgtaaccaccgtccttgaatgaaccttcagaatttccaaacgttcatcccattgagggaaatcacaaaagattagacgatcaaaccttccaggtcgcaggagagcagcatcaattagttgtggcttgctggtagctgcaaatacaaatactccagtcaaggtttccacaccatctagttctgtcaagaactgattaacaacacgatcagaaactccagcactatgggttcctcgctggggtgcaatggagtcaaattcatcaaagaatagcaggcaaggtgctgctgcaactgcctttgcaaaaaagtcacgaacagattgctcagatgaaccaatgtacttattcaataactctggacccttgactgaaatgaatcgcaaagaacaagctgcggctgcagctctcacaatatgagttttgccacatccaggtggtccatacaggagaatgtttgatcgcaaccgtacaggtgccctggtaaagatatttgggtatttggatggcaattcaagagtctctttaataatagttactgcttcatttaaacctccaacatcttcccaaccaccatctttatcatcaggagcatattttctaagatcacgcatggcgactggaaggaagccatgcattgcttttgagaaatcttccatcaccaaagttggtttcagagagttccgagaggcattagaaagcagaacaaagcgagaagcagcagcatgcacagccctatcaaccaaaatttccaagtcatacgcatcataaccttcacattttgatgctatctcagatagaacttccccagaacactgcaactcatgctcctcaacttgatgttttagtagtgctgtgcgctcaggggctgcaagagcaggaagctcaatgtggaaatcaaatctcccagaagaggttaagtcttgaggaagactctgaagtgattgaactgaagccataaacgcaataggtccatacccgcatgtattttgagtcttatccttgtattcatccataatgtcagccaaataccttactagagaatcagaagaactggatgattgagacacttgaggatctgaagagactgtaattacactgtccagatcatcaaatatgatgatcgaaggtgaatgaagcagcgcttcagaaatgctgtcttcaattgcttgccttgtctccttagccttgccaagggcaagtttggaacaatctctgtatattacgtgtgccaaaatctctttatgatcttcaaagtattttgcagaagccctggtcaaagcagttttcccagaacctcgaggcccatagacaagaacatgtccaggaaaggggaactttagtctgttaaataacctcaggcttgttgacgataagagcacagataatctttttatcacatctgacattgcattctccatccagcccaaagaagattgtgtcagcttgaagccatcagtggaactactatccattacggaaccaaaagatacaggctctcccaactccaacttcctgaaatgcagttccacattttctggattgccgattggagcactccaagcagtctcaaccttgagttgtgtattgtcaaaagtagaattttcagaagtaaatgtgagaaggtacagtaattcaactcctctgtttggtttttggtatgtcgcctcaaaatggagcacaacattggctggtaaaattattgaacttatctcggtgtggccagcatgtaaacccatttctttaagttgtccgataagccaatgtttaataaaaaacttatgctttgatacagattcagaaatgctctcgatatctgcatcctgaaggcttttgctttcaccataatgagcttcctggaagaagtcatcattttctggaggaatcctggttatcctcgaagtgtccgtttcctgactgactaattcactgttatcatgggcatctttcacatgcatcttgaacctcaaagaagatattgtcactacaggctcatccttcgttatattagctgagtatgtcttaatatatacccatgagtgtacatcagcactaatgaagtgacgaatagagtaggggagcataacatgtcctttggcaactgattctgagagtaagatataaacggcagcttcatgggtcctttttttagaaagtggtcatgccaagcaaaagtaaataaataactactcacagggaaacactcggaaaagaaaatatgagacaaccacaatcaatgcatatttcttataatttttcaacaatgtgaataaggaaaactgccatggcatctcctcaccttgtattcatccataatgtc

SEQ ID NO: 33342 - DNA, 1902 bp, Setaria italica
  misc_feature (1)..(102): n is a, c, g, or t
  Peptide Sequence Number=SeqID_99316
nnnnnnnnnnnnnnnnnnnnnnnnnnnnnnnnnnnnnnnnnnnnnnnnnnnnnnnnnnnnnnnnnnnnnnnnnnnnnnnnnnnnnnnnnnnnnnnnnnnnnnaaattcaaactttcagctatttctggacaacaaattcaggatcacaatcagcaactaatgaacttgaccgcgacatgacgcaaagggtccaaattttccacaggccacggcgcgcaacaaacatcttcactagcttgtggaagaacaaagagatcaataaaatgttccccgtccaaaaaagaattacaatcagcaaagctgtgacaccgtaaactctgttcctcccaccatcctaattacttttcttgtgactagcaacaacccatgcttggtcaggttccttctctggagcgcctcatgctctcgtcgatcaacttaaatgtcttcttcacaagtttctgatccagggcggttgttctgtaaatcttgaacactcggtctacgcggtctggcttgctgctctggaagtagagctcctcaaacttctttttcacaaactcgtaggcatgttcaacctcctgtttgccaggcgcagtaggctggtagtctttaaaccactcacacacactcaaaggaaccttttgtattttcctctcaaatatgtcgaatttgttgagaaacaacatgaatgaggttttctcaaaacatctttgctttaggacccagtcaaagagttctttggtctccatcattctgttcttcgtctcatcctcaaataacatctgatcgtactcgctaacggcagcacaaaagattacagcattaacaccttcaaaaagatgaatccacttccttctctcatttctttggcctcctacatcgtacaacctatagacctctccacctcttttgctctctccaagagggctaaactgagtttctaccacaccattcgtccgtactcttgcatgaagcacgtcctcctttgttggtacataatctacttcagctaatcggtccaaattgctcatgaagtactgtgcacagtcagggacttgcagaatacttccgcgtgaataagtttcctgaatggctggatcttgccataatttccttacatcctgtacaagttctttgttcagcaatgggtaatccaattttgcaccaatttctgatagtttctccccaatctcctgattatctggggatagaacatattttgaggaatctggttccacttgggctagctctttagctccgtcatatagaattttaattgtctgatatacgttcgcatggatgactgaagtatagcttctaagttctgcctcatcgaaaccagtttggaaaaggagctttatctgtttaaatattgtagactttcccgattctccagcaccgtaccaagaaagacagacaggcaaagaaatttattgatgaccagcatgcaaagatagcattttcaagtctgaatgatacacaaagggaattggctagggagaaactatagagaagtaagagcttgtggatgtgttgctctgcctttgtctcttgcaaaatccgccggtcgatgtcagcagactttgcattttcagctgcttcagcctcgtttaaggaatgatgtctgctacaggatgagcccatgctttcaatcacgcaggtaagcacagacattattctagaggcacattctcatccctgagcctcctctcgagtaatgcatctaggcctggatcttggcgcccataagcttcagccagcagaagacttgctgtggggcagtaatcacagcaccagacttggcaaatcagctcgtcgccggccgtctaccaccacccaccagagttggacgagcacgaatcgtgagaagagtgagctgttgagagctcggacggagaagtctggctgcggagatgaatt

SEQ ID NO: 33343 - DNA, 528 bp, Setaria italica
  Peptide Sequence Number=SeqID_99317
ctcgcacccgcgccagcgaaagctcctagggttagggttcccggcggcggcggagatgggcgtgccggcgttctaccggtggctggcggagaagtacccgatggtggtggtggatgtggtggaggaggagcccgtcgagatcgagggcgtccgcgtccccgtcgacacctccaagcccaaccccaacggcctcgagttcgacaacctctacctcgacatgaacgggatcattcacccctgcttccaccccgaggacaggccctccccgacaacatttgctgaggttttccagtgcatgtttgattacatcgatagactcttcgtcatggttcgccctaggaaacttatgtacatggccattgatggtgtggctccacgtgctaagatgaatcagcagcgttctaggcgattcagagctgcaaaagatgcatctgacgcggctgcagaggaggaacggctgcgcgaagagtttgagagggaagggagaaggcttcctgcgaaacagcaatcacaaacttgtgattccaa

SEQ ID NO: 33344 - DNA, 223 bp, Setaria italica
  Peptide Sequence Number=SeqID_99318
agccatcggtcgaggagctgcacatcttgtcacactcgcggcacatcagcttcttcggagccgccgaggaagaaacgaccagcatgatgcagacgaacgcgaaggttgccaccttcagggaggaggagccggcgccggaggccattctaattctacgcgatggttttgccttcgcttggttccaagcaagctatctgatgatgaactactagcagatgtatct

SEQ ID NO: 33345 - DNA, 144 bp, Setaria italica
  Peptide Sequence Number=SeqID_99319
agaaagtataggcaagttgttgtgagatgctaatggcgacaaaatgctgttactgccctatcaatctatcacacatctgacctctatagttgtaattagaagtatttactgtatatatggggcaaaagagtgattgggaactaa

SEQ ID NO: 33346 - DNA, 221 bp, Setaria italica
  Peptide Sequence Number=SeqID_99320
ggcaaagcagttggcagatgcatctgtgaggggatggctggcaaagctcaaggaagtcgcatatgacattgatgatctgctggatagctattcagccaagagtatgcatctgaagcagaggcagatgaagctccccacaaaggtcggagagggacgatgctggcagcggaaggagaatgccggcggcgcccggactatctccggcgtcgcggacgccgtcg

SEQ ID NO: 33347 - DNA, 298 bp, Setaria italica
  Peptide Sequence Number=SeqID_99321
ggctggggcagttcggcgtcatcacgcgcgcccgcatcccgctccgccgggcgccccgggcggtgcggtggacgcgcgtggtgtacgcaagcttcgccgactacacggcggacgcggagtggctggtgacgcggccccccgaggaggcgttcgactacgtggagggcttcgcgttcgtcaacagcgacgaccccgtcaacgggtggccgtccgtgcccatccccggcggcgcccgcttcgacgcgtccctcctccccgccggcgccggccccgtcctctactgcctggaggtggccct

SEQ ID NO: 33348 - DNA, 584 bp, Setaria italica
  misc_feature (545)..(584): n is a, c, g, or t
  Peptide Sequence Number=SeqID_99322
tttcgttttgtttaaaattttgtttaaatttgtttaaggttctttgttcttacttagttggtaggcaagacagctggtgaatcttcttatgagcaatagcccagagacctttctataatctagcttgttgtagctcttttcacggagaagtttagggatacctcagagagttatttctcaacatttggaacaaggggtgcccggcagaacccaaagaagaaatctctggataccctgatcaagaggctcagagaagccagctagatctgcttgtgtcctccctcctggaaagggatcggcaggtgcagttgctacaagagcaccataaggacagcacacaataatctgcttagttgattttcagatacaaaacaccaaatgaactacatgatctatgtaaatctggactgttgattttttatggtatacaaatactgctcaagttgccgttgctactgcaactgcacaggatccttgtttgtaccttttacaggtgatcagtttgcatggttaatattgcgctcagcaactgtattactgagatnnnnnnnnnnnnnnnnnnnnnnnnnnnnnnnnnnnnnnnn

SEQ ID NO: 33349 - DNA, 448 bp, Setaria italica
  Peptide Sequence Number=SeqID_99323
cttatgagcaatagcccagagacattcctaaatccagtgatccgtgaaaagagctacaacaagctagattatagaaaggttgcaatcatctcggagaagtttagggatacctcagagagttatttctcaacatttggaacaaggggtgcccggcagaacccaaagaagaaatctctggataccctgatcaagaggctcagagaagccagctagatctgcttgtgtcctccctcctgtaagataatacatgcacctggatcctcacatcctcatatttccatgaaatagtctgtatctggtgtgcattatgcctgtttcaattattgttaatcttatgctgtaattttgctgatgttagattccatttttcatatgtgtggatatcttcctgttggttctttcactcatttactatatgatcaagatatcatatgccttaaaaaaaaaa

SEQ ID NO: 33350 - DNA, 1814 bp, Setaria italica
  Peptide Sequence Number=SeqID_99324
cggggtaagggtcaaacgaggctgcggcagcaccatccgccgcagcctcgtttgaccttaccccgctctatcgagcgatgcatatacaccagacgctggcgctgggtgagcggttcaagaagtactacctggagaacaggaagctgcaattaacatcggactttgatgtcattgcggcaacgccattccttgagtcccaccaggtgttcttctcgcagattgctgggttctttattgttgaggatcgggtgtttagaacagggggtgggctcacatctcggccagatgtagatgcactctgggatgccgctgtgggtaagatggtctctgttatggaggacaacttctcccggatgcagacagcaaaccacttgcttctcatcactgattatgctgctttgctttctgccacaatgcggcggtatggttatccggtagggatgctgctcgatgttctggctaagcacagagacaagtaccatgatttgctacttgcagattgccgtaggcaggtggcagaggcactggctgctgataagtttgatcagatgctcatgaggaaggagtatgagtactcaatgaatgtgcttgcatttgggattcagagctcagacatcacaccagctttcccatacgttgcaccattctcatgcaccgttccagacatttgccgcattgttcgttcattcattgaagattctgtgagcttcatggcacatggtggtggtggggacacctatgcagcagtgaaaaagtaccttggtcggatcctctctgaggtggtggatgcctcaattcagaagcttgtggattcaggcagtggtctaagtgtgtcccaggcaatgcaggttgctgctaacatgacagtcatggagcgggcatgtgagtttttcacacgccatgctgctcaactgtgtggtgtgccgttgcgcgctgtggagcgtggtcggcgtgacttcccacttcgcaggtcacgtgatgctgcagaggcactcctgctgcggttactacgtgccaaggctgatgagttcatgcggcaatctgatggtgtcaactggatggctgatgaccctcctcctggtggcaatgagtatgcgaatgaggtcatcatctaccttgagacgctcacgtcaactgcgcagcagatcctccctcttcctgtgctccgccgtgtgcttgtggcagtgcttgcccacgtctctgagaggattgtcgagctcttcttgaatgattcagtaaagcggttcaatgctaatgcagttactggtatagatactgatctcaaaatgtttgaggcatttgcagacggcatgtccagccttttcgcggactctgatcaagagtccgtgaaaaatgaaatgaaggctgcactagtggaggcaagacagctggtgaatcttcttatgagcaatagcccagagacattcctaaatccagtgatccgtgaaaagagctacaacaagctagattatagaaaggttgcaatcatctcggagaagtttagggatacctcagagagttatttctcaacatttggaacaaggggtgcccggcagaacccaaagaagaaatctctggataccctgatcaagaggctcagagaagccagctagatctgcttgtgtcctccctcctggaaagggatcggcaggtgcagttgctacaagagcaccataaggacagcgataatacatgcacctggatcctcacatcctcatatttccatgaaatagtctgtatctggtgtgcattatgcctgtttcaattattgttaatcttatgctgtaattttgctgatgttagattccattttt

SEQ ID NO: 33351 - DNA, 308 bp, Setaria italica
  misc_feature (1)..(31): n is a, c, g, or t
  misc_feature (286)..(286): n is a, c, g, or t
  Peptide Sequence Number=SeqID_99325
nnnnnnnnnnnnnnnnnnnnnnnnnnnnnnnctttacccagaaacaatcttaaattattcctacatcaattccaacaatcaaatgatgaaaattggggtggacttttgcagccactactgaaaatctggacctttgcagcacagacagtaaggaaaaactagtgcaaatatcttgatcgaagcaatggatgctactccggcgatgttggcggctgcagtcgccatcctcgccgttgttgcactagtcccactagtactgctccgcctcctctctgccagcgccggnggcaagaagacacagccccccg

SEQ ID NO: 33352 - DNA, 962 bp, Setaria italica
  Peptide Sequence Number=SeqID_99326
atgcagagttgcataagatggatttcgtaaatgagacaccatttttgggcttcaaattgtgtgcacggcataactcatgattaagggtagttaacagcggactgccttcaaattttcaaatattgtacttgaggcagctcatgattaaaggacacgtaactgctgctgcttgcccgcaatacatcagaaggaaataaaaggagaaagcgcctcggacataatacaacactctagcgagcggaaaaagaggggggaggaactgaaatagccacattcttttgctactattcacaatgttgtcacatgatggcacagccacacctgaaatctttcgctttctttgctgctcttttctccgactgttttcctgaagtcggtgcacggacgacgacatgcatagttgtcatcccagagaagtcgcaaatcgggcttttgcattctgacagggttttgttgttctccaatatcttcccagcattaataagcttgagatcattcacggtcctcggacctttttccttatctttgggccactgggcgatgatggtctccttgagcgtggcgacggtggacgccggcgggaagcgcctgggcccgatgtcggtgccgtctggcagccggaacttgatctcgaactgctcctggacggcggacatctccggggacggagcgccggagcccccagagcccagatgctgaatcgaggcgccggccgggcgaatctgtcaggctggcacagcgcgggaggcggtggaatcttggtcggggtccgcttcctttgggccgggggacggatcaagagaccggcggcggagggcagcgagggcggatcataggagccgcatcaacgagggagggagccgaggagaggagcggcgacagtggaggagggaggcaggcaggcagggagcgtgggggggcggtggcgggtcaaagagaggaggaaagggggggtacgacga

SEQ ID NO: 33353 - DNA, 1429 bp, Setaria italica
  Peptide Sequence Number=SeqID_99327
cttagccttcactaaggtgccaggaacctggaggtggatgcttggcattgcaggggttcctgccctggtccagttcatactgatgctgatgctgccagaatcaccaaggtggctttacaggaagggtaggaaagaggaagctgaatcaatcttgcggaagatttaccctgcgaatgaggtcgagcaagagattgacgccatgcgccagtctgtcgaagaagaggtgcggcttgagggttccatcggcgagcagggcctgattggcaagctgaggaaggcgctcggcagcaaggtcgtccggcgggggctgatggccggcgtcatcgtccaggtcgcgcagcagttcgtgggcatcaacaccgtcatgtactacagcccgacgatcgtgcagctggccggcttcgcgtccaacaacacggccatggcgctctccctcatcacctcgggcctgaacgccatcggctcggtcgtgagcatgttcttcgtggacagggccggccggaggcgcctaatgctcatcagcctggtcggcatcatcgtgtggctcgccgtgctcggcggcacgttcctgggcgccgcgcaccacgccccgcccgtcagcgacctggagacccggctgctcgcgaaccagacccaggcgtgccccgggttcaacccgaacgtccgctggagctgcgtgaactgcctcaaggccgcctccacttgcggcttctgcgctcaccagggagacaagctgcttccgggagcgtgcttggcgctgaacgacgcgtcgcggcggacgtgccgcgcgggccatcgggagttctacacggaggggtgcccgaacaacttcgggtggctggcgctgatcggcctgggcgcgtacatcgtctcctactcccccggcatgggcacggtgccgtggatcgtcaactcggagatctacccgctgcggttcaggggcatctgcggcggcatcgcggccgtggccaactgggtctccaacctcatcgtcacgcagacgttcctgtccctgaccaaggcgctcggcacggcggccaccttcttcctcttctgcggagtctcctccctggcgctcgtcatcgtcttcttcaccgtgccggagaccaagggcctgcagttcgaggaggtggagaggatgctggagcggaaggactacaagccatggaagaggtatcacggcgtcggcgacgtcgggccgggaaaaaaccgtgagatcggcctcagtgcaccatgaaattcccatgagttgcgtccatctagatccaggtagcaataattcgtagttaataataggttgtctgttgatctcttctagatttccaagaagtaaaagatgaggaattggtcaaactccagttatgaaaatgaaaatgtgactacaagcctaaatgcgtatgcagtttgccctgtcattgtctgcttgaaa

SEQ ID NO: 33354 - DNA, 271 bp, Setaria italica
  Peptide Sequence Number=SeqID_99328
cggaaccgcctccgcccaccgcagctcgccgaccgagccgcccctcgccggggaaggagcgccgcgccgcagcttctccaccgccgcctcccgccggaccccacctccgagattggaagcggcggcgccggtcggacatggcgatcccgctcgtgctcgtcgtgctccccctcggcctgctcttcctcctctccggcctcatcgtcaacaccatccaggccatcctatttgtgacaataaggcccttctcaaagagcttctaccggcggat

SEQ ID NO: 33355 - DNA, 643 bp, Setaria italica
  Peptide Sequence Number=SeqID_99329
taacgaccaagacaaaaacttactactaccaaaaagaggtattctgcaaaccacatggaccagccaataacaggaaggaactttgacgatttcttcataatagctagtgtgcttccaaggcatcctgaacgtcgtgctcccgctcggcctcctcttcctcctctccggcctcatcgtcaatgctgtccaggctgtcctgtttgtgtctataaggcccttgtcgaagagcttgtatcggcggatcaacagattcttggccgagctgctatggcttcagttaatctggcttgtggattggtgggctggtgttaaggtacaattgcatgcagatcaagaaacttatcagctaatgggcaaagagcatgcccttataatatcaaatcaccggagcgacattgactggcttattggatggattttagcacagcgttcaggatgccttggaagcacactagctattatgaagaaatcgtcaaagttccttcctgtaagttagctcatacatttttgcaatggtatgctgtctcatgtttttgttctgtattactactagtgccgctcattccaatgtatttctgaaacctgtttcaagtaatgtaagcaagggaaacaaccgaataagatttgggatacatatagactt

SEQ ID NO: 33356 - DNA, 395 bp, Setaria italica
  Peptide Sequence Number=SeqID_99330
tcgttctagttggttaagttttgtcttaactttaactcgatgttattcttgaaggcagatcaatacggaaacagagttgtatcagctaaacactaaattgaatttattatttttcagtatcactaaagtgtcttaaaatcaaattggacacagtacaatctaaattgcaaatttcaatgctcagatgctcaattacttattgtgatgttaaacaaattactacaatttttttccctctagatacatgttcgcatgaaacgtcatgcaatgagtgagatgccaaagtcagatgaggatgtttcaaaatggtgcaaagacatttttgtagctaaggatgccttactggataagcacttggcaacaggcacatttgattgtaggtagtatttagtact

SEQ ID NO: 33357 - DNA, 805 bp, Setaria italica
  Peptide Sequence Number=SeqID_99331
gtatcagcagtaagtgactcagtgtgagtagtcccagctatctatgatacaacagtgataatccctaaagattcacctgcaccaacaatgctgcgtattctcaagggacagtcgtcagtagttcatgtccgcataaaacgtcatgcaatgagtgatatgcctaaatctgatgaagatgtttcaaaatggtgtaaggacatatttgtggcgaaggatgcattattggacgagcatatagcaactggtacttttgatgaggaaattagaccgattggtcgtccaataaaatctttgctggtggttctgtcttggtcatgcctcctcctatatggtgcctgtagattcttacagtggactcagctcctgtcgacatggaaaggcgttatcctctttgttgctggattgactctggtgacctgcattatgcatgtctttgttttgttctcccaatcagaacgctcgagctctgccagagcagcgaggaatcgagtgaagaaagattgagggactcccaactcgttacttgaccaattatgtaggcacaggtgtgatggaaaaaaaattctcagtgcttgtgctctataggaactgaaatttttgtgtggcaagaactgtcatctcccaacctcttcttgtacttgtatgacacaattgtagatttgtttttggtacagcagaaactagtacatgaacttattgaacttgtagactgaatctgccaaaagtgacaaacaaagaaaaaggtgttgtattgttttatttagaaaacaaaaggcaaaaaccaaattaaaaattagaccaaagg

SEQ ID NO: 33358 - DNA, 677 bp, Setaria italica
  misc_feature (615)..(615): n is a, c, g, or t
  misc_feature (623)..(623): n is a, c, g, or t
  Peptide Sequence Number=SeqID_99332
ttaagtaacaaaaagaatgcaaagacatttttgtagctaaggatgccttactggataagcacttggcaacaggcacatttgatgaggagattagaccaattggtcgtccggtgaaatcattgctggtgaccctgttttgggcatgcctccttttatttggtgccatccagttcttcaagtggacgcagctcctatcgacatggagaggcgtagcgttcaccgctgccgggatggccctcgtgacaggggttatgcatgtgttcatcatgttctcccaggcggagcggtcgagctcagcaagggcggcacgcaaccgggtgaagaaagaatgatgaggcaacggtagtctgggtctgctaaaagacaatccaccaaactggctgcagattaaattcatacaggcaccaaatttgagggtctgtgtgggctaggacacaaaagttgatgtacccaacaggaagcggtattcttgtatttggtatgctgggaagggagttgttttcttttcttttctttggcagcgaaactgtaggatataaattcattggtacttttacccaccccaccttttgtggaagtcactagtgattttgttatgcattagttaaactttanaaaaaaanaaaaaaaactaaaaaaaagagaaactaagaccaaaggacaacaacaaggggaat

SEQ ID NO: 33359 - DNA, 1305 bp, Setaria italica
  Peptide Sequence Number=SeqID_99333
cgcagcttctccaccgccgcctcccgccggaccccaccgtaatccggggaacagggtcaagaagacaggaggcgcggccagtgcggcggcggcgtcggccatggcgatgcccctcgtgctcgtcgtgctcccgctcggcctcctcttcctcctctccggcctcatcgtcaatgctgtccaggctgtcctgtttgtgtctataaggcccttgtcgaagagcttgtatcggcggatcaacagattcttggccgagctgctgtggcttcagctggtttgggttgtggactggtgggcaggtgtcaaggtacaactgcatgctgatgaggaaacttaccgatcaatgggtaaagagcatgcactcatcatatcaaatcatcgtagtgatattgactggcttattggatggatattggcgcagcgctcgggatgccttggaagtacacttgctgtgatgaagaagtcatcaaagtttcttccagttattggctggtccatgtggtttgcagaatacctctttttggagaggagctgggcaaaggatgaaaagacactaaagtggggcctccaaaggttgaatgacttccctagaccattttggctagcccttttcgttgagggtactcgctttactccagcaaagcttctcgcagctcaggagtatgcagcttcacagggcttaccagctccgcgaaatgtacttattccacgcaccaagggattcgtatctgctgtgagtattatgcgagattttgttccagccatttatgacacaactgtcatagttcccaaagattcacctcaaccaacaatgctgcggattttgaaagggcaaccgtcagtgatacatgttcgcatgaaacgtcatgcaatgagtgagatgccaaagtcagatgaggatgtttcaaaatggtgcaaagacatttttgtagctaaggatgccttactggataagcacttggcaacaggcacatttgatgaggagattagaccaattggtcgtccggtgaaatcattgctggtgaccctgttttgggcatgcctccttttatttggtgccatccagttcttcaagtggacgcagctcctatcgacatggagaggcgtagcgttcaccgctgccgggatggccctcgtgacaggggttatgcatgtgttcatcatgttctcccaggcggagcggtcgagctcagcaagggcctttagtacttaggttagtaacccagagggttacttaattttagtttaccttttagaaggacgtaagacgttacaaccgactagaccgggaataggaccctacgtaga

SEQ ID NO: 33360 - DNA, 294 bp, Setaria italica
  Peptide Sequence Number=SeqID_99334
tcaagagttctggaccattactagatgtttccaaggcttccaagtctgttgatttttgttttggatactggttttcgaaatgtggcattggcaagtccaaccttttccgcagcttgtgctactgcccagattgtatcatagttccagagtccaaatatgttcaatttcggcagtggatcagtcgggttgtcaatttggtacctaatattccaccttgtagtgaagttgttcagttctgttgatttgggaacataaaagtggatacccaaggcaccgttcattgattccacgaca

SEQ ID NO: 33361 - DNA, 384 bp, Setaria italica
  Peptide Sequence Number=SeqID_99335
taatcacctgcacgaacaccgggttcgtcgactgggctgggattcggatgcttgatatctcctccctatcttcctccgtcagatggtaatcgctcaccgggccattcttgcagaagtagtacccggtcggcgcgtcgccctcgtgatctagctcaagatcgtcttcatcacttttgacttggcaatgaacttgttcaatgtcacggtagagtttgcgtttgcatgatttggagatgctcttgctggtgttcttctgaactgccaactccagatcgctgtcatcgtcaccatcttcatcctcatcgcttggcagcaactgtggtgtacagtctttacctcccttgaatttgtggctgccgcgtcgcgcaccttcaacgccggcag

SEQ ID NO: 33362 - DNA, 395 bp, Setaria italica
  Peptide Sequence Number=SeqID_99336
acagcacgaagacgtagaggcacaggaacgtggacgtcgagatgaagaggaagaagaaccggagttgcgcaggccgatgcactggccgacccatgggcagtggtgatcgaacttctggacgcagttgttgcagatggagcagtgcgacgcccggggcggccggtacagcaggcacgtgtcgcagtacttgacccggacgacgtgcccgccggcgacggcaacatccctcgtgcgaggcagccggaggtgcgggttcgccgcgctcatcacccactcggtggacggcgtggcgacgtcgtcggcgtcggcggggggatcgtcgccgccgcgctccggcgggcgcgcgttcctcggcacgatcccggggtcccggctcgacgtcaggaacaggaacg

SEQ ID NO: 33363 - DNA, 336 bp, Setaria italica
  Peptide Sequence Number=SeqID_99337
tcgtaaaataagcatgaaagcatcctgaagaaatcaaatctccgacctagccggtgaatatcacgacttattgtctgctcactattgccatttgctactttagcttcaaattttgatatctgattaagaccaacatcacggcctttaccaacttgaatgtactcattgtaaattatattcccacgacgcaatatagaattatacccagcaaacacatcctcacttaagtttatagttttagatgctttacttattccacctcttgttaaatggaatatccgatcaaaaatgtctggatggccatagtgaaaccgcaccctaaggggatcagcaaag

SEQ ID NO: 33364 - DNA, 812 bp, Setaria italica
  Peptide Sequence Number=SeqID_99338
atggagagaagggaaggaaattcttcaaatggatggaactcatcaagagagatatcgccaggcttcaattgaagccttcaataatccaaataatgactccagggtgttacttgcatctacaagagcttgctgtgaggggattagcttgacaggtgcttcaagagttgtgcttctagatgttgtttggaacccagctgttggaaggcaagccatcagcagagcatttaggataggtcagaagaaatttgtatatacatacaatttgataacttatggaacaggtgaaggtgacaaatatgataggcaagcagaaaaggatcacttgtccaagttggtcttctctacagaagacgagttcaataatgttaggaacatgctatctaaagctgaaatggagcattgttctaagttgatttcagaagataaggttttggaggagatgacttctcatgaccaacttaaaggaatgtttttgaagatccattatccaccaaccgagtcaaacattgtctttacttacaatcagattgctcctgtgtaaagttcatggcaaatcatcgtcatcagattgatttattgtaagcggccattctctgctgtatgagtactctccccagcattttcatctgagcgaacttgatgttgtcatcgttacctgtacacactatctggctagacatgcactgaagaataccaacagtattttttttgctttattgtccattccacgatggatcagccattgctcatcatgtagcttggagaggactaaagcagaacttaataattggtggcagagcctcaatgtattt

SEQ ID NO: 33365 - DNA, 779 bp, Setaria italica
  Peptide Sequence Number=SeqID_99339
tttcttcttacttgtcatttccagaagcaaaatcgagacaagactcaggctcctcggcatgtttttcatcaactgccagtagttctggggatgttccgaaaccttcacaaactgccatttgttccttacattcagagattagagactccacagatgcattaacttcagcttgatcatcctcaatttttgaattactttcaattaataccaagccatacacatctgcattttcgacaactgttacatgttctgataatcggcaaacagctggatcatcagtttggttgtcttcaccctttgaagcttgaccatgaacgatattctgttctgctagtttgcgttctagattagattcacctagcatagcattgaattcctggccagctaatgattgctgcagctcaagagcaacggcactttccaggagggcttcacctgctaccaattcacttttttcagtgcttcccaccccatcatcctccgaaatggatttacttgtttcttctggtgctggtagagaattgcctacgtattctgtggcatctggagatagttctgctagtgctgactcaatagaatagcccctaatttgcatatcatccttttgtttttcaacagaagcaattatcttgggctccgcagataaggatgacccagacatatctaagccttccttcacttttctatttgcatcacttgatcttgtagctaatttttccgggttttgcatgcactctagtgatagttgctgctggagatgtaaccttaacttggagtat

SEQ ID NO: 33366 - DNA, 1119 bp, Setaria italica
  Peptide Sequence Number=SeqID_99340
atgatgtggttgccatcttggagagaatcactgttcaaaagcacctaactaaagtcctttaccttgtctttttcttgattccactagcttgcttgctgtttcttcgattacattattgaacatccttgtgcatctttcttctcttgtgcatcttggtgtcgcagtttcacaccgggagattccatatctgggttagtaggaacagcattacttgtgctattcctcttgtaaatccttcttgttggttggctttcacgatctgaaccttcatttgcagactttcttctaaatttcaatcttcttgggccactgctatctggtgtgagttctacaattttgcccctcttaaacttcattttataaggtgtgatactagtatcatccagttcgaccgtagagattcttctaggtcttgagtcaccagactttgattcacccatatctctgttgattgttgcctcttcatcttctgtaccagtttcatctgattcacttgattcaaaatcatattcttcataaaattcatcatttgatagttcttctggtgactgtggaataaaaacctttgatttcattccgtcctgttcaaaggtacttccgttactgacgcttgctacctcatcaacagcagaatcacttcgttcaattagcatggacttaggttcctccagaagtccaccatctgatgaagtttcagaaattgattggcagtgagaagtactgttatccatactagcatcaaaaacttcatcagccttggcattctctactgcatttccagaagcaaaatcgagacaagactcaggctcctcggcatgtttttcatcaactgccagtagttctggggatgttccgaaaccttcacaaactgccatttgttccttacattcagagattagagactccacagatgcattaacttcagcttgatcatcctcaatttttgaattactttcaattaataccaagccatacacatctgcattttcgacaactgttacatgttctgataatcggcaaacagctggatcatcagtttgggtatcttcaccctttgaagcttgatactattgtttcttgtattaattcggtctaaactagtcttggtattctattcta

SEQ ID NO: 33367 - DNA, 360 bp, Setaria italica
  Peptide Sequence Number=SeqID_99341
aatcaagaggtttcaagctgctattaccagcatatgtgagcaccgtgatccttgcgctgctccctgcgcacaccacccattgcattcgtgcaatgaacttgactgaataaatcttaaaatagtccgatggacactcagacatcatcctcacctcacacgcacctgtctcggggtctatcttccaaatcaaaacagcacaagtgtgaacggtgatgacataataattaagtatgtcatgaacggtgacaatccatgggtctgttggatgcacgtccatgcactccagggatccgagacgagtgctacctagaacacaggtgtctatcatcttccaaatgcaaacacctggtctgttggatg

SEQ ID NO: 33368 - DNA, 539 bp, Setaria italica
  Peptide Sequence Number=SeqID_99342
tagaagaatttatcagcagtatcatccagaatcacaagtcatatgacagatagtgataattgcactccaatggattgtgaatcggcctatttccatcaattagcttgcaagaaacagttgcccttatcctttcacaatttccactgtaaaacctactaattcaagaaatacaaatatagagttgtagactgcacaaatcaatcagttctttggcacgcacagtggaatgattagaaactcaaatataaaattggcaagttgtcaattcacactgaagctatacatatttagtcattatttaattaaccaagataattgttctttagagaacatctcgagagcagtgcccgggttctatgggtagtggaatggagtcctttgatctctttccgctctaagcagcaattaaaccaaaagtatccatatagtatagctgtaaccatctttctccactttgtgacctaatcagcttttatcatatgcactttagttttgtttttgaggtgggtgtgcactatttttaacactgatatgaaccg

SEQ ID NO: 33369 - DNA, 3052 bp, Setaria italica
  Peptide Sequence Number=SeqID_99343
gtacttgaagcttgaggattggcattctcattgcaatagatgtggcaaaaaatacatttcgatatatactaaatcaaaatttggatacagaccccaaaacctttgatcttttatcttttcagttgtcgagtataaattttaaacactacagatcattatgatttcatgagaacattgccacatttaatctattgccagcatgcacaaacactgtcctggaacctatgcttctatcttgccagtgggaaaaaaaccagttagaagttgtgctatcccgcaaataatagaaggcatcgttcttgcgcatcagctagttcgttgagatcttcagttcttcacaaagtagtttactgaagctttggtgctttcaggagatacacacccctcaccaaacctttaccaacatctccaacctccttaaggatagatgtcagctctggcatggtttcatcggcctcctctctgccacgcttctttgggttctcccatgtaagaccaacagcatctcctccttctgaaccataccacagcttgaaggttttgggaaatgcacacttcaagtctcgcaggaagtatgtagttgggtcaaagtttaccaaaagtttatctcttgcatcatgcaaacttttcacaacccctttattaagtggcatataggggtggaaatctttactcggtttgccccagatcaccaacttaccattaggaatctcggcagggaaaagtacatgatggggacggcaaagcttctcttgatggaggagaacaacagcatcataattgcccataggtgtttggaacaggcactcccaagtatattgccctgattggccatttagtataagatttgttaaaagttctgcactgcttttagcataaacagccatccgtttaagaaccgacttgcttggtgactgttttgtccatgcttcagatgctttatcatatgacgtagcgagaaacattgcaggctctatatcatgaggattttgctcataagattttctgctcatcatgaagttttcattgatctccttctcatccttcagattgaagtcattatttatgtcaataaccatgggtgaaaaggtccaatcaaaactggataacaaccgcaaaaacctgagaaacccagcaacccgagaagaaggggcatggaatgggaatggcttcaaaaatagatatgcaaccaccaactcaactgcctcctctgagataattgaagaaaacagatgtgcagatatccatctttttgctagcctgactactggtccatacatctggtaacggccatgcagaccattaatcatacttgagtgctggctccgctgaaaaagcaccttatcttgtgatagagcactttgtgtgttatcatctccagcttgcttttgcaacactaagcctctttcgtgaaatattttgagtaagaatgagtatccagatgtaaggacattcacctcatcttcactggctgaaacatacattcctcgatcctccaagctttcaccaattttcaaaagaaatgcagtctttgtcttctccatggccacaggatccaatggccagttaccagatccctctagctgaatcataacttccatagatctaatgcaagttgttgcgaaattcggcagcctctgagaattctttccatatgccagtggatgaggttcaggaggaaacacagaggtgtgcctaaaagctgagtctaggggttgcacggtagatattttaagagggacatcatccaacagacgtaactgcttagataaagtatcaaaagcttcgagcaaagctccagaagatgagactggatcttggccatcaactaagaggcaaaagtccagctgatcaacaacatgagtcaaatcatccttctgcagcgacaaatgtttcataagcacataatcagcgatccttttgataattgtgtgcctctcccaagattcagattcccacactgtgctttcagcaatatttccatccttgaatctcctaagttcagctttctctccccaaaatttcctaaatttaatagcctcactgcggttctcagggtttggaccaatatccacaagacgaaaactcttttccaatgagctaagcattatgccaacgagcaggggactgctaccaaattctgagaaaccatccattattttccattcggaaggcgtgcttctccataggactcggatcatctttgttctatctgtaagtccttgttgcagcaaagactgaacatctttttcaagaattctccaagattcatcatccacgcaacagcttaatgcagtaaccttagagttccctttcaagtttatcctcaagcatgagtcaaacttagcaccaaagtcaactttggtcataaatagctcttcaaatccaccatctctgcatttatcaaggcaattaagcgcacaagctgcctcatcttgaagctctagaaaagcagactttgtcatccgaaacgacagatttacgtggcccgatatatcacatatggcaacatcaaatgttttcaggcaattggcaatgtcctctttggtgattgtacgcttcttcattgactgaatcaccaaaccctttgcccacaccttggaagttgccaaaaaattcatcacgacacggaaaatttgtcttgtagtcattgatctagtaattatgcttcctccggagtccacagtaagaaacacaaggatggcagatattaagtacccgttgaggcaatcatgtgtgtatattgaagttctttgacgtgcccaaactttcactaacaccaaggcctcttgcaaggctttccagtcagcaacggtgctgcttataaattctgcattttcctccaaaaacatatcctccaatatgctacaattgtactttgctgtgggtaggtttatgccatctttggtatatgcgcgaacattgtttcttgttgatacattcaactttgaaacattgaacaaagaattcgcagttgggattattctgacatagaacccaggaaggtctgcaatttctgttgctggatatacatgaagcacaggtcttttct

SEQ ID NO: 33370 - DNA, 273 bp, Setaria italica
  Peptide Sequence Number=SeqID_99344
cttcgcagtcgcagcaagaaatccacaggcccgcagcgagatgaacctctgccattacttccccagctcggggacacctcttgacgacgacgacctcctcacccaagtcctactcttcctaccatcgccgtcgtccctcggtcatgcctccctggtctgcaagcgatggcaccaactcatctctgaccctagattccaccgacgcttctgtgcttgccaccagaagcctcctctcctgggtgtcttctccacggattctatttgctccggcaa

SEQ ID NO: 33371 - DNA, 752 bp, Setaria italica
  Peptide Sequence Number=SeqID_99345
aacctctgttcataaatttttgatttaaacttacaaacatatatattgttgttattacatagaggctaaaatggaaagaaatagtttaggaagtttagactgcttccttttaactttaacacctttactctctattggttctcaccttcttcttctttgagtacctagccttgcgtcggagcttgagacaagatctggatgaattacttctgaatcagtttccagttcatacaatgcctgcacttttcaatcgggttgggcaactccttggccttgctctggatgtggaggtcgtcagtcccggtgaggaccctgctgtggaggtcgtcgggcccggtgaggaccctgctgtggaggtcgtcgggcccggtgaggaccctgctgtggagggtgaggaggaggacgggcagggtgaggactgggttgggcaggaagaagaggacgggcagcgtatcattcaccacctgatcttcctgtcctcagatgaggaggacgggcagggtgaggactgggttgggcagggtgaggacgggcagcaaatccttcatcacctgatcttcctgtcctcagatgaggacgacgacggggtcgaggagcaggatgagcaaatcatgcaccatctgatattcctgtcctcagatgaggacgactaggtggaccaggaccaggctgagggtttcatggtaaccgactatgtggtgaaatcctatatcgctgaaccattgtcatttgcttgaggttcctgctagagg

SEQ ID NO: 33372 - DNA, 428 bp, Setaria italica
  Peptide Sequence Number=SeqID_99346
ttggtccccttcaagtattgagtggcatgctgaaggaatgccataaatgtaagagaggcgttgcttattatacccatcgatctccggatagacatctgaatatatcatatcaatcacacccttagctgatctgacaatgtcctcccggaaatcagaaatttcgttcaaaatatgattgttatcccaatattcagagagaagactgcaggcgagaaatcgtaaaagcacctccgttcgttgcaagccatatgtctcagctatctttactgcttccttcagtatgtgttttttctccagctttacagagtcaacaaaggagaaaattactcttttgatataattaacatcaccagacaagaatcgagatgtgtctatatcaggtaatatttgtctgagcattcgcgcttgatcagccagttgtttctcct

SEQ ID NO: 33373 - DNA, 418 bp, Setaria italica
  Peptide Sequence Number=SeqID_99347
tgtaaacgactcctggatggcgcattcatcgtcaatgttggcgacatacttgagattctgagtaatggaaggtataagagcgttgagcacagggccattgtgcactcgaccaaggagcgcatgtcggcggcagtgttccaccagccatgccaggattcgactgtcgccccactgccggagcttgtcaagaacgacggtagggcgcagtatagctcaatcagtttcatggatttcatcaagggctacttcgcggcaaagcttgatggaaggagctacctcgagagcttgaagagttaatggtatatatatgaagcagtggagacgaataacacgcttgaggtctagcttgtgtgaagtcctgtctgatgtttgtattgctatgcgctatataatgctatcgtcttgcagcttgatcttc

SEQ ID NO: 33374 - DNA, 1903 bp, Setaria italica
  misc_feature (1)..(29): n is a, c, g, or t
  Peptide Sequence Number=SeqID_99348
nnnnnnnnnnnnnnnnnnnnnnnnnnnnnttttttttttaggtaaagaggatattttttctcaatatattggagttgctcgaaacgaaagcggtaatagcattcaacttttttttggagagaaaaaaatgcaaattgcgttatgaagtaagttgtaccaaataacatagtttaggaggtacattgagccagaacacaatttggattatctggacctttcactatgccggaaggagggagcaaatgaaaatacacacggcgacgcgcgcactagttaggcagcgctaccggccttgggctgcacgacgaagtgctgcgccacgatgcggcgctgtatcttgcctgtcgccgtcttgggcaggtcatcggtgacgaacaccttcttgggcaccttgaatgacgccaggttcttccggcagtgcgccaccacgtcgtcctccccgatcaccaagccctcgcgggggatcaccgcgcagttgatctcctcgccgtacttgtcgtcggggacgccgaaggagacggcctgcttgacggcggggtggtccagcagcacggcgtccacctcgatgggagagatcttctcgccgccgcggttgatgagctccttgatgcgccccaccaggtggaggtacccttcctcgtcgacgacgccgatgtcccccgtgtggaaccacccgaaccggaacgccgcctcgttcgcctccgggttgcccttgtatcccgccgtcacgttggcgccccggacgcacacctcgccgggcttccctgccgccacgcgcgccccttcctcgtccaggatcgccatctcctgccccacgggacgccccaccgagcccggcttccgcggcccgtcctccggcagcgggttggacgtcatcaggtgcgacgcctccgtcatcgcgtaggcctccagcaccggcgccccgaacgccgcctccagcttctccaggatcaccggcgccagcgacgcgctgcagctgcggatgaaccgcagcgccgggtaccccgccgcctccggcttggacgcgtggcggtcgaggatgatctggtggatcgtcggcacggccgtgtaccacgtggcgcccgccgcgcgcatgtcggcccagaaggtggacgctgagaagcgcccggcggcggggagcctcaccgaggcgccggaggccagcgagctgaggaggccgcagaggaggccgtgcacgtggaagagcggcagcaccaccacggtggcgtccgtctcggcgaggcggtacacggagcggatgttcccgacggacgccgccaggttggcctgcgtgagcggcacccccttgggacggctcgtggtccccgacgtgtgcaggaacagggccacgtccgacgcctcgttgtggtcgtctttttcttggtggaagccgttcccgttggccgcgttggcggctgcgaggccgtggaggtgtaccgggccggccgcgtccttgagggtggcggcggcgtgggggaggccgagcttggcggcggctgcctgcgcggcggggttgccctcggcgttggtgaggaggaggcgtgactcggagtcggagaggtagaactcgaactcctcctgcgtgtaggccgggttgagtggcgccgcgacggcgcgggcgcggatgaccgccaggaacatgatcaccagctcgacggtgttggggaaggagagcgcgaccacgtggccggggcggaccccggcgtcggcggccaggcgcgcggccgccgcgtcgacgagcgcgtccagggcggcgtgcgtgagctcgagcttccccgggacggtaacggcgcggcgggacgggaaggcggcggccgccttcttgagcagcgccgtcagagtgggggcctcctccgccattgttttgttttgcgcgtggggttcgtgtgctgttgcgtggtgc

SEQ ID NO: 33375 - DNA, 238 bp, Setaria italica
  Peptide Sequence Number=SeqID_99349
tgatctcatcgatacccttctccatgcctttcaacccacacatgtagacgtaggtgttgtccttcttcagaagctcccacagctcctccttgtattccgccatccgggtagagcagcgaactgctcgttggaactcccaagaagagccatgcaagaccgttgaactggtagtcgtcatgcttctcgaagaacatcttccacaggaatgagcggaatggagcaataccggtaccggtcg

SEQ ID NO: 33376 - DNA, 247 bp, Setaria italica
  Peptide Sequence Number=SeqID_99350
gatgcatggatccatcatcagtagacttcgacgttccattgctcgcccttcttgagcttcttcttgtactcaaaccagtcgatcccgtccttcgctgcgaggtcggtcatgatttcgtcgatgcccttctccatgcccttgagcccgcacatgtagacgtaggtgttgtccttcttcttgagaagctcccacagctcctccttgtactccgccatccgcgtctggatgtacatcttcctcccccggg

SEQ ID NO: 33377 - DNA, 240 bp, Setaria italica
  Peptide Sequence Number=SeqID_99351
acgtatataatgtagagatcgacgtaatatccacagttagtagacttccacgttccattgctctcccttcttcagctgcttcttgtactcgaaccagtcaattccgtctttctcagccagtgtcaccatgatctcatcgatacccttctccatgcctttcaaccaacacctacgtctacatgtgtgggttgaaaggcatggagctgtgggagcttctgaagaaggacaacacctacgtct

SEQ ID NO: 33378 - DNA, 106 bp, Setaria italica
  Peptide Sequence Number=SeqID_99352
ccaaagagtaatattcatacagtccacaagtaaaagagctgtggactgtatgaatattactctttggatacaaattgagtgggaattataatgcaagtacatatat

SEQ ID NO: 33379 - DNA, 1636 bp, Setaria italica
  Peptide Sequence Number=SeqID_99353
tgaggctcctctagatgctacgacatcatcttccattgagttatttcttcctgaatgcatatgcaatgttgctcgtctccttgaaactgttctgcaaaatactgacacatgcaggctattcattgagaaaaaaggaattgaagctgttcttcaactgtttaagttgccagtattacctgtatctgtttcaattggtcagagtatttctgttgcatttaaaaacttctcacctcagcattctgtttctctggcaagagcagtgtgctcattttttcgagaccaccttaaattgacaaatgaactgttgggtttgatctctggaactaagctggttgatagtgaacttgtgaagcaatcagctctcatgaaatcactttctactcttgaagggcttttatctcttgccaattttcttctaaagggaacaaccattatgatttcagaactggcttttgcagatgctgagatattgaaggaattggggaaggtttatactgaagtcacatggcagatctctttactcagtgatgccaaggtggataagcaagagtcagatcaagatgatgtagctggagatgcttcaatttctaatgcatctgaaagggatagtgatgatgacacaagtgcagcaccagtagcaagatatatgaattctgtttcagcaagagcctctttatcaccctggagcatggagcaagattttgtatcagcagtccgatctgctgccaacatgcaccgccatggtcggcactcactatcaaggatacgtgggcgcctaagtggagtattggatgcaacacatactgatttggatggccctttttctccagcagagatctctaggagtcatgatgcttcaaagaaaagtcctgaagttgttgtttctgaacttctgacaaagcttggctacaccatgcgttccttcctctctacccttgtcaaaggattaccagctcgtcgtcgagctgactctaatcttagcccagcttcaagaagtcttgtgactgcacttgcacaacttttccttagcgctcttggttactctggacattctaccgctggctttgagatgtcgttatctgtcaaatgtcgataccttggaaaggttgtggaagacatggctgtgcttacattcgacagcaggcgtcgctcatgcaattctgcacttgttaatagtttctatgtgaatggaacgttcaaggaagttctaactacctttgaagccaccagtcagcttctatggacgcttcctttctctgctcctgctggcacagatcaaggttcctctattaatgagaaggtgtctcacaattcctggcttctggatacgttgcagagttattgtaaattgctagaatattatgtgaactctacattcttattgtctccatcctcttctcataatcagcttcttgtccagcctattgttactgagctgtcaattaatctattccccgtgccttcagagccagaatcatttgttcgtatgcttcaatctcaaattctagacgcagtccttcctgtttggaatcataaaatatttcctgagtgcagcccaactcttgttacctccttggtctcaattatgaacaatatatgctctgctgttggagatctgaagcaaagccgcaatatt

SEQ ID NO: 33380 - DNA, 1218 bp, Setaria italica
  Peptide Sequence Number=SeqID_99354
tttttttttttttttttttaatttacaaattcggcgagtgacttcacagctctttttacttgtggactgtatgaatattactctttggatacaaattgagtgggaattataatgcaagtacatatatataaaactgaaaagaaacagccatggtaaaatcgaaaaaaccccactatctacattatatacgtagtacatcttgaccatacgcacatacaggtgtatgcacagatacacacaacacaaatgttgagatcgacgtaatatccacagttagtagacttccacgttccattgctctcccttcttcagctgcttcttgtactcgaaccagtcaattccgtctttctcagccagtgtcaccatgatctcatcgatacccttctccatgactttcaacccacacatgtagacgtaggtgttgtccttcttcagaagctcccacagctcctccttgtattccgccatccgggtctggatgtacatcttctctccctgagcgttggtctgctctctgctgacagcgtagtccacgcggaaattattcggcgctttcgtcttcatcttctcaaactcatccgggtagagcagcgaactgctcgttggactcccaagaagagccatgcaagaccgttgaactggtagtcgtcatgcttctcgaagaacatcttccacaggaatgagcggaatggagcaataccggtaccggtcgcaagcattataatattagcgttggggtcttttgggtctattgagcatttctttaccaacgggccctgtaatctggacgtcagcaccaggcttcaggtcacacaagaagtttgagcagactcctttgacaacctctcccgcctcgtttgtgtaaacaagcctcttgacacacagcgagaccgtcttggagtcgccaaagtcgccgagagcgactgctggcaatggagtagagcctgagcttgtgcggcttgccgttcttgtcttcgccgtcggcgatgacgccgatggactggccctctctgtaggggatctcgccttcggtgctgaagaccatgtgccatgtctccccggtgcgtcgtctccggtgatcttggtgttgaggaggcacttgccgacgtagggctccttgggcctgtacttgttggtgacgacgccctcctcctgcttcttggagaccttcttgggcttggcgtccgcctccacggccgcggtgtcggtggtagacgt

SEQ ID NO: 33381 - DNA, 1371 bp, Setaria italica
  Peptide Sequence Number=SeqID_99355
ttctcgaaaaaaatgaaatggcactgtacagcaagttgagttcacctgagctcatcagggtgcatctcaatcaatagactgaccggctactggatacatacatacatgcatacatacatacatacatacaagacatacaagacgcatgcaatgcaacaagccagcaggcaaattgatcatggagcttaattaattagcttgcacaacaaaatgatggatgtagtattgacatgatgacgcctgtatgtagctagtatgaatgggattcgttcgatgcatggatccatcatcagtagacttcgacgttccattgctcgcccttcttgagcttcttcttgtactcaaaccagtcgatcccgtccttcgctgcgaggtcggtcatgatttcgtcgatgcccttctccatgcccttgagcccgcacatgtagacgtaggtgttgtccttcttgagaagctcccacagctcctccttgtactccgccatccgcgtctggatgtacatcttctccccggccgcgttcgtctgctcccggctcaccgcaaagtccagccggaagttgtgcggagcaatctccttcatcttctccagctcctccttgtacagcagggtgtcgcttgtcggaactcccaagaacagccaagcaagcccggtgtacttgtagtcgtcgtgctcctcgaagaacatcttccacaagaaggagcggaagggagcgataccggtacccgtcgcgagcatgatgatcgttgcgttggggtctttgggcatgagcatctccttgccgactggccctgtgatcttcacctcagagccgggcttcaggtcgcataggaagtttgagcagactcctttgacgatctccccttgatcgttggtgtacaccagcctcttgacgcacagcgacacggtcttggagtcgccaaagtccccgatagccgctgctggcgatggagtagagcctgaccttgtgcggcttgccgttcttgtcgacgccgtcggcgatgacgccgatggactgcccctccctgtagggtaactcaccttcagtgctgaagaccatgttgccacgtctcccccggcgcgttgtcgccggtgatcctggtgttgagcaggcacctccccacgtagggctccacgggcttgtacttgttggtcaccaccccctcgtcctgcttcttggagatcttggccttcttcaccggcgccgccgccgcctccgcggtctccgtcgtcgacacctgcacccgcatcgcccggccagcggcgctgcgccgcgggtacgccaggaagtggctgcatgacgacggggacagcgcggcggcggcattggccttggcaggggaggacgacagagagacggccgcggcggtcat

SEQ ID NO: 33382 - DNA, 1250 bp, Setaria italica
  Peptide Sequence Number=SeqID_99356
actacgtatataatgtagatagtacatcttgaccatacgcacatacaggtgtatgcacagatacacacaacacaaatgttgacgatcgacgtaatatccacagttagtagactatctacattatatacgtagtacatcttgaccatacgcacatacaggtgtatgcacagatacacacaacacaaatgttgagatcgacgtaatatccacagttagtagacttccacgttccattgctctcccttcttcagctgcttcttgtactcgaaccagtcaattccgtctttctcagccagtgtcaccatgatctcatcgatacccttctccatgcctttcaacccacacatgtagacgtaggtgttgtccttcttcagaagctcccacagctcctccttgtattccgccatccgggtctggatgtacatcttctctccctgagcgttggtctgctctctgctgacagcgtagtccacgcggaaattattcggcgctttcgtcttcatcttctcaaactcatccgggtagagcagcgaactgctcgttggaactcccaagaagagccatgcaagaccgttgaactggtagtcgtcatgcttctcgaagaacatcttccacaggaatgagcggaatggagcaataccggtaccggtcgcaagcattataatattagcgttggggtctttgggcatgagcatttctttaccaacgggccctgtaatctggacgtcagcaccaggcttcaggtcacacaagaagtttgagcagactcctttgacaacctctcccgcctcgtttgtgtaaacaagcctcttgacacacagcgagaccgtcttggagtcgccaaagtcgccgagagcgctgctggcaatggagtagagcctgagcttgtgcggcttgccgttcttgtcttcgccgtcggcgatgacgccgatggactggccctctctgtaggggatctcgccttcggtgctgaagaccatgtgccatgtctcccccggtcgcgtcgtctccggtgatcttggtgttgaggaggcacttgccgacgtagggctccttgggcctgtacttgttggtgacgacgccctcctcctgcttcttggagaccttcttgggcttggcgtccgcctccacggccgcggtgtcggtggtagacgtctgcgcccggatgacggcccgcgcggccctcgggcggtaggagaggaagtgggcggcggcaggggacgccggcgccttggcggccggcgaggagg

SEQ ID NO: 33383 - DNA, 1778 bp, Setaria italica
  Peptide Sequence Number=SeqID_99357
tttttttttcgtttcagattgtgcgtaaaaacaaatacgacagctgttacaacaattttgtgcgtgtgcggaggggagttacaatgattaattacaaattcggcgagtgacttcacagctctttttacttgtggactgtatgaatattactctttggatacaaattgagtgggaattataatgcaagtacatatatataaaactgaaaagaaacagccatggtaaaatcgaaaaaaaccccactatctacattatatacgtagtacatcttgaccatacgcacatacaggtgtatgcacagatacacacaacacaaatgttgagatcgacgtaatatccacagttagtagacttccacgttccattgctctcccttcttcagctgcttcttgtactcgaaccagtcaattccgtctttctcagccagtgtcaccatgatctcatcgatacccttctccatgcctttcaacccacacatgtagacgtaggtgttgtccttcttcagaagctcccacagctcctccttgtattccgccatccgggtctggatgtacatcttctctccctgagcgttggtctgctctctgctgacagcgtagtccacgcggaaattattcggcgctttcgtcttcatcttctcaaactcattccgggtagagcagcgaactgctcgttggaactcccaagaagagccatgcaagaccgttgaactggtagtcgtcatgcttctcgaagaacatcttccacaggaatgagcggaatggagcaataccggtaccggtcgcaagcattataatattagcgttggggtctttgggcatgagcatttctttaccaacgggccctgtaatctggacgtcagcaccaggcttcaggtcacacaagaagtttgagcagactccttgtgtgacctgaagcctggtgctgacgtccagattacaggggccccgtttggtaaaagaaatgctcatgcccaaagaccccaacgctaaatattataatgcttgcgaccggtaccggtattgctccattccgctcattcctgtggaagatgttcttcgagaagcatgacgactaccaggtacgtatcaaaatcttcatatcgccaactaaaatccacggtgaacatggaagcaacaagtttgaattacattcttgtgcagttcaacggtcttgcatggctcttcttgggagttccaacgagcagttcgctgctctacccggatgtcagtacatcgatctctgctgttttcatgagcacttcatcacaagctaatctttttccttttcatgtgatacttaacctccatagctgcgctgtgcgaaacattatttaggagtttgagaagatgaagacgaaagcgccgaataatttccgcgtggactacgctgtcagcagagagcagaccaacgctcagggagagaagatgtacatccagacccggatggcggaatacaaggaggagctgtgggagcttctgaagaaggacaacacctacgtctacatgtgtgggttgaaaggcatggagaagggtatcgatgagatcatggtgacactggctgagaaagacggaattgactggttcgagtacaagaagcagctgaagaagggagagcaatggaacgtggaagtctactaactagtggatattacgtcgatctcaacatttgtgttgtgtgtatctgtgcatacacctgtatgtgcgtatggtcaagatgtactatctacattatatacgtagtacatcttgaccatacgcacatacaggtgtatgcac

SEQ ID NO: 33384 - DNA, 380 bp, Setaria italica
  Peptide Sequence Number=SeqID_99358
cagcaggttggggtggcttcgccttccccaggacgcgcacctcgcggtcgaagtcgtcgcgggacgccacggcgctcgccgccgccagcttcttgatcgccaccacccgcccctcgccgaccgacgcgcggtacaccgtgccgaacgcgccgcgcccgatctccgtcgccttgctcagcagcgcgtccgcgccggcgaccaggtcctcggaccggaggctggttcctggcccgaacgtcaccatcttgccggcggcgagctgcttgccgccgttgccggacgacgactttgtcgtcgagctgcccgtgacgatgctttccagctccttctgctcgggggccgccgcctcggccctccgccgagccgacatgttgagcaag

SEQ ID NO: 33385 - DNA, 475 bp, Setaria italica
  Peptide Sequence Number=SeqID_99359
cgctggcggtggccacgaagcgcgacggcctcgcgtccgtcgcggcgttcgcgcggtcgccgcgggagttcagctacaaggagctgagcgccgccacgcgcggcttcgacgcgtcccgcgtcatcggcaacggggcattcggcaccgtgtacaagggcatcgtccccgacaccggcgccatggtcgccgtgaagcggtgcacgaacgccagcgccagcgccaacggcgagcaggcgcggtccgagttcctgtccgagctctccatcatcgccggactccgccaccgcaacctgctccgcctccagggctggtgctacgagaagggcgagatcctgctggtctacgactacatgcgcaacggcagcctcgacaaggcgctgttcgacgcctcggcccccgtcctcccgtggcaccaccgccgcgagatcctcgccggcgtggcgtcggcgctggcgtacctccaccacgagtgcga

SEQ ID NO: 33386 - DNA, 1303 bp, Setaria italica
  misc_feature (1257)..(1303): n is a, c, g, or t
  Peptide Sequence Number=SeqID_99360
tcttctattgtccttgtcttggggttccggttgtagtaccttaccgtctaacgtactttgtattctaagtagtaatttggtctacgtctagtcttggcgctagtagactttcgctccttcggtgttccttttgatacctgcagactccagcgatgacgcaatgtacaatgtcgatgtggtcacagcgatactggaggagttcatgctgcacaacaaagatgtgagtgagccaaagttgcaggaagatgatgatgacaccatggatgtagctaacaacctgatcgcttccatctccggctcttcgaaggtggcgattgtcgcaaagcttgtggacggatatctctctgagatctccaaggaccccagccttcctctggagaagttcattgcgctcgctgagtcagtgcctcccgcgtctcgacctgtgcacgacgccctctaccgcgctattgacgtttacctcaaggagcatccagggctgtcgaagagcgagaagaagcggctgtgcgcgctgatggactgcaagaagctgtccgccgacgcgagcgcgcacgccgtgcagaacgagcgcctccccttgcgcgtggtggtgcaggtcctcttcttcgagcaggtccggcagtcgtcggcctccgcagccgccgtcccgtctgccgacgcgcgctcgttcctcctgcccagggaggacggcacctcgtgcggcagctcgaggtccgcgaccacgacggcgaccgaggacgagcagtgggccggcgttgttggcgcgccgacgtccacgtccggcggcgacgccagctctctccggtcggtgagcctggccgccagcaagagaggcgacagctccggcggcaagaagaagtcgaagggcggcgcggtggtgccggcgccggcgaagagggtgctggggaagctgtggtccggcaaggcgagcagcggggagaacagcgggtcggacgacacgtcggagagccccgccggctcggtcaacctggaggagaccaagtcaacgccgtcacggatcacgaggcactcggtgtcataatgactcagtgactgtatatttttctttctttttttttttgggagtgatggttttgttaccacacgagcttttggattggatttgcctcacagaaatgttttagtgtaatatattgttcattataatcgcagaaaaggtgtaattttggtaactagagatgtatcatatgtaagatcccataacagtatgaaggttggaatatgatttcaagtttnnnnnnnnnnnnnnnnnnnnnnnnnnnnnnnnnnnnnnnnnnnnnnn

SEQ ID NO: 33387 - DNA, 195 bp, Setaria italica
  Peptide Sequence Number=SeqID_99361
ctcaccgatgggctgcggcgacagagacatcgtgacggcggcgatggagcggcagccctggcgccgccgccacggatggcagctccccctccacccgctccagctggtgggcgcggcggtgtttgggctcctcgtcgccgcgttctacatcgtcctgggaccctacatcgggcaacaccccttcgcccgggcaaa

SEQ ID NO: 33388 - DNA, 240 bp, Setaria italica
  Peptide Sequence Number=SeqID_99362
tttagtctctctgcttcctttcgttggtcgtccttacttggatcaaacaggataattgtgtggaaatttccatcaccagcatgagcgataaccagactgcagacataaatgatatcagagataaatgtattcgcaacaaataaaatatatttgcatcaccaacatggccgataaccagactggaaacttaaatatatcagagataaatgtcttcgcaaccaataataaggcatattcatg

SEQ ID NO: 33389 - DNA, 586 bp, Setaria italica
  Peptide Sequence Number=SeqID_99363
accccggcgtcgaccaccgcgtcgggggcaaggatagcacggagctgatcgtgaaaggagagcaccggcgcgtgccgcgggagttcatcgacgagctcgcgtccttcctcggggataacctgacggtggactacgaggagaggagcttccatggcacgccgcagaacagcttccacaaggcagccaacgtgcccgatgttgttgtgttcccgagttcgcaagaggaggtacaaaagattgtgatggcctgtaacaagtataagattccaattgtaccatatggtggggctacctctattgagggtcacacactggcacctcatggtggtgtttgcatcgacatgaccttgatgaagaaaatcaaatccctgcatattgaggatatggatgtggttgttgaacctggagttggatggatagagctgaacgagtacctgaagccctatggcctctttttcccctcttgatccagggcctggggccactattggaggcatgtgtgctactcgctgttctggttcattatcccgcacttgttccatacctcacagctaatgaaccagaacagcgagtagcacacatgcct

SEQ ID NO: 33390 - DNA, 1411 bp, Setaria italica
  Peptide Sequence Number=SeqID_99364
tggttcatttgagttatgtgccagtacaatctgctgtgctgctgcctacgtgcatttctcccaacgcatacatgtgggaagtcccgggcagctgagcgcattgcgtttactggcagcacttggcctgcgtcgcgccttctggaatcagggcttgaacaaccaagcccactcgtgaaaatccctccgggtgatccggtcaggtggcggcttagagcgtcatatgcagacgtgaggcgggatcagcttccccggattcatgatgttgttgggatccaacgccgcctttatccttttcatggtccggagtgactcgatgcccagttccttctctaggtacttcattttcccagtacccacaccgtgctctcctgtgcatgtaccttccatagacagagctgtatgaaccatgaaatggtttagtctctctgcttcctttcgttggtcgtccttacttggatcaaacaggataattgtgtggaaatttccatcaccagcatgagcgataaccagacaagtcaatggtgacgcatcaagcagttgctttgatgtagatatgcattcagcaagtctggataaagggacacagacatctgttatcatagcttcatgatcaggtttcatagcaaaaccagcccaaagtgcctcctttctgatcttccataattctgttttagcctccggctcctcaacaaaaacaaaatccgatccatggtgttcgttggcaattttctgaaccaagagagtttgttcgagtgcatatgcttctgtccctatgaattcaaacatcaaggttggcacttcaggcaagtttttaccatttgccatgtttattgcccttatctgaacctcatccaacaattccactcttgaaacctgtatcccagaaagcattgttgcaatagcaacatcggcagcatccttaacggttttaaaattgcacattgcaaccacagaatgagatggaagcttttgaagtcgtaaagtcacttctgtaatcacacccaaagttccttcacttccaatgatcaaacgagcaaggtcatacccagctgcactctttcgagcccgagagcctgtcttgacaacatcaccattgggtaaaacagcctgaaggttaatcacattatcccgcattgttccatacctcacagctaatgaaccagaacagcgagtagcacacatgcctccaatagtggccccaggccctggatcaagagggaaaaagaggccatagggcttcaggtactcgttcagctctatccatccaactccaggttcaacaaccacatccatatcctcaatatgcagggatttgattttcttcatcaaggtcatgtcgatgcaaacaccaccatgaggtgccagtgtgtgaccctcaatagaggtagccccaccatatggtacaattgga

SEQ ID NO: 33391 - DNA, 337 bp, Setaria italica
  Peptide Sequence Number=SeqID_99365
ctttaggctttttctcaagtgatgcaagttttgattgtgacttttgacaatactactatattatctatagtatgcctttctataccatgaagaactgttctgtgttgaacctgttgggacattggttttacgagtaactatcacttatttactgcattgctcaggttcttgcatttggatcggttccactgaagacttatcttcctgatggggatattgatctaactgtccttggaaatacatcttatgatagtactttggttaatgatgtttcttgcatccttgagtcagaggaacagaacagtgatgctgaatttgtagtgaaggacctggaacg

SEQ ID NO: 33392 - DNA, 243 bp, Setaria italica
  Peptide Sequence Number=SeqID_99366
gataaagagttcatcaatagctcggtggataaagcaattgtacctccaagaaattctgatgcttgctatacgagatttcgttcaaaacatctaaacataatcgatccactgaaggagtacaacaatcttggcagaagtgttaacagaggtctgaactggccaagatatgtctatctcgaaaagttatcctttacaactggagatgcaggtcctaatcattttgtatcattgtggttcgtacct

SEQ ID NO: 33393 - DNA, 545 bp, Setaria italica
  Peptide Sequence Number=SeqID_99367
cagaacccattggataggatttgccaggagaatgtctcattgccctcccaaacaaatgttccatccaacggactctcaccatcttcttcttatgccgcttcagaggtttcttctgtttcgaggtgttatagctttgaggatagcgctgagatgcatggaagtggaacagacatgcactttccaaggaagagagcttgttagtttcaagaagaagaaaaaaaagatcggtccagtttgaccattttcgttattactgctaatgatctgcctatcgtaactttggttgttcggttgaaccagttagttttcaaaacatttattgtaaatgtaagcttttatttgttggtatgccagagttgtgatactcacaaggagcaattggcatcttcaagagagaatgggaaaatactgtcaaatcaaacagtaagctttgaaagcaaccagagcccagctccaggagcaaaatttgtgtctcacaaggagcaagtttttggcttagctatgagacacgcaacagtggataggcaaggcacacaggggatagg

SEQ ID NO: 33394 - DNA, 485 bp, Setaria italica
  Peptide Sequence Number=SeqID_99368
taccttagggaacctttccgtcaacattgaagtcaaacagagctactaacacacaaactgccagtaaggcgtttacatttgcctctccattggtgttacagaggtctagggctgccacaacccaaaacaggccaccaggattttgcaaagtgggagatgaagatgaattcccacctcttagtgctgggatccgaattttcttgggagcattgatatgaggattggagtggcatagtataccataccttgtaaaatttcgttgataccttctctctcctcacccctttttcttattttcctgtccatagtttagttacaccgaaggcttatacagttgcgttcagtataatttagcaaggacaaaaaatcaggtaaaaatacttagggtcagcgtatgacttgtcatgttgccttgttgcattttgttttccatgcttcagtgtacatttctacattcccctctccaatggattgtacttctttgt

SEQ ID NO: 33395 - DNA, 3020 bp, Setaria italica
  Peptide Sequence Number=SeqID_99369
tcgactacgcgcggaggctcgtcggctccgcgctcggctgcgaggttcttgcatttggatcggttccactgaagacttatcttcctgatggggatattgatctaactgtccttggaaatacatcttatgatagtactttggttaatgatgtttcttgcatccttgagtcagaggaacagaacagtgatgctgaatttgtagtgaaggacctggaacgaatcaatgctgaggtcaggctcattaaatgcactattgaaaatattatagttgatatctcattcaaccaaactggcgggatctgcgcactctgcttccttgagctggtcgatcgtaaagttggaaaaaaccatctatttaaaaggagcatcatattgatcaaggcatggtgctattatgaaagtcgcctactaggagcacatcatggactaatatctacatatgcactggaagtgcttatcctttacatattcaatctattccacaaatctctcaacagccctctggaggttctttataggtttctggaatattttagcaaatttgattgggacaactattgcataagtttaaatgggcctgttgctttgtcatctttgccaaacttaattgttgaagctacatttgcacataccgatgacttattgtttgataaagagttcatcaagagctcggtggataaagcaattgtacctccaagaaattctgatgcttgctatacgagatttcgttcaaaacatctaaacataatcgatccactgaaggagtacaacaatcttggcagaagtgttaacagagctagctttaatcgtattcgaacagctttcttatatggtgctcgaaagcttggtcatatcctcatgttaccaccagaagttattcctgatgaaatttacgtttttttcaaaaacacgttgggaaggaatgggagaggagtaagaccagatactgacagcaatggtgcattacgtgcttcctttggtactggtgaggctcttttggaagatatatcaagtatgaagatctcttgcaatgaggaacatgagaacataacttcttatcatctttcaaagagcttgtgtgatgagaacttatatgttggaatgaatggacctacgcatttgagtagttcttttccaagggtccacaacactgcattaagtactgatttaagtacaaggtcatccaattttgtccatcatgcacctaaacaatattcatcgttttaccaaggcaatggtcgtgctggcagtggaaagtgttacttgaaccaagaagtggagcaggaatgtatacagtcacaagttcctttgaataacccatcaccattgaactcctttgctggtgtcaatgcttcggaacttgtgactgaacagaaaattattgatgtccctgtggaaaaacaacatcttcctccctcaccgttgagcttgccagatctgtcaggggatttggattctcaatttagatgcctgcgtcaagttcagtaccacctcgaatacttgtttgatgggtttttgcagtctgttcaagatgcatcttctgctgatacgtttgagaaggacccctttcacattcctgcctgtagtatcttgttaaacagggattcaggaacgccaaggctactattgccttcatcttctaaaagcaatggaaggaatgtgtctcctgtttctttttctcagagcacagaatatgctttgcagcattcacaaaatcagaacccattggataggatttgccaggagaatgtctcattgccctcccaaacaaatgttccatccaacggactctcaccatcttcttcttatgccgcttcagaggtttcttctgtttcgaggtgttatagctttgaggatagcgctgagatgcatggaagtggaacagacatgcactttccaaggaagagttgtgatactcacaaggagcaattggcatcttcaagagagaatgggaaaatactgtcaaatcaaacagtaagctttgaaagcaaccagagcccagctccaggagcaaaatttgtgtctcacaaggagcaagttgcactagacagtagaaccaatgaaatagcagtagatcaagcattgaagatacaaggataccttcagtcagatagggaaattgttgaaaagctcaattgtcatactcaaaagaaaattttcagtcacgacaatgaagcaagacaagtgccaaagtaccgccaggatgtctgctcgaacaagaactttttgcaaaagcgatgtgatactggcatggagtgtacccgagctcctggcacaatgaatcagatgccgaaacatcaatcatttaacaatcgaaatactacagagtgtgctagatctagcctaagcaagaacttgcccataaagcagagctttggcactaggaaagagcatgagatatttgacttgccaacaaagcaaagaccaatctgtcagccattgaagctggaaaatagacgaagtggctgggattgctcaaagaagataccagctgaaaaacaaaattataataaccacaaggtgcccctgtcttttgtaggaggcgcaggggacatcagtagccaagagaagcctccagtatctaaaacttttcaaccatacttccctgtcgcaaatggtcgaccattggagactattgagtttggatccttgggaccttttgcattgaagtcaaacagagctactaacacacaaactgccagtaaggcgtttacatttgcctctccattggtgttacagaggtctagggctgccacaacccaaaacaggccaccaggattttgcaaagtgggagatgaagatgaattcccacctcttagtgctgggatccggtgagaacttacataggtacagacgaattactgatcatagagttagcggaaggagctgaccagctgagctttgtgcagaattttcttgggagcattgatatgaggattggagtggcatagtataccataccttgtaaaatttcgttgataccttctctttcttccttctaccccttattttcctgacctt

SEQ ID NO: 33396 - DNA, 842 bp, Setaria italica
  Peptide Sequence Number=SeqID_99370
tattacaaataagattatacaatggagcctgaagtaataggattgcgtggaactaatagattgattagggatgctgggatacagtacatatatataggcgcatgttacaatctaacagagtccatatcacagtagggacaaaagtctcaatttcagtgcatatgatttagacatgtcaaaatcacgacattgtatttccagctcttaacatcaaccaccttagatcccattaagcgtgatcacaatctggcgaggagtagcatagtctcgatgttcacagagccatataccctgccaagttcccatgttgagacgcccattggtgattggaaccgtcagggaacaaccaaacattgatgacttaatatgtgctggcatgtcatcaggcccttccatggtgtgcctccatggagctgatggaccctctggaacaatgcgactaagaaatgtttcagtgtccgcctggacatcagagtcatagttctcattgatagtaagtgaagcgcttgtgtgctgcaagaataaatgcgccatgccacacttgaactcggccaggtcatcccttatctcgtttacaatcttgggggtgatgaggtggcagcctcggcgctgcggcgggaggacgacggtcctctgggcccatttggcggcctggggggcagccgccgacggcgcagaggaggaggcgacctcgcaccggacggcgccacgcgcgccacggcggggccgcccggaggcggaggagatgacggccggagctgcgccgcggcggggtcgcacggaggcggaggagatgacggccggagcccgcgcgattgcagccgagtgcatggtctgattgc

SEQ ID NO: 33397 - DNA, 2619 bp, Setaria italica
  Peptide Sequence Number=SeqID_99371
ggacctgtcatgactaaatttacaattgccttgagagaaattggaacatacaaggaagtcctgcgctcccaggttgaacacatgctaaatgacagactgctgaattttgtagatattgatttgcatgatgtgaaggatgctcataagcgttttgacaaggctagccttgcatatgaccagattcgtgagaagtacctatcattgaagaaaggcacacgaccgagacgataacaactgcgatcgaagaagagctccacagtgctagatcttcatttgagcaagctcgtttcaacctggtcacgtcactttcccacatcgaagcaaagaagagatttgaatttttggaggctgttagtgcgacaatggactcacatcttcgatatttcaaacaaggatatgaactattgcatcaaatggagccatatattaatcaggttcttgcttatgctcagcaatcaagggaaagggcaaacaaggaacaagcttctcttgtagagaggatgcatgagtacaaaaggcagatagaccgagaaagtcggtcttctgtaaatggtttgaatgattgttacaatggtgacggaataccaacaatcggtaggagttcacataaaatgattgaggcagtgatgcagtcatccacaagaggcaaggtacagaccattcgtcaaggttacctttcaaagagatcgtcaaacttgagagccgattggaaaagaaggttcttcgtacttgatagtcgaggaatgttgtactactatcgcaaacaaattactaggccacctgccggttgttccatccaaagaggcgttaacccccctgaacatggttctgggttgttgagtagattgttctcttctcattaccatggtattgtacatgatgagaagtctgttgcacggcatactgtaaatttgttgacatcaaccattaaagttgatgcagagcaatcagatctgaggttctgcttcagaattatttcacccacaaaggtctacacactgcaggcagagagtgcagtagatcagatggattggattgaaaagataactggtgttattgcttctctcctgagctcacaatccccagaacagtgttttatgtcaagccctaagggcagtggccatgataggagtgccagtgagagtagctcctttagtagttcagtggaatttgaaccttccataagcgatgatttggtactggagaagaactctggaaatgggcagcatgatgtcagaggcacacatcatcacagaactaacatgaaacctgaaaaaccaattgacttgcttaggaaagtcgatggcaataatatgtgtgcagattgtggtgcttcagaaccagattgggcatctctaaaccttggtgcccttctatgcatagagtgttctggggtgcacagaaatcttggagtgcatatatcgaaggtaagatctctgacacttgatgtcagagtttgggagccatctgtaatcaatctctttcagtcactaggcaacatgtttgtcaacaatatttgggaagagatgttaccttcatcaaataacggccgtcctgatgataatttaagtgttgatggatcagacacatcacaatacctctctgttaaaaagccaaaacacaaagatgctttctctgccaaagagaagtttattcatgccaagtatgttgacaaagaattcatacagaactatagcatggatgagagtcagctagctcagcagatgtggaatagtgtatctgcaaatgacaagaaatctgcatacagtcttattgtgagatcacgtgccaatgtaaatttggtttggggagatatgccttctagttcgtgtttgactcttggcaaagcacttcaactagagcacccagcttcaacacctggtggtagtcctagattttttgattgcaattctcatgacaagatttatgcgggagagcccctttccccagctagcacaagttcacgcacagatgacatggaggacagttgtgaaggtctctccttgcttcatcttgcatgccgtgttgcagatgttggtatggttgaattactattgcagtatggcgctaatgtaaacatgattgattcaaggggtcggacaccccttcatcactgcattttaaaaggaagacatcagcatgctaagcttctcctctccagaggggccgattcacaggccatggaccaagatggtagaacagcatcacaatatgcaatcgactgcagaacaaccgatgaagatattcttattttgttagaggaccatagttgataatcttgctaccacaccttcagtaaatcgaagccccccacctggtgtggttgactcaactaacatggctccagtcccgcatgcatcccagcttgtcttgcagataatccaagtttgtggcatgagagcaatttatgtatatgtcgttctggatggagcttccgcaacatggcggccgcgttgtttgtttttcatttttatcctttttgcttctttagcatcagtggtcctgatttaatcatctggcaaacggtttggctttgtttgcagatgatgcaatagtaagcttgtaaatggatctggtcatctttcatcatgagtagctgcccttaagatgaaagatgac

SEQ ID NO: 33398 - DNA, 525 bp, Setaria italica
  Peptide Sequence Number=SeqID_99372
actggctcgcatgctgaatggtgactttgaaggaataggatatgaggagctgaaagtttacgatgacaatttagttgagatacagcatgagattgatggccatgtcaactaaatgtcttgcttagagctaaacctgctcctagtggtgccagcagagttgcaggctctggaagtgatctgagtctgtctgttccagtatgatggaagtaatccctgtccctgtgtttgttattcagttagtcagagtcatttgctttcagagtctttcagttagagttatctgttgctttgagtcggtcagagtctgttagagtcagttagaagtcctagtcttcaggggaggtttagctgggtcaggaggctctcatccactggacgtgctccaggttgttagggccactaaggccagtagtgatatgctgttaagccgtgtactcctttgttataaataagagagcaatacaatcagaaaagctgtctttgcagcacaaatactcgtgtgtgttcttgagtccggtgagtttg

SEQ ID NO: 33399 - DNA, 292 bp, Setaria italica
  Peptide Sequence Number=SeqID_99373
tggcaaggacagcggggggtgggggactgcggtggtgtcggtcccagcacgggatcaggcgctggcggttgaggttgaggagcagttggctccaggccgctgcgctggctcgtgctccggctgaacgaggacttggcggtcttgggcgcggtgtagaacgtggcctggtcctcgtcatcggaggaatcccccgtggtggtcatcggcggcgtggacaccggcgggggcggtggctgcgtcgccggccgcctcagcggcggcaacggccggaggtctgggctcggctgcttcg

SEQ ID NO: 33400 - DNA, 237 bp, Setaria italica
  Peptide Sequence Number=SeqID_99374
ttgccgtttaacgtagtgatcaccaggtattgcaagagaagttggagaatcactacaagtctttgaacaagaagtatcaagagattaagagaaaagatgctattgcgagtagccagtttcttgattagaggaacgcgcatgaccgagtagctgacgaggctaatcgtcttcgggcatcactggctgaagctcaggctgcatgcgagcatcagagggacagaagaaccagaacagtag

SEQ ID NO: 33401 - DNA, 1137 bp, Setaria italica
  misc_feature (1)..(58): n is a, c, g, or t
  Peptide Sequence Number=SeqID_99375
nnnnnnnnnnnnnnnnnnnnnnnnnnnnnnnnnnnnnnnnnnnnnnnnnnnnnnnnnntttttttttgttcaaaaacagcgattgacttgttgccaaaatcaattaacaaaaaatgctcatccaagtttcatctcttccaaaatctgagtacaaaatttagcaagtacatgttcagatctcacaaagcccaaaggcgttttgagaaaagttactaaactatgagcacataggtgatagctattattcatcaactgtgagctttcaagttagatcagacatctcgaaacagagcagactggcgaagacttgcacagggtgcgaaaactttcgaaaatccagtttcttacagaggtagctgcatcctctcgaaaacaattatagcaataacaggacctgccacgtctcccaaggcacaaccaaaccattgtccatgtactggatgcaagagggcaccaatccctgctccaattgaagccaaaaccaaagagaaacaacttttgatggtaatgccataaatcttcctcccaaacaatctgaatttatccgtatcatcaaactgttcatcaccgttactaggcagttcgtcatcctcactaggcttacggatgaaacatctgtacacctcaattaaggattgcacgacccaagcagcagatacccccagtgcatgtgctcggaaagttgttctggcaacacagaatgtgtactctggagtcgacataccccttgcagctttcctctttgctgatttagaagcatctttgagaagtttccatgctgttctttgtgaaacatgacgaactacaatcctttccaatactcgtctggtagttacaatagaagtctcacgcatgatttgcttcactgaattgtagaagggagtaaccagatccacaggctctctgggagcttcttcaagaagatcgtcgtcctcatcatcagaatcagtgtgaggtttaggcacgagtggcaaataatacaataggaaggacctcagggttgtgatggtgaaattcttcaacccaaacgcagagaagagcggtttcagctccgaggggtattccttcgttgggtattggaagtagtctgttcttgcacgttggatggagtcgcgaatcttgttattcagatcgtta

SEQ ID NO: 33402 - DNA, 381 bp, Setaria italica
  Peptide Sequence Number=SeqID_99376
taaacaaaagtttttttgttttccttggtcgaatgtggtcacaagaacatgataatttttttcttacagcttgtctatgttgttcattagttcctcttataatgcttagtgggacgggagctctggcgatctttctgaggaagtcatttgggatggatatcacaacctctgattatgacgacaaggaaattgaagagaatatagcttacaactgccgagctaataatttggatgtgctacctcatatcagacacagtggggtgatcctttccagtttccagaccagattgggacattgttattgctagtgatattctactctgtaagtgtatatcttaggagttaggactcctgtctcttaatcctgtcttatcattggtc

SEQ ID NO: 33403 - DNA, 465 bp, Setaria italica
  misc_feature (417)..(417): n is a, c, g, or t
  Peptide Sequence Number=SeqID_99377
catatcagacacacatggggtgatccttttccagtttccagaccagattgggacattgttattgctagtgatattctactctatgtcaaacagtatgacaacctggtaaagacagcatcctttcttttaaaagaatacaagaagacaagtgagaaagcaggctgcaccaccatcacagacaaatcaggtcgttactcaaaatttcatttgttttaactcacccgatatgtgaggatatctttagcttatgtttccgttgattggcaggaacacaagtacctgccagatctcccatgtttctgatgagctggcgcagaagaatcggcaaggaccaatcgcttttctttacaggatgtgagaaggcgggtctcgaagtgcgtcatttgggtgatctcgtgtacctcatcagctttaagngctgaaaatttgaggaaacgacgcctcgcgaacggcaccggggaagtg

SEQ ID NO: 33404 - DNA, 626 bp, Setaria italica
  Peptide Sequence Number=SeqID_99378
ctatggcctgggacattttcatttgccacttggctggttaaaaaccagtcaattttggatggacaacgggtcctggaattgggaagtgggacgggagctctggcgatctttctgaggaagtcatttgggatggatatcacaacctctgattatgacgacaaggaaattgaagagaatatagcttacaactgccgagctaataatttggatgtgctacctcatatcagacacacatggggtgatccttttccagtttccagaccagattgggacattgttattgctagtgatattctactctatgtcaaacagtatgacaacctggtaaagacagcatcctttcttttaaaagaatacaagaagacaagtgagaaagcaggctgcaccaccatcacagacaaatcaggaacacaagtacctgccagatctcccatgtttctgatgagctggcgcagaagaatcggcaaggaccaatcgcttttctttacaggatgtgagaaggcgggtctcgaagtgcgtcatttgggtgatctcgtgtacctcatcagctttaagagctagaaaatttgaggaaacgacgcctacgacgaacggcaccggggaagtgcctgcggctggacagtgtt

SEQ ID NO: 33405 - DNA, 494 bp, Setaria italica
  misc_feature (431)..(494): n is a, c, g, or t
  Peptide Sequence Number=SeqID_99379
aatgtctggggctttagatgtcaggtccctcactctgataataaaggagcaagaagcaaagatcaagaaactcgagcacgatatcaaaacacaagaggcaaagatgaagaagcttgagaatgagtttaggtcaaggaatgcatgatgattggtaactgccataattctatatttattagataaatcaggttggcatgctttaggacctgtaaataataattagcattgccacacagtttacgatcatgttttcttttggtcatgtacaaaccatagactgtagggtttagaaatatcagcttctcttgggttatctttttaagttgatgtaattgacgttttgatcttttctatctgacagtaaatacttggaatattgtggggattagttgtatatgaatcatatatctccttgttgattttattaaccnnnnnnnnnnnnnnnnnnnnnnnnnnnnnnnnnnnnnnnnnnnnnnnnnnnnnnnnnnnnnnnn

SEQ ID NO: 33406 - DNA, 264 bp, Setaria italica
  misc_feature (103)..(103): n is a, c, g, or t
  Peptide Sequence Number=SeqID_99380
tcaaaactgctatatgttcgaggtttcatctgatagcggtactccttaacagctaaaagttgtctgagaatcatgttgtactctaactgaaagctggggccancttttacgacctcccatacatgactgaaaagttgcctagcaactgagatcaaaagtaaggaatgccacgcaagataaaagtatccaaggcaggtgaaccactcagaaaagagactagagaacaaaaatcgtagtccggggaaaggcttggttcaataagct

SEQ ID NO: 33407 - DNA, 552 bp, Setaria italica
  Peptide Sequence Number=SeqID_99381
cacattgtcgacttgtgtatcttctttcatggccacatctagtgtctaatgtgaggcactccagtattggtgcatgacccaataataagatttgtaaactcaatcacgctcttgcagaacaaaagccagtgatcatgacattttttagattctcatggctgtgttgcaaaagatgccttgagtatgagttataatcagaatattcaagaattgaatcgtgcctgatgtttggtagctctacctcatcatgggatgtcagacaaagagtttgcagatttggtgcaatggatggaagcttggtttcggcgcaataaagcatgttagactcactagtactcatcatttgcatataggtcagttgcaatgcatttccaagtgacatgtgcatttccaagtgaacttagtgaacttagatacacacttgtcaagctacttaagcaaccaacttcaactccaggatggaaagcacaatgatcaaggaaaagggtccgcattgaccttcccctcttagtggataacggtgaacatgggaagttgttaacttctaaatta

SEQ ID NO: 33408 - DNA, 559 bp, Setaria italica
  Peptide Sequence Number=SeqID_99382
caggctaacagttgatggtacatttcccaccacgtgccgctaaatagccaaacaagcactttgggcttccacgagatcctcctcaaacatatggagacacattgtcgacttgtgtatctttctttcatggccacattctagtgtctaatgtgaggcactccagtattggtgcatgcccaataataagatttgtaaactcaatcacgctctttgcagaacaaaagccagtgatcatgacattttttagattctcatggctgtgttgcaaaagatgccttgagtatgagttataatcagaatattcaagaattgaatcgtgcctgatgtttggtagctctacctgcacatggtccacaatcatttagttgaactcaccatattgatgtgtaatatgtcatactaacgcatgataaatctagcaatgtataagtcaaataaaaagagacactcatggtgagcaaaattactaactcagatttgttttcaagttactcatctgatgaagataagattttttaggacgtttgagaagataaaagacttacacgcaagtattaaa

SEQ ID NO: 33409 - DNA, 370 bp, Setaria italica
  misc_feature (30)..(30): n is a, c, g, or t
  Peptide Sequence Number=SeqID_99383
cgctcctttccgccatcttgaacacaatcncctttttgacaagtccagccttctatttctggtgctgaggcatccattgtctggcgttgcatcagcagctggcgctggacggaccgcgcccgcttctgctccagggtcacctcagcagcgcagtcggcaatgaaaaacaaggcgagattccgcggccgcctaggcacgcttatgccctgggcggcggggtaccgcggcgcctagggggtaggcggtcccctaggcggcccgtggcggcggcggaggccaggtacgggcggcggcggaggaggaaacaggggccgccgtgggtgcgcggaggaggaggcggcggcgggggcgatgcaggggcgagcggtgg

SEQ ID NO: 33410 - DNA, 683 bp, Setaria italica
  Peptide Sequence Number=SeqID_99384
tagcagcaggtgctaccggcgacaaggacggcaaggaggtcaccaattcgccgtcagtggtcgccaattcgaggacgagatccccaaatcgccaccgcctcttcagctcccagtgtcggcaatgaaaacgaagacaaaagggttggaatgggatggatggatggatggatggatgggaacccagttggacccctcgctcaccactcacacacaggcaggagcgggtcacacaccctctcacagcctggacccgttaaagcgttaccaggcacaaaagtactgaaacagcggacccgaacagatgatttacatggtggcgatctcaccctgcccgtcatcattccgacgcccctgaacatcgattgagtgatggttaaaaatcaagcatttagagaatgagtaaatctgattaataaaaacaactatattgagcagtgacatgcatatacacgcatataaaataactacaacaaggagcacagtacattttcaagttagaatgactgaatgagaggttagcacacaccttttatgaattgaacttgaactctcagttaacaatgtacctaactatgggcatgcacttagcagtgtccatgcagtttggtagttctgcaggcacgcaacatacacaagttcatattaattaaggatattcgaatacacaacatacacaagttcaa

SEQ ID NO: 33411 - DNA, 2077 bp, Setaria italica
  Peptide Sequence Number=SeqID_99385
taaactaaaaattaaagttaaaccttaaaacttaaatagggacaatagacaacttagcagtgtccatgcagtttggtagttctgcaggcacgcaacatacacaagttcatattaatttcggatattcgaatacacaacatacactagttcatatactaattaaggaaaattcaaatcttgtggcacagctaacaagttctgagtctcatatctacatttcaaacttacaaggacccagatggcacctcagataagtttaagaaccatgtacattatacccaaatacacaactagttaggatagacacttgctgcagggttcaatgagtttcaggctaacagttgatggtacattccccaccacgtgccgctcaatagccaaacgagctctttgggcttccacgagatcctcctcaaacatatggagacacattgtcgacttgtgtatctttctttcatggccacggctagtgtctaatgtgaggcactccagtattggtgcaagctcaataataagatttgtaaactcaatcatgctctttgcagaacaaaagccagtgatcatgacattttttaggttctcatggctgtgttgcaaaaggtgccttgagtatgagttataatcagaatattcaagaactgaatcgtgcctgatggttggtagctctacacgcaagataaaagtatccaaggcaggtgaaccactcagaaaagagactagagaacaaaaatcgtagtccggggaaaggcttggttcaataagcgcaacctctaggtgcttgaggtaaaagaacttcccaaccaacattggtgtgttgactttctcatcacgggatgtcagacaaagagtttgcagatttggtgcaatggacggaagcttggttccggcgcaatacagcatgttagactcactagtactcatcatttgcatatgggtcagttgcaatgcatttccaagtgacatgtgtattgggtggcctatatacttgaactgagatagatttggagcattgctttcaatcatctcaagcatcacacaaccttgcacctgtaggaaagtaagctgcaccagcacataaggtatcttcaaacaaactatatcactgcatttataaatgtccaattgcttcaatgccaaagatttggacagaaagctacatagctcctccccggtaatgtggactgaagttagatgcacacttgtcaagctacttaaacaaccaacttcaactccaggatggaaagcacaatgatcaaggaaaagggaccgcattaaccttcccctctcagtggataacagtgaacatgggaagttgtactcaatcttgttgcgccaaggcatttgtaattcaaattcttcaatcccgggtgtaatagcaacattaagccagcggtcaacataactcggatgcacattgtcacaagggtaggtctgaagcttaaatgttttcacaccgatgccagtgtgtttcgtcacaatgtgatcaactctactaataaaatcacttgttatttcatctatgttacgtgcatcttcatttatgccaagtgttttaatatcaaatatgagataaggatagcatccccaagaacggaggaatccccaagacacaccagaagcaagggcagcatctctcattggcatgagagtgtgtatctgacaaagtatatcctctgggagtatcggctctgattcgctccttccgccatcttgaacacaatctcctttttgacaagtccagccttctatttctggtgctgaggcatccattgtctggcgttgcatcagcagctggcgctggacggaccgcgctcgcttctgctccatggtcacctcagcagtgccgtcggaaattccaagagatctgtgcgcacgccccgtgctgctctgcgaatctgcgatgtgctctccgcgatggggcaagcagcgcggtttactcttatagggcgggcatgctgcctctccgtccccgaggacgtgtgggtgaagaccaccaatttgcttcggaggacggcgccggggtgttaacgaattgcgattccttcccgttgctttgcacatggtccatcaatcattt

SEQ ID NO: 33412 - DNA, 227 bp, Setaria italica
  Peptide Sequence Number=SeqID_99386
gaattgtctgaaaaggaaggtggctccgagcttaaactgcagtgatcagacagaaagatcgcggcaaaaggggcactggtgatgctgagacctggaagccccgaaaagattgaccaaaagaagcaaattccgggaggtgaaagcttgcttacactagaaaggcaaggcggtttccactgttttttgctggcaagtggcaacagatggcgcgctcgagcagaaattgc

SEQ ID NO: 33413 - DNA, 362 bp, Setaria italica
  Peptide Sequence Number=SeqID_99387
cggcgggttcgtggccctcgacgtcggcgcgctgtcgtcgtccctcgccggcgacgctggcccgccgccgggtacgcccaccgcgcccccacggacaccccgtgccgcgaacagacacagaaggtggtgaggtcgctgtcgcggaagggcgacaggaagccgaccgacggcgacgccaacggcaccgccggtggcggtggagagcggccgcagctgttcgtgcacgtagcggccggcgacctcggcgacgcgcccagcagcgcgcggctggtcgtgcacacgccgctggccagcacgcccgggagcaagtcccggcggttcggcaggcggccggcgccgtggctggatccccggagggtcgt

SEQ ID NO: 33414 - DNA, 355 bp, Setaria italica
  Peptide Sequence Number=SeqID_99388
aacaaaaacgacggggaaggattctagggggacgagcggcctactggtcctccgcggcggtggctggagcggggtgggcggtgaagatgcggcggaggtgggacgcgagggcgccggacgcgtcggcgtcggcctcgcggcggagcgcgtcctggaggtcccgcatgcggtgggagaggacgtcgcgctcgcggcggaggtcggcggcgtcctcggcgaggtcgcggaggcggtgcttctggcccagggaccgcaggctcatcatgaagacgcctgccatcaggaacagctgcacgaacccctccttccgcttcctcgcgttcgccagcagcccaagcggccgccggccccgacg

SEQ ID NO: 33415 - DNA, 297 bp, Setaria italica
  Peptide Sequence Number=SeqID_99389
cccaattccatgcagcgccaccgaagcaggtagccatgtcggcgtcatctgcctcctccagcttgctcctcctctccctctgcctcgctctgctctcccacttcgccgcggcctcgcctcggccacgcgacctccgcttctccgccgaggacatcgccgcggtggaggcggcgctgccgctgcgccacaggaggtcgtcggggaccaccttcttcgaggtcgaccgcccgctgcgcccgcctaaggggagctcgggcccctgctccacgctgctactctcgcactccttcgccttca

SEQ ID NO: 33416 - DNA, 2092 bp, Setaria italica
  Peptide Sequence Number=SeqID_99390
cgtggccgaggcgaggccgcggcgaagtgggagagcagagcgaggcagagggagaggacatcgccgcggtggaggcggcgctgccgctgcgccacaggaggtcgtcggggaccaccttcttcgaggtcgaccgcccgctgcgcccgcctaaggggagctcgggcccctgctccacgctgctactctcgcactccttcgccttcacgctcaccaagccacccgtcaccgcggcgtactcgccgccggagtgcctgctcgaggccggcgcggtctcgctcgcggtgctcgagtggcgcgccgagtgccgcggggtgcagtacgaccgcatcttcggcgtgtggctcggcggcgccgagctcctgcgcggcagcaccgcggagccgcgcccggggggagtggcgtggtcggtatccaaggacgtcaccaggtacgcgccgctcctcgccgccgggaacgccacgctcgccgtgtacctcggcaacctcatcgacgacacctacaacggcgtctaccacgccaacctcacgctccacctctacttccgccgcgccgcgcggtcttcgtcgccgcagccggcggcggcggccgacgccatcgtccccgtctcgaggagcctgccgctcaacgacgggctctggttcgtggtccagaactccaccgacgtccagtcagcgcgcctcgcggtgccgcccaacgcgtaccgcgcggtgctcgaggtctacgtctcgtcccactacgccgacgagttctggtacatgaacacgccggagcagaacgggccgttccgcgaggtcaccgtcctgctcgacggcgacgtcgtcggcgcggtgtggccgttccccgtgatctacaccggcggcatcaaccccctcatctggcgccccatcaccagcattgggtccttcaacatgcccacctacgacatcgagctcacgcccttcctgggcaagctcctcgacggcgagcaccacgagcttgggttcaaggtgaccaacgcgctcaactcctggtacgtggacgccaacctccacctctggctcgatggcaagagctccaagaccaccggtggcctcgtcgcctacgacgcgccgaagctggccggcagcatcgtctcgcactccgccgacggcatcgacggcgagtacgaggcgacggcgagccggaacattacggcgacgggttgggtgagctcgtcacgcggcaacgtgaccacaacattcacgcagcggctgagcttcgcgaacacgaacgtggtgagcagccacggcagcgcgcaggcgatcaaccagacgacggacgcgctcaccagtgtcagcggcggcggggcgcaggcgcagcagcaggtgcaccagagcttcccgctctacatcttcctgggcggcgacggcagcggcacgtcgtctcagcggctgatgcggcgcgtggagatcgggttcgaggaggcgcggtccggcgccgtgacgagcacgctgcggaaccggcaggcggcggcggcggaggtgacgctccgggacgacgccgtggtgggcgcgtcgtggcggatgcaccagacgtacgcgtacggcgccagcgacggcggctgctacctcaggaacgtgagcagcgtcggttacgacgtgcttttcgaccatcgggacgcgtcctgcgccggtgcgcgagggcgctgacgcccgtcgccgacagcgagcgccctccgccttgtcggcgcctccgccgcccgggccggtacggtggataacggccggggaagcgacagggtgtaaatggaacaccgcaacggtggccaagtgtactggtctggccccacctactagtcttcaattatgaaatatgacgggtcattttcatgtgcttagctttcgtcaataaggaaaggtgtgatttgatgcagcaagttgtaagtagtgcatgtaaccccagatgtaaaagaaaattgcttggctttgtaatttattgcatgtatgtatggattttactcgaattctatgggttttaggttgtcacctgcagaattcgcgtgaaattctagccatccaaaaacatgccctagttgaaaaaggtttgtagctttcaggaaacgaaagtttagccc

SEQ ID NO: 33417 - DNA, 1126 bp, Setaria italica
  Peptide Sequence Number=SeqID_99391
cgggccgctcggcgcgctggagagcaacgggtgggtgtactcggcgcactgctccttcaggctcttcgccgccgacgcggcgtggcggtgcctggacggcaagtggctcttcttctggggcgactccaaccacgtcgacaccatccggaacctcctcaccttcgtcctcggcgtcacggacacatccgccgtgacgcgccggttcgacgccgtgttcacgaaccccagcggcgggccggggactctgaggatcacgagcatcttcaacggccactggaacatgagcatgaactacctcggcctgcattcccttcggaacagggagttccggcagctaatccggtcctacttcatgtccagtgaccacgtcccggatgttgtgatcctgaactccggcctgcacgacgggtgctactggaccagtgtccgcgcctacgctcagggtgctgagttcgcagcacagttctggtcaggaatcatggccaaagtgcgtgctcgtgtccacgcatcgccgagggtgttctaccgtactacgatcgctactgggggttatgctagggacctcgcattcaatccaagcaagatggaggcgttcaatggcgtgctcgttgagaagatgaggcggcatggggtgctcactggtggggtgatcgacaatttcgacatgacattcccatggcactacgacaaccgttgcaatgacggtgtgcactacgggcgtgcaccggcgaggctggtgtggcgggatggcaagattgggcaccagtacttcgtggacctgatgctgggccatgtgctcctcaatgccatctgcaatggatgagaattgctggttccgtgctctgtaagttcctggtgctcaattgtgtaaactgtagttaggttggtagggagctgaatttgccgagatgagatcgacacacggtagcacagttcatgtgtacatctgatgcggggagagagatgtgagctggagtttagctgaagcaatttgtatggttagacatctgatcttttagctgtgttactggcctgttcttgctctagtaagcgaggaagattgagaattcgattggagctacctatgaggaaatatcaggtacatgtaaatatataccacgactat

SEQ ID NO: 33418 - DNA, 902 bp, Setaria italica
  Peptide Sequence Number=SeqID_99392
tagacaactaatactttgcatttgtcacaccaaatcaatggttggatgcaaattccagcatcatactaaatctcattagttgtaacttgtaagtttataatatcagaaatacagattggacttgagttcataagaagaatcaatcctcccaccttaattgagaacctgaaagaaccattggcatctgttaggcacccagctcaatgtaactgcacccaggtttcttgactaatccttgcttgcttattatcctcctataatttctggccttcttccactcacctaagcaactgagcatattagaaattaggatacagtggccagaatcttgggagtccagattcagcaattcctctgatacaaactctatggatgaatcgacaccatgagctctgtgtgcactaattagaggagccaaaacctggtttcgcaactgaacaggcatctccttaaaaaacttcatagcactactaagatgaccagctttacaaagcaaatccatcatgcacatataatgctcgatagatggtttgatactgtattccattgcgatgctatgaaagcagttaagaccttcatctactaaaccacaatggttgcatgctgttagaatatgagtaaatacaatggcatctggtcgaacacccctgttttgcatctcactgaaaagggtgacagcctcactgccctctccattgcaagcatagccattaatcatggcactccagatagctaggtccctattagaaacactgtcaaatatttctctagcatgctgaatgctcccacacttgcagtacatatctactagtccagtagaaacttgaagatctgactgcagtcccattgctatgacatgctcctcgacctgaaggccaagattagggtatcccaaaattagc

SEQ ID NO: 33419 - DNA, 382 bp, Setaria italica
  Peptide Sequence Number=SeqID_99393
tcccatgtcccccctggattccgtttccaccccaccgacgaggaactcgtcgactactacctgaggaagaaggtggcgtcgaacaagatcgacctggacgtgataaaagacgtcgatctgtacaaaattgagccctgggacctccaagagaagtgcaagatcgggatggaggagcagaacgagtggtacttcttcagccacaaggacaagaagtacccgacgggcacccgcaccaaccgggcgaccaccgccggcttctggaaggccacggggcgggacaagcccatctacaccaagaactgcctcgtcggtatgaggaagaccctcgtcttctaccgcggccgcgcgcccaacggccagaagtccgactggataatgcacg

SEQ ID NO: 33420 - DNA, 386 bp, Setaria italica
  Peptide Sequence Number=SeqID_99394
cgactcagtgtgagtagtagttttaaggtgcatgctttgtgaagaggagaactgggaaggcttggatatgaaggttattttgctatgatgatactagaaaggtgcccaggacttttttggaaagaggaatggcatggtctgaagtgaaacacttcatattccagagtccagcttcaccaactgtaatactacgtcagtatatgcacatacacttcactagctgaaatactacttcagtatatgcacagactcttcaccaactgaaatacttcttccaaactgcttcactaacagaattgctcatatagagagctatatagctttaagaaaacggtgacctatgttatatattattgtgcaaatataagacattaactttgtttgag

SEQ ID NO: 33421 - DNA, 1191 bp, Setaria italica
  Peptide Sequence Number=SeqID_99395
ttagacaaggaaggcagaccttatgttgaagaacaagaagagtctggctgtagcaccatctactctgctgaaaggggctatgaagctgaaaatcaatgtgaacttgggacttctgagcctcctgataacttgggcaacacagcaaaagcagaatatcctattcaagaaaatcaagctgctgacagtgtgtttctagagtctgagatgttgaggcatgactctgttgatggtgaatctgcacgctcatgtgtcagcatttgtcaggaagaaagattgtctacaaaggaagatcaattatctgtgaaaactctgtcggtacctcatgataataatgattttggcctagaagcttgtccaagtttggcagaacaatcttctgttgatgagcatgctgaaagttctgccagcaacttttgctatgaatatggtgattggacggttgtctgggatccgttctacagtcgatattacttttacaacatccagacacaagagtccacatggtatcctcctgaaggattggaggattttgcatcatacaatagcagagatgcaacaattgagctggtcgaactgggatctaagcatacaagcatggcagttcaagagaacaatcaggttggtgatgacaagcatttggatgcacaggaacaagatcattgcagcgaattgcactatttatctaagattcctgatgaagagccaataattcatagtatgataactacctttcatgaaggacaatacactaagaataaacacaatgattcaacaactgatgtgttagagatggaccaggatgttgctagcaccaaaaagaaaaagagagtaaggagatctcagtcgtatcattcatgccaagacatggcagggaacatctccaatgatatcatcaagtactggactcagcggtactcacttttctctctttttgatagtggtataaagatggatgaagaagggtggttttcagtcacgccagagccaatagcaaagcatcatgcatctcgtgttggtgcgggggtaataattgattgtttcacaggagttggcggaaatgccatccagtttgccacaaagtgcaagcatgttattgcagttgatatcgatccacaaaagatagattgcgcgcatcataatgcatccatttatggagtaaatgaccacatagattttattgtagatgatttt

SEQ ID NO: 33422 - DNA, 766 bp, Setaria italica
  Peptide Sequence Number=SeqID_99396
tttatgctatgaagcatcatgcatctcgtgttggtgcgggggtaataattgattgtttcacaggagttggcggaaatgccatccagtttgccacaaagtgcaagcatgttattgcagttgatatcgatccacaaaagatagattgcgcgcatcataatgcatccatttatggagtaaatgaccacatagattttattgtagatgattttatcaatatcgctcctcatctgaagggagaaaccgcttttatgtcacctccttggggtggacctgactatgccaaagttgatgtttatgatatgaaaggcatgcttaagccttgtgatgggtactccctttttaaacttggtactatgatagcgtcaagggtagtgatgtttcttcctcgcaatgttgacctaaaccaattggctgacatgtcattatcagttgatcccccgtgggcagttgaggtcgagaagaacttcctcaatggaaagctgaaagccataacagcatactttgaagagcaggatagttgaggtgcagtggcactggtgatagaaaccatctttgttagcttatgagcaattcagaaggaccttgagtatgacttaggaaatgagaaacggcctgatccatatctctggtccctacaaatcatttgtaatttttcctgccaaatgtagcttaccgtgtttgtatcatcaatgttgtagtatttacacggttaggaaaaaagctgcctgaaatcacgattaggtaggcggctgcttgacacagttta

SEQ ID NO: 33423 - DNA, 302 bp, Setaria italica
  Peptide Sequence Number=SeqID_99397
ctgcaggattattgttgctagggtccctaaacatggatacttggatagccaattcataccactaatagacgtcatttacaaccaaaagaacaagacaacagagcaaacagcaagaggaaattgaattcattcctcgtgaattcaaaatatattccttacctccgaggagttgatccagatggaggaacaatagtcttcagcttaattactcgtttctttcgtcgccttgacttcgttcttgacgcttagaaaggagggatggtcctctttattgccaagctgacccttctaaagcttctcgg

SEQ ID NO: 33424 - DNA, 1593 bp, Setaria italica
  Peptide Sequence Number=SeqID_99398
tttgtttaacttttactttaactttaagtttaattttgttcttactttcccttaaccttatttaagttcttaacttattaacttattctaagcaacgtttgttgctcagacacaatggtctagtgtatcaggcatgtactgcaatgacttgacaccaagtgtggaaaggccccacagtgcctcaataaccgattttggtgccgttggagatggcgtaactcttaacacgaaagcatttcagaatgcactcttctacctcaactcatttgcaaacaagggcggggcgcagctgtttgtgcctgctggaaggtggttgaccgggagttttagtctaataagccatctcacgctgtcactggacaaggaggcagtaattcttggatcaccagactcatctgattggccagttattgatgctcttccgtcctatgggcgtggtagagaactccctggtaaaagacatcaaagtttaatatttgggtccaatcttactgatgtgataataactggtgctaatggtaccattgatggccaaggtgcgatttggtgggactggtttcacaaccacacattgaattatactagaccaccccttgttgaactgatgtactctaccagagttgttatttccaatctaacctttacaaattcgccattttggaatatccatcctgtatactgcagccaagtacttgtccagcatctcacgatcctagcacctatcagttcaccaaacactgatggcattgatccagactcatctacaaacgtctgcattgaagattgttacatcagaaatggcgatgacattgttgtcatcaagagtgggtgggatgaatatggcatttcttttgctcatcctagctccaacattagcatccgcaacatcacaggacagacaaggaacagcgctggaattgccttgggaagcgagatgtcaggtggcatatcagatgttcgggcagagggtatccgcatagtcaactcagtgcatgggatcagaatcaagacagccccagggcgaggaggatacgtgaaaaacgtgtatgtagctgatgtgagcttggaaaatgtttccatagccatcaggatcactggaaactacggtgaacatcctgatgagaactacaacaagaatgcactcccaaccataagcaacataactatcaagaatattgtgggtgtcaacatcagtgttgcgggcatgttgcagggcatccaaggggatcccttcagcaatatttgcttatcaaatgtttccctcagtgtcagatccacgaatccatggaactgttcacttgtcgaagggtattcaaactctgtgttacctgagatctgtgaacaactgagaacaagtcctgggcccggacaagtatgctacgatggtaatagctatccagcagcggcagcacaaccacagtcgccacagaagtcaagtgctagccgactgctaaatcctttcctttatataagttggtttctctgtaggtaacctttgagtatatctatttgatgcatatgttcctttttttcccccaatgctttcgtaattgtactttatggatcagtgttatgtactcatgttattccaaa

SEQ ID NO: 33425 - DNA, 1260 bp, Setaria italica
  Peptide Sequence Number=SeqID_99399
ataattcaatcatttctcgccagattgtgtgttccaaggaaggattccgtgaagttcgaaccaagaaagtggtgacagatgaagggaaaacaaagcgtccgagaatgataactagagttggttgcaaagctatgattgtagtgaaaaagatgaactctggaaaatggatggtttctaaatttgagaaggagcataaccattctctgtcatattctaaaatggtccctattacctcaaacaatacttctggagaagttgctgatttcactgcaaagagtgcagatcctaatgatgtaaaaaatgagggatgcagtgcaggaacccaatgtaatcctgcggattccctcactgtcctttataacaatttatgtcaagaggcgttaaaatttgcagaagaagggtcagtcacagaagaaatttaccatgtggcagtttctgccttgaaggaggctgcaaaaaaggttgctgaagtcaaaaggagtcgtccggcattgccaaatcgtgatcttattagtgaaagcaaacatgatgtctttcaggttcaaactatgagtactttgcaatgttcaactcaggttgaactgaaaacaacattatccaggaggccgcttcaagagtctgcctccaatcttttgctggtaccaaccaacattataactgattcaaggttatataatcgtgttgacaatgttcctctatcaagtgatttcctaaaaaatgggagacaaggtaggcatgcaacagaaggttcttttgtgcattttgagaacataaaggagacatctacgcaaaaacctcagaacactagctctaatcaagccatccatggaaaggatgaaggtatccatggatcttctggagaaaccatggttgctattcctgcaatacctcttgcgctgtgcatgcctgtgacacagaacttgcctcgatcttctgcagatgggccatacagattgttggctgcacctattgaagcagttccgatttcatactgtcctgcagaacccatcaggcagccacaaagaggtgtttgtgctttaggtccatttgcaggtgttctgtctgaactgaacaagccaggaacaggtccaaattctctggttcatgctacagctcttgcttgtggtgcgcgtgctgttcctcttgaggaggcagcttcacttatcaatgccgttgaatcaaagatcagatctggaggggccataatagcaaagatgccttcaagcaacctgacatctccgtttcctccagctatcttct

SEQ ID NO: 33426 - DNA, 400 bp, Setaria italica
  Peptide Sequence Number=SeqID_99400
tttaaaattaacaagaatagaataattagacaatttctctgtaatagatgaaaactttgtgccagcagggtatgctgtcccaatttacgtcgaagaaactcttgatgaattctttttccaacacagagaagcacgatcttctgaacatctcattgagaaacggatgaatgctgtatcacactatatgatctccattgagtttgatggaacgtcagggccttcaaagccaatgtcaatggaccttgtgggcatttacttctttgaagtaaacttctcttcaagtaaaaagccaattctcggtgaagaaagtttaggagcattttcgtctaatagaaagggtaacgatgggttaattgtgcctgtggtgctcgatgtttcctacagaattacagcaagcgta

SEQ ID NO: 33427 - DNA, 386 bp, Setaria italica
  Peptide Sequence Number=SeqID_99401
cctcgtcctcctcggctcctcctcctctgtctctctggcgcacttctctgccggtgttcctccgccatttccctttttccccaccgcagatccacaccgctgcccctcgccgcctcagatagtcagatggcatcaccgtcggggaaccctaaccccaccccgagtgcccccttcgagctcagcaagctcttccggccgccgccaaaccctaaccaccccaccaccgccccgagccccaccggcgtattcccgggcgcgcctggccccgctgccgggccaccgctcacagggccctactcctacccgccggccaccccgcccttccaccgtggcccctatctccaataatcaaacgacccccatggcttccaccaccccgccgccgg

SEQ ID NO: 33428 - DNA, 243 bp, Setaria italica
  misc_feature (163)..(163): n is a, c, g, or t
  Peptide Sequence Number=SeqID_99402
tttttttgaatggaaatcaagcaatcatcgtaatcatacacgagcgtatgagtgaaccaaatatacatgctatttatgtgtgtatacatattgtcacgaaaaattcttcttcgtcgtcgtcgtcataagaagaccaccgcttatttgctgtgactgaaaaacntgcatggatggatcgatcctcatgaggaggaggaggaggaggaggaggaggaggagttgtggactgacggacttggctca

SEQ ID NO: 33429 - DNA, 783 bp, Setaria italica
  misc_feature (755)..(755): n is a, c, g, or t
  misc_feature (781)..(781): n is a, c, g, or t
  Peptide Sequence Number=SeqID_99403
agaaagtcctaagccgaagaactgaaaaccctaggcggcggcggcggcgcatcccgactcccgaccgccgtatagcagcagagcctccaaagaggcgctccagcgggattcccagcagcagaagcaacacaggccgcgccgtgcgaccgggggcgagggagatgacgcagaagcagaccatgttcaaggggcagagcaagaagaagaccatccctcccaaccgccacggcaaggcgccccacgttcgcaaagggaagagggtcgtcaagccgaccaagttcaccaaggacatggacgccgagaaggaactcaccaagttcatcaaccagtgcaacgaaataaaggctgcgaatcttgctagcaaagaaggtggcgacctcagcatattgaaggtggacggtgatcaatctaaatcaaagaagtaggaattttctggtaacaagaaaccgaacatgatcgcttgaagtgtgatttgtggtaatgccgtgtatgctgttttcctgaagaaatccagtgccatatggctgggtagaagggcatgtttagtgcaaagtgacggtgtaacttgcaacatgccatacaagttttgttctgtgacagacttttaattatgttaaagttggtagtatgtaattatcctatacgttgaaacatttttttttccttttgccgtgggccaatgggagcgccgtggcagtctggcagtagtaaaagcaggacgttgcaaccatcgcaagcatcgcgccttgttttangaacaaaaaaaaaaaaaaaaaacagnga

SEQ ID NO: 33430 - DNA, 1008 bp, Setaria italica
  Peptide Sequence Number=SeqID_99404
gttcctcctccagggcaaggccggcggcgcgcacgccgacgtgctgcggcgatacaagcagaaggcggacctcttcgcgtgctcctgcctcggcaagggcggctcgaacaacgtccggcggacgcccggcggcatgatctaccaccagagctggaacaacgtgcagttcgtcaccagcgcgtcgttcctgctggcggcgtacgccgaccacctcgccgccgcgcgccaggaggcgcagtgcccgtccggcggggtgcggccgtcggagctcctcgcgttcgccaagtcgcaggtggactacatcctcgggagcaacccgagggcgacgagctacatggtcggatacggcgcgacgtacccgcggcaggcgcaccactgcggcgcgtccatcgtgtccattaaggccgaccccgcgttcgtgagctgccaggcaggatacaacagctggtaccaccgccggggaagcaacccgaacctgctcgtcggcgccaccgtcggcggcccggacgagtacgacaacttcgccgacgagagggacaactaccagcagaccgaggccaccacctacaacaacgcgccgctgatgggcgtgctcgctcgactcgccgccggtcatggcggcggccggtttggtcactcgctcgctgatgaagttgatgcaacatccatgaagagcgacaacaagacctcactgccatctccttctccggctgttgaacactactcgcccatcgagatcgagcagaacgcgacggcgtcgtggacggagaggagcaagacgtaccaccggtactcggtgacggtgaccaataggtccctcaagaccgtccacgagctccacatcggcatctccaagctctacggccgggtgtggggtgttgacaaggcgcgctacggctacgtgttccccagctggttgcagtcgctgcccgccggcaagagcgccgcgttcgtgtacatccaggccgccccgccggcggatgtctgggtcaccggctacaagctcct

SEQ ID NO: 33431 - DNA, 410 bp, Setaria italica
  misc_feature (32)..(32): n is a, c, g, or t
  Peptide Sequence Number=SeqID_99405
tctaaccgcctttggcacttttgtaccctgcncttaaaaagagaaaaaaattgcaaacataccactgagtcaaatcccagtctgctcttttaccacaggatatctctttttgccatatgtttcgctcgatgctgaagcttaggtagatcttagcttagcaaattaattgtgtgctgaccaacaaggaaaacagatttcgcattgttggaaacaagtgagcagcaatctccaaaaccatctaggtagaggaccacagtgatttggatttcaatctcgttgtaaaaactactccatcctaaattactatttattttgatttttctacgtacataacttttgatatatatatatctacatatctagatgcgtataaaaaattgtgtacctggaaagttaaaacgaatagtaac

SEQ ID NO: 33432 - DNA, 1110 bp, Setaria italica
  misc_feature (1061)..(1110): n is a, c, g, or t
  Peptide Sequence Number=SeqID_99406
taagtaagaagcagatcaaagtaaatgcattgccgatagaagaaggattcggtaataacctctgggatgaagttccgtgtagtcggcgtgaccgccggtgcagccgcggaggatgaggccgtgatggggatcgccattgggatctccgatgaagctccttcgtctgacgacggagcaactgctgtcgccactaccgccggaggtgctatttccggagcatcgcgcgctggagagctgcctgaaggggccgccattggaggggaagagaagaagcaataggaggatggcgctaggaagcttcagcgacaagggaaaggtgctgagggaagaagagggcgcgcgcgctgaggaagaaagacgtgagcttgaagatgaagtacggggtgaaccgctatttaaagggcgcctgaagaggggtaaaaatggaatttttaccgcgccggcgtttcaagtttttcgggagtagtggttgtcgtgggcgcccatttcgaaaagattgcaatcatcagctggaagaccgcgaaacggaaggatattttcattgcggttgtttcggaggagaagttgaaaagaatttcgaagtaaaagactatgttttactccgaaactagggggcatgtgttgacgccagatttcgtcactagtaaaatcggcgccaagaagagaggagattggaaaaagtacagttgggaatcggccgaatggtgctacagtacgagatcggccgatgatttctgcctcacttcggatcgagcgcgacgggttcccggtcggttgccttttgccgataaggaatcggctgattaggaggttgggataattgggcctatatgggcttggaaaataaatgagggatgaataaaggggggagaatcagcccatgaagcatataataaccaacctagcacgaatcgtgcttgtaaatatttgttttctatttgaattagggatagaattctagtcagttaaggagtcatctgtacggggctataaatagctacctttgtaaatctgtaatcatcaacaaatcaatacaaccaactactttttacctaaacgtnnnnnnnnnnnnnnnnnnnnnnnnnnnnnnnnnnnnnnnnnnnnnnnnnn

SEQ ID NO: 33433 - DNA, 215 bp, Setaria italica
  Peptide Sequence Number=SeqID_99407
catggaagaaaaatattaccagcaaagcccagccgaggacctgaccctggcgaagctgctggtgaggcctgggaaccagttcctggaggacccggtgatgaaggacgaggcgctgctcacggccggcaactacgggtcggtgaggaaggtgttcgtggtggccaaggccgacggctccagcaccgaggagatgcagcgctggatgggtggacatg

SEQ ID NO: 33434 - DNA, 976 bp, Setaria italica
  Peptide Sequence Number=SeqID_99408
aatgcactcggcctggacgacgagcacattgagctcctcctcctcaagacgctcctctcggcagtcacctccacgtccgtgcgcctacacggtgattgcctgctgcgcgccgtgcgtgcgtgctatgatatagtaaccttgggagccgcagtgctgtcaaccaggccactgccaaggcgtcgctcgtgcagatgctggtgatcgtgttccgccgcatggaggccgactcgtcgacagtgcccgtgcagcctatagtcgtggccgacatgattgagctgcctgacgatggttctggctccacgccaaccgctgaccccaatgttgtgcagggattcatttcgaagattattggggactttgatcctctggcacggacaacttcatcagcaggggcaggggcaggagctaccgtggcccatgatggtgcgtttgagacaacagcagcagcagaggaaggggcgaatccagcagatttgcttgattccacagataaggacatgcttgatgccaagtactgggagatcagcatgtataaaacagctattgagggtcgtaaggatgagcttggtgtggagggggcggtggtgggcactttggatgatgatgctgatgtgaggattggaaataagctgcggagggatgctttcttagttttcagggctttgtgcaagctttccatgaagacaccacccaaggatgcaccagcagatcccatagtgatgcggggaaagatccttgctcttgagcttctcaagatcttacttgaaaatgctggtgctgtgttccggaccagtgagaggtttctcggtgctatcaagcagtatctatgcctatcgcttttgaagaactgtgcctcatcacatatgattgtttttcagctatcttgttcaatttttattagcctagtgtcaagattcagaccaggattgaaggcagagattggagtcttctttcccatgatcattttgagagtttt

SEQ ID NO: 33435 - DNA, 410 bp, Setaria italica
  Peptide Sequence Number=SeqID_99409
gggggggtggggggggtgggattcagaatcgggataacctgcaccattgtgatacattgcttttgtctgaggatcatcctgtttccaattaggtgagaatacagtttcagggtgtgagcagcatggtgtcagtgtaggaaccgatgatccataatcacatggtaagagtgggtgtaaattggtcatttctgcactagaatcatcccgtgagaaatggacttcagcgattccaatattatgttttgatacttcattactggaacatccgaacagctcgttgctcgcgttctggacttctggtgcccctttgctggcgtctccgcgctccctggtcgccgtcgacgacgacgactcctccccctcggcgtcgaggcagcagtcgggttcgggtagagaggcaaggcggggag

SEQ ID NO: 33436 - DNA, 425 bp, Setaria italica
  Peptide Sequence Number=SeqID_99410
gccgcgacgcctcttttccgcccgcccggcgcccaggatatagttcccgctctggccgcttgcgcttgtatcttcctcctcgtcccaggcctttcggtttgggttgagcgaattcagccacgaagcgagtgagtggccggaggggcagcggcgcttggtaacggaactcgctcgctttccaggggccaggcgacgaccgccgcctcggcacttttctattcgaggttccgggtcagacattggttgcagatagcccagccagcagccagccgcggggcgggatcgtcttgtgtcagcgcggagtccacggcgattagtggttgagctaaccggtggcctgctgtgctagttactgaccaagctgcttcgtctgtgccatggcgaagcgcggctcgtgctgattgatatctggagctgcgcctgcg

SEQ ID NO: 33437 - DNA, 1030 bp, Setaria italica
  Peptide Sequence Number=SeqID_99411
ttttttttttttgaaatcaacacaattttggctttacttattcaaatcaacatgattgaaacgtatagacttgagtacatcgatgaacagactcagaaaatagcttgcctacctagccagctgtttacaaactagagacagagaggattgcataattctgacgcggagttctcgtgttgtataccgaggaaccccttgcttgattaccttatacatgtagtaatttctacgtcacggccacatagtatatatactgctgtggtcattctacaccgccgtcgcggtgggagcccgcggcacgccgcgtgcctcgccgccggccacacaataaaactgagccggaggcaggtctcgccgcggcggcggcgcggagcactcaaccacgagagtagctagaactaacatacagctcgatcgatcacgcgtcgactaggaactaactaacagaagaaaaaatgaaagagaaaccgaagccaccaatcgaaccagctagcagacgacaagcaagcgagctactccagccgcaggatgcgcctgaggtcgcgcgtcgcggcgtcgtcgacggcggcgacggccgccgcggccttcttgacggggaactgcggcagcggaagggcgctcggctcgggggacgtcgagaacgccggcccggcgtacacctccgccgcgggcctcgacgctgccttcctgccgtggtgtctccggcaggccggcggggacctcctggtggcgccccccggcggggttgttgctgctcggtctccggtgtgacgacgccgctggccggatccggtgcggcgccggcaggaggatgttgtgcgggcgacaaacctcggtggccatctctcggcaggaggattggagaggaaaggggggcgggggaggaggttagttgggcgctgattgctgctcgtggtttggacgtggaatttccggcgggtctgcgcgcagggctcttataagcgggtggaaacgcggaagaggagggagaggaatggatggattcggtagacgcgttggctgcttttgc

SEQ ID NO: 33438 - DNA, 391 bp, Setaria italica
  Peptide Sequence Number=SeqID_99412
aatggctacacgcatgtaaaagccccacaaaagtgacctcatttggcaacactcctgcagattccatttgttgatatatcctgatggcttctcttccaaggccatgttgagcatagcctgtaataacggtattccatgtaaaaatgtctctttcctccattgaatcaaaaaccttaagggaatctgcagaaccacacttgaaatacatcgagatgagagcattagccactataagtcctgaatccatacctagcttgacagcaagggtgtgaatctgctgtccaagtttggaagcaccaagatttcccccaacaccaagaagtatcgttaatattggtgaattgggtaactcatgctcctgaatgttactccagaaatttctttgttaaaa

SEQ ID NO: 33439 - DNA, 1647 bp, Setaria italica
  Peptide Sequence Number=SeqID_99413
ctctgtagcgtgcatacttgtgttcaggatgatagcccaagtaatctgaatttcggctcccatgcagttatagccttgacagttctgaagcggaaagagatgctgttaaggcccagaacaggaagggatatctgttactgaggaagcattgcctgcgaaaatctgcatacagcatggaagggagcaagcaatcaacaaataaaacagctggagtcaaccctgaagagagcattagttctgaaaaaggtgaagaatctggttgtgccagtcctgttgaatccgtagaagttcctgaaaatgctattgtggaagaggctatctcaaccgaggaaggaaatccatgtctcagtacagagcaagaattgcaggatgacacatctgaaacaaagcctgagaagatggatgaaaaccaatcttcatctagttcctctaatgacgaagatagtgagagaagcaatgtaactcatgtagaagcatctcataaggacttggcctcagtttgtgagccttcattagaggatgaacaagaaagtatccccagatattccaacacaggaggaaatatggatgatattgaggtatctaaggctgcccgtcctgtgaagtctgcacgggcaactgaggattttgagacgtggcaacgcattattcgtttggatgcagtccgtgctaacgatgaatgggtttcctactctccatctcaagcttcagtttccagggagaaggcggttgaatctgctaaagctgtttgtctcaaagactacgaacacttggaaccatgtcggatccatcacgcgtcacgccttgttgctatacttgaggcctatgcaatttatgaccaagaaattggatattgccagggcatgagcgacctccttgcgcctctcctttctgttctagaggaagatgatgaagccttctggtgctttgctggtttcatgaggaaagcccgccacaatttcaggcttgatgaagtgggtattcgtcggcaactcaacatggtggccaggataatcaaatacaaggacttccatctctatagacatttggagatgctccaagctgaagactgcttttttgtttacagaatggtggtcgtaatgttccggagggagctcaccttcgagcagaccctatgtctctgggaggtgatgtgggctgatcaggcagcaaaccgcgctgggattgcaaagtcgtcctggcgaagaatgcggttgggagcccctccaacagatgacctactactatatgcgattgcagcgagcgtgttgcagaagcgtaaactgatcatagaaagctacagcagcatggatgagatcattagggagtgtaacagcatggctgggcagcttgacatttggaagctcctggatgatgcgcatgatctggtggtcacgcttcacaataggatcgaatagctgtgatctttgttgcttgcactatttgttgtattagtttcacgttatcatgcttccatagttttgttacaccgaatttctttgtatggtaactcgataccagtaatggatagaagcacggtgatggaggtagctagcttgttggagatgccagcaactcttttactgaacgcatactggatgcggtggatagttcccttgaggccttaagagtcattcatctgtacaa

SEQ ID NO: 33440 - DNA, 409 bp, Setaria italica
  misc_feature (1)..(18): n is a, c, g, or t
  Peptide Sequence Number=SeqID_99414
nnnnnnnnnnnnnnnnnncggggggacgggccaggggcagttagtaatcttcacccacacacatgcttcagagaactcttttgtattttgacaggaaactgtagggacatcctacacataggagattgttaaacagactctgaagccatgcatgcagtagttattggcaaaaatagcagccatgagcctgtgctaattatttggctaattcgggatttaatctaacagcagcatggagcatcctactctgagcatgcaggttacattggcggagggcccataagcattctccaacctgcaagagcataagcatttcaaagtactaattcaaatgaatcaaagcagtattgccatactacaacactattgtctaaactgaacagcagtgggattaaatcagtcagaagat

SEQ ID NO: 33441 - DNA, 232 bp, Setaria italica
  Peptide Sequence Number=SeqID_99415
accgcaaggagcagacggcgcggggcggcagccagtactgcaagttcgacagccagctgctgaccgcgttcacgtcgtcgctgtacctggccgcgctcgtcgcctccttcttcgtggcgtccgtcgcgcgctcgctcggccggaaatggtccatgttcggcggcggcgtctccttcctcgccggcgccgtcctcaacgccgccgcgcagaacgtcgccatgctcatcgtcgg

SEQ ID NO: 33442 - DNA, 976 bp, Setaria italica
  Peptide Sequence Number=SeqID_99416
gcttcttgctgtactcatcttcataccttcctccacccccatatccaccagcactaggcttcttcctataatcatcttcctcctcataccttccacccccatatccaccagcactaggcttctttttgtactcatcttcttcatacctccctccaccataggcaccaccgctgccaccacttggaggcctcttgtattcatcttcttgctcatatctccccccaccatagccaccacttgtaggcttcttattgtaaccatcttcttgctcatacctccccccaccatagccaccacttgtaggcttcttctggtaatcatcttcttgctcatacctccctccaccatagccagcactacttggcttcttcctgtgatcctcctcttcctcataccttccacctccatagccactcccaccaccaggcttcttcttgtacccttcctcctcctcctcatatctcccccctccatggccaccgctgggcttcttgccgtacttggtttcctcctccccctgatgcttgccgccggcgcccccttccttgcggccgtactggtggaggtactcctcggcctttcctaggtaccctcccacgggcttgccctcgagcttgccgtactgggaggcggcgtggagcaggtcggccgccgccccggcgacccggcccttgtccaccttctccaggctgtggtcctggagcgccagcttggccgcctccgccacgagcttggcgctcgatgcgaggtccccgctgcccccgccggacggacggtgctgcgaaggagggcggcggcggccggagtcctcgtcgccgtcgtaggaggccatttccgcggggtggatctagagagagacaagcgaacagggggttttgctttgggtgcgagtgcgcgatgcgatgcgatgcccgtgtggccgtgtcgtcgcggtgtcgggtgcgcttcttcagcgaggcgcacggccacacgggta

SEQ ID NO: 33443 - DNA, 912 bp, Setaria italica
  misc_feature (10)..(10): n is a, c, g, or t
  Peptide Sequence Number=SeqID_99417
aggagcacgnggaagcagcagtgtcggcaatggcgaggctccagccagcactgcccttcctcctcctgctcctcctcatcgccggcgccgcggcggggcgcgccggcggcgtccggacgctgatcttcatcctggcggggcagtccaacatgagcggccgcggcggcgccaccagcggcgtctgggacggcgtcgtgccgcccgagtgcgcgccctcgccgcgcatcctccgcctctcccccgcgctccgctgggaggaggcgcacgagccactgcacgccgacatcgacgttggcaatgtcctcggcgtcgggcccggcatgcccttcgcccacgctgtgctcgccgccggcaagggcgcggggccaccgtggggctcgtcccctgcgcgcagggcggcacgcccctcgccaactggacgcggggcacggagctgtacgagcggatggtgacgcgcgccagggcgccatggccggctgcaacggaggcggcgagctggccgccattctatggtaccagggggagaccgacgccatgaagcgggaggacgccgagctctaccaggggcgcatggaggcgctcgtgcgcgacgtccgccgcgatctcggccggccggatctcctcgtcatccaggtcgggattgcgactgcgcagtacaacggcaagttcctcggccgtgtgagggaagctcagaaggcagtcacggccacggtcccgaatgtcaagtacgtcgacgccatggggttgcccattgcgagcgataagacgcatcttaccactgaagctcaggtccagctcgggaacatgctagccaagtcgtatctagaaacgctgtaataatctttcgatcggcatgtaactttttataagaaacatgggattatatgcaattaagttaagacaaaaaaaaaa

SEQ ID NO: 33444 - DNA, 524 bp, Setaria italica
  Peptide Sequence Number=SeqID_99418
ctccgccgctgcctcgctgaaacggggatcccgccgccgccggcatccccaacccgtcagctccagaactccgcgccgcactcccgcttcgttcgtgattccatctgtgagccgcagcaatggcagcgggtggtgcgccgaccaatatgcagaaggaacagatgtttggattggctgagaaagagatggaatacagggttgatcttttcaatcggcttacacagacatgttttgccactattttgattctttcactatattaagagtttttgagtttttcttgcatcacttataccactgggtttttttctttctgcctggcatattgtctatatctttttctctctctcgaacatgctagtgtatatgttcttaaatcaaaacagtatgcaaagtgattgatgtattatacttgaactatagaatggatgacattatgtatggcagtttctgatgttccatctttgatctttgtttcactgtatgcaggcttacacagacatgttttgccaagtgcatcgaga

SEQ ID NO: 33445 - DNA, 303 bp, Setaria italica
  Peptide Sequence Number=SeqID_99419
cttcagctggcacatcaagatttcccttgtctcttcaataaaataataggtgttggactaaagggcagatgagaacgcccctccatggtgtccttgagcagttttgtcctcctggatcgagaactgtgtcaccgcctccgagccgtccacccacggcgtgctgatctgccaactgccctgccgctggatagccaggtccttggggagcatcaggttcgtcttggccgagatgatggccgtgtcgcccggcatggcgtgagccgagtgatggtggtggaggctggggtcgcctgttgatggcgg

SEQ ID NO: 33446 - DNA, 344 bp, Setaria italica
  Peptide Sequence Number=SeqID_99420
ggcggaggaaagccacaaaaatcaaaatgtggtccgaagtcgtaaccactagcttatcaacaaagtatagaaaaaaggattgtaatcgggtgtttggttacatgtgcgactggcaggacgccacggagcggcgaagccatcctgccagggactttgacaccgactgaccgagacgtcgccccggagtctcatatactaggagagcaagcaagcaatgacaaagccatcccatcttttttgaccggatcagaggattaaaagttcatccacagtgagtccggttgttggaacaatttaaacatggaagcttggaggaatttgttcccgttgtgtgcaagtacatg

SEQ ID NO: 33447 - DNA, 383 bp, Setaria italica
  misc_feature (91)..(91): n is a, c, g, or t
  Peptide Sequence Number=SeqID_99421
ctatgtgtagcttgtccaagcaatccacctcccaaaaattttcttgtgcttctatcattaaatcagccaagaactttgcaatctcttttancgtttttttctcagttgtgcttctgtagtataactgtcttgcactttgtttcattagatgagccaagaactttgtagaaatcactagacactgggtttttctctgtgtacagttggtagagaaggaaactagtgacttgtttttttagatggcttgataagctgcaaagaaacaggccaattgtctgctaatacaaagtcttttagggttctccattcagagtttgccaaaagttcctaatatctgaatttccatcattctgcattgtcttctcaagatttacttgttaaca

SEQ ID NO: 33448 - DNA, 340 bp, Setaria italica
  Peptide Sequence Number=SeqID_99422
gggggggggggggtgggcggggcagaggcagagctacgcaggtaactacagggcgccaccaccagagaggagacctcctctcttggcgagttggcctctctcaccaccccgccattaatgcccaaagttaaactcccccaactgcctcccaattattactcctccgcttccctctctcctccgattcgaaaccagcaggagcagcacccgaattccgcaccacctcccgagctcgccgcggccacgacggcgccggcgagcgcagagcgagcagcaggcgcgacggctgcggctgaagcggaagcggaagcgccggagctggggaagagagagaggagac

SEQ ID NO: 33449 - DNA, 234 bp, Setaria italica
  Peptide Sequence Number=SeqID_99423
atccttcactgccaatggaatgattccaggtgacttctgttctccatgcatggtgtgagttttcccactgcttgttacaccatatgcaaagaccgtgccattgattccttgcatggcaccacttacaacatgctgagcagcaacatcatatacgtgccgagttgtagtagcaggaccaaaaactttatcgaaagcataggcaatgctggggttgtactcgttgcgcaccatatt

SEQ ID NO: 33450 - DNA, 321 bp, Setaria italica
  Peptide Sequence Number=SeqID_99424
cgagatccgttcaaccacaggccatgttaaggagattaaaaggtagaaaagcaatttcgtcgtgaaaactgtctctaaatcaaagatggatccaaaatatcaacatcctagcatacatctctacatgatggacctgaaagcaccattgttcactgaggctggggctagtgacaatgggaacgaggaggaagaggatattttgaatccaggggaagatgaagatcctgaagtgaagagtgaaccttgttctggctcactagaagctaatagcggtagtctggatgaatgggacatcagaagatgcggggctatggctgcaag

SEQ ID NO: 33451 - DNA, 1784 bp, Setaria italica
  misc_feature (1764)..(1784): n is a, c, g, or t
  Peptide Sequence Number=SeqID_99425
ggaacctaagcccgagcacgggtgttggctcaggcttaggcttgggcatgggtttttccggtttggctggggggttccgagtctggcttcggcctcggtccaaggaggccggaggaggagatgaacggccccagccaccagcaacagcagcagaggctccggcagcagcagcagcagcagcagcaggctctcctgatgcagcaggcactgcagcagcagcagcagtaccagtccggcgtcctcgcggccgcggcagcggcggccatgacccagatggaacctatttccaatggcaatcttccacctgggtttgatccctccacttgtcgcagtgtgtatgtgggaaatgtgaaccctaacgtcactgagagccttctgattgaagttttccagagtgctggccttgtggaaagatgcaaactcatccggaaagagaagtcttcctttgggtttgtggattactatgatagaagatctgctgctctagcaataatgacccttcatggtcgtcacatatatggacaagcaatcaaggtgaactgggcgtacgcaagtacgcagagggaggacacatctgggcatttccatatttttgttggtgatttaagttctgaagtgaatgatgcaactctttatgcctgtttctcagcatatccttcttgttctgatgctcgagtcatgtgggacaacaaaactgggcgctccagaggttatggttttgtctccttccgtaatcaacaggaagctgaaaatgctataactgaaatgactggaaaatggcttggaagcagacaaataaggtgcaactgggcaacaaagaacaattcagaagagaaaccagaaactgacaatcataatgcagttgtactaacaaatggtggctcgagtaattcagcaacagatgcaagccaggatggaggaagtaaagagaacccagagaacaaccctgattgtactactgtatatgttggcaacattggacatgaggttaaccgagatgagcttcaccgacacttctataacttaggggttggggcaatcgaggaaattcgtgttcaacaggagaaagggtttggatttgtgagatatagcaaccatggtgaagcagcattagctattcagatggccaatggattggtagtccgcgggaagccaattaagtgctcatggggcaccaaaccaactccacctggtactgcatccaagcccctacccccaccagttgctccgtaccagcctgctgttgcaatgccaggcgtcccgcaaggcttcacagcagctgagcttctggcttaccagaggcagcttgccttaagccaggctgcggcagggcagattgcagggcagcacggtctcgcgggtcaggtttctgcagggcttcttgctggttcccaggccctctacgatggctacccaaaccagtcatctgctcagcagcttatgtactacaactagggtttgagaggaaggcatttgtagtgttcagcttgtttggtgcaagcctggccatcctcttcctgtttttattttctggttcatgtactatttgtgtgagagtttttcgttctctcttcgcgggattgtgttactatcctcttattgtaccattgaccattttccttgtctaattccgtcgagtagtccactttaacagagtaagagatgtattctatgtgaatttgcgattgattaatgtaatgctcccctggagatcagcttcggtctctgggctggttcacgataaacaaaaaaaaaaaaaaaaannnnnnnnnnnnnnnnnnnnn

SEQ ID NO: 33452 - DNA, 328 bp, Setaria italica
  Peptide Sequence Number=SeqID_99426
aaatcgaaactattggtttcagatggattagaaagctgcctagatgctggctctgaggtcacaactatatggcagttattgaacaacacttatgaggtgagacacaagtcatcagtaaggcaagacatccttgaccagctgcttgacagcatttcgacatctaagaaggacaaagtgatcagggcatcagtatatgtactactgctcatgatatctgaagatagaaatgtgatgagaggcatcaagaggaaggacttccatttatccaatttagccactgcattgaagagagatgttcatgaagcagccattctgatatatctgttgg

SEQ ID NO: 33453 - DNA, 132 bp, Setaria italica
  Peptide Sequence Number=SeqID_99427
ttggacgcatgtcacatagtctttgtgtttgaaaactgcaagacaaccatcacagccaggtttccataagcgcactgtcttatctttggacgaagtcaagagataatctgactttgaccatgtcaaatcaag

SEQ ID NO: 33454 - DNA, 384 bp, Setaria italica
  Peptide Sequence Number=SeqID_99428
aactgaacaaaagttgtgtgaatttataagttattcaaaagcctttataaaaaaaagtaagtatgagtaacaccaaagggcaccataatcatcagattgtcatctaataaatattgctaccttcctctatgagctctggccccttggcgcgttgaggccggtggcaatggtgcagtcctgccagttaaaggttcaaaggcacataacttgtggactgcttcagtaggccacaggttatattcttatgcaacaggaagtaccacgaatggatcaaacaactcctatcctcaaagtcctattacttgtacgttgcatctccaagactctgtactatgaagcaaggatgcatattatccttgtttgaaggtggattagtgcagtaac

SEQ ID NO: 33455 - DNA, 229 bp, Setaria italica
  misc_feature (215)..(215): n is a, c, g, or t
  misc_feature (218)..(218): n is a, c, g, or t
  Peptide Sequence Number=SeqID_99429
gggggaataggttttttcgttctgccctcctgaaatgcatgtgtgcagtacacataggttgaaatccacattttgctcctcatggtagcagctaggaatcctttgaaagtcattcttttatccaaatttggtcggatttggttctacagaaaatgtgaataacttgtatagttattaaattattattttatggaaattaaaaaaaaaaaaaaganacncacaggagtag

SEQ ID NO: 33456 - DNA, 350 bp, Setaria italica
  Peptide Sequence Number=SeqID_99430
gcgtggggcgctataagagcgagtggaggaggagcaggtggagcaggaggctggaggggccgaggctggggctggggccgcctcctgcagcggcgaggagggaggcagatgagggggaggaggggcggtcaccggcggcgcgggtgcggagatcgccggccatgtcggagggagggaaagcccattaaaagccggggtcaggaggaattgcaggcggcggagtccgacgagcgctgcgctctggtggacgacgaacgatgggagggagcgagacgagccgagagaaacacggccgagcgcttcgcggaggtggggtggccgcgcaggggaagagaagagattagaagagg

SEQ ID NO: 33457 - DNA, 337 bp, Setaria italica
  Peptide Sequence Number=SeqID_99431
gctcataacatgaagcaaaactaattagttgtgaagtatggaaattcgggtatactctgcatatcttaaacttacatgcgcactagaatgtttcacgagaaaagcagatcaatcgaattatttcaagaagacatgcaaaaagtaaaagtcaggtgtacctttgcattgtctaagtgcagttcatgcatacaaatcatcgacatgagtttcttggttgcatgcaatgtgtggataatgattttccatgtttgggttgaaaagaaaggccaacaaaattataactgacaaacctttcactctttgcagtcgctacagcttcaaccacctcagaagaaag

SEQ ID NO: 33458 - DNA, 446 bp, Setaria italica
  Peptide Sequence Number=SeqID_99432
tatgatgggttgccctacttttgattcccaatggagttcaaagcggtagagggagccgctgggcatgtgtctataactctatatgctgcaagacgatgtctggtctattcgtatttcagcttgtgaattgccagtgtggatctcgaacatgctgcttgttcacgaccggatctactgtatggtgggcaccatcagcttgtgtttgacttggtatccaaaattcttcacaattgagctctcaaaaccggtggcatttggagatggtgagatcaggctgtcgtgccaatggttcaaagatcgatcttgttcatgtgaaggagctccaaatttgcatctggatccacaggtgaggctatggcagcaaggggaactggttgctgtttgatgccatttcctcaggcaatgtgtatgcttatctgactagtactttgcgcgcggaatgcaaa

SEQ ID NO: 33459 - DNA, 507 bp, Setaria italica
  Peptide Sequence Number=SeqID_99433
caaagaagctctgatcaagtttttccgcatgttgatcaggagaagatacttttcaaatgagcctcctgccccaagtccctggtctcttactccaagagaagataccatccttcctgtagagactcttggaggtggcacggatagcttccaaaggaaaagccttagtggtgagggctttatgtacaatggtgtagtcccactaccagctcagaggaacctcactccgccaccgactctgaatccgcagcagcctgtgacgtccttggataactaaagatatcaccgattctcctcctcgtctcttccggacgtgagcagcggtagaacaagccgagaagatatgaacttatgatacagcctggggagctcatattccgttataccttcaaaatgtggtaagcatatggtgcctaggaattgagttcctatcggcttcttgagccgcttaatgccttgcttgcagcatttgaatgctgccaaggcgagctcttgtttgtttaactgtcc

SEQ ID NO: 33460 - DNA, 187 bp, Setaria italica
  Peptide Sequence Number=SeqID_99434
caagcatcggcaactgacctcggtcacggccgataaaaccggcagcgcgaagccgtccacgacgacaccggcggtgacgtcaccgcctttgtcgacgtccgagccgccttcgtcgacatccccgccgccgttgtcgacgtcacagccctcgtccacggcgacgtcagagccaacggcgatggatgcg

SEQ ID NO: 33461 - DNA, 510 bp, Setaria italica
  Peptide Sequence Number=SeqID_99435
ctaagaccagctcttccttcacgtgcagtgcaaagacagcagctctgcacataccttcaggttgcttgctcttgaaatcgtagaagcccaacagtttcactaaatctcctcgaactccagcttcttcgatagcttctcgtgcagctgcctcttccacagtttcatcattctcccatcctccctttggaaatagaagacctggtccactctgggagttgatcatgagaacttcaacaagtttcttttgttcatctttaatgtctctatatctgaatggtatgcacccggccacaaggcgacggccgtcctcgtagcgctgcaggtgccggcccgtgcgggccaccagatcgcacatgcccgcctccccttcttcctcctccgatcccgccgcggcggggctcaggctgcccccgagccaggccccccgctggttcgagcctctctcctctcgcgccaggagggacggcggcgcgcggcaatgcggcggggccgtctggccgtgggtggcgg

SEQ ID NO: 33462 - DNA, 271 bp, Setaria italica
  Peptide Sequence Number=SeqID_99436
ctgtcatctcgtcatacaggcccttgatgaacgaccactctttcgagatgctcggatcacgaggctcctctaactctgcaaagtaagcggccggtgaccgtggctcaatgttgtgtctcttgcagaatggaagccaacgcttagcgaacgcggaggcctcccatagagcatagaaagtgagaattgagcccccgtgtctgagaggtaaacgttcagtttctcaggtgggtaattgtatgccatgagcgacaggactgtggcgacgacgagg

SEQ ID NO: 33463 - DNA, 312 bp, Setaria italica
  Peptide Sequence Number=SeqID_99437
ttggggggtgggggggggggcgacttaataatggcctgatgattagaaacagctggagcataagaagaacataaactcctccagaactgacatagcgggggagaagatgactggagtgtttactcagagcatagctatgaggtccccttcctgtcgaatatcttttcaccttctattgcattcttatctgtagcaagtatactcaattcattttaggaacttgtgtggggagcagaggaggtgtaatcagttgtctggtacatgttagaagattggttgtattataggaggatgaggtaggttttcatatgg

SEQ ID NO: 33464 - DNA, 1537 bp, Setaria italica
  misc_feature (4)..(4): n is a, c, g, or t
  misc_feature (1527)..(1537): n is a, c, g, or t
  Peptide Sequence Number=SeqID_99438
cggngaaaagtttaatctgaccattcagcagaagatgaaccaattcgcacagatcacagagagtttgatattgaggagtttcatgacagtaaccagaggaatggtcatctaggtcagaattcaggccatctagttggacaaaaaggcaagcagaggtttaagaggaggatatttgctttgaagaatcataatggtaccaaaatagaaattattaaaatgaatggcgatcaggtggatgagcatgttttagctgaaggaaatggccatttgacatgcgacccgagcaaaagtactcccaagaaagaaggctctgaaagccattactcaagaattctgcctaagaatgtcagcacaaatataacttcttgtacgacaggggaacacatgattgtcaaggatttcatcaacttggaagtagcaaaaaatgacaagtctgaaacatgtgaacaagtagcttgttgtgcatacctgtttcaggaagcgggcgctttagtccaaagagaggtagccttgctgcaaagttctcaaaacaaattgtatgtcctgctacttgatatggtttgtgatggaaaagaaaccaagccaagagttttgggcagctatactctggaaagtctggaaaaggtttcaattgggctgggactacaggcactgagggtacacatggtagacgatacaactcatctattcttcacacggacttccaaggaagcacaagatgtactttggctcttgagtgtaaccaacaccaacttccccaaattaaaccatgagatacatttgcaaagttgggagaacatccaagttaaattgttcgagaaatgtatatgtggatctgcaaagaagggaatatttctctactctatgttgatgttctggaggaatgatgctgaagacgactccttttttatcagatccatatttgtcattgaaggatcaatattggtgtgcattgaggacctagatcagtttggtcgtgtacctgatgattcagaccctccatacttttctcttgatgcatcttgttctattaacaatattcaagaagtggtcatggatcagcgcaacggcaaatgtttgacattgattttggataatcataggcaagaagagtttcacaatagcatccagaatccgagtaacaagcagtctgatgaaattgatgcggtacatacatggaaacttgagtggttctctgaagaagcacttctgaagttcatttctgtacttaaggctctttactcgacagcagcagcttcatctttacctgttaagtgtatatcctgataatgttggttcttgtagttctgcagtgatttcattcgttctttttggggctgtttgtagctgttgatttgtatagtttgatagttaggttctaggtttgtgctcgatgtattctttgtagttagtatagaaagttttcccgccctgaagttgtacagcacagtgctagaagtgagtgtaaatgaatggggttgcaatttttggaaaaaaaaaaaaaaaaaaaaactaaaaaaacgtagnnnnnnnnnnn

SEQ ID NO: 33465 - DNA, 248 bp, Setaria italica
  Peptide Sequence Number=SeqID_99439
caaaccaaccgaaaacaatttcaaaatagtctcaggaatgtttgagtttgaagaacaagaacagaacagcacaagtagtcttgtaagcatgttcacttaacaagtttgttattctatcaacaattgcctagacattcatttttccatacctataggaacataagaggaaattgatggtaaaacaactaaagcacctaatgaatgctctaaacactgcaattttctgtggttccacatggaactaaaat

SEQ ID NO: 33466 - DNA, 461 bp, Setaria italica
  Peptide Sequence Number=SeqID_99440
ttcgacctcattgctgaaacgcgggaccaaggaagtctacggagtttcttcaaatgctaaacacttcgagtgacgggcgatcttcgaaggttcatgaggtgccacagaaggagtggaagatactttgtggtagcaggtgaagcaagatacagaccaattaagagtcatgtaccgcgagggaccagaggggaccccatttcacacccttcttcttgaaggctttgctgatggacctattgatgtttgtacatgtgtgtcatgggaatcggctctatacaaaaaatggtttccacaatacaacctgccaacttttagaattgatcagtcaggctgcttgaaaaaggttcgcattggtgaagaaatttgtttggtcagggtgaaggttccatggccggtttctgaaagagaggctcttctacactactttgaattggagtatcttaaagaagaccttgtcattg

SEQ ID NO: 33467 - DNA, 472 bp, Setaria italica
  Peptide Sequence Number=SeqID_99441
taggttggtaaatctggacatcagggacatactgcatgctaattgttgagtcatgagattatgaataacagccaatataaccagcattgatatggaatatcatgcaggcagtcagtactgtggcaacttgtgatgaggactacaagagagctttgagaggaccactctatgttaggatccgcgaataccaggattccgatgacaaggtgaaggtgaccacaaaagaggaaaatgctactgaggtgccccctgataatcccattgtacagaatcgtttggcagtaacaaataccacgtcgaatagtgagattgtggaggaggagagcgaacagaacatgtccttgaagatggatattcttccaactagcccttcttaccaaccagccgagcgagcacaacaggtcgaaaataaacctttatcagtcctgaggtagagcatgcattgggcatattggacaccgctattgcagtt

SEQ ID NO: 33468 - DNA, 368 bp, Setaria italica
  Peptide Sequence Number=SeqID_99442
gccgtgcacccttattgcgcttgtcaatgacattgagaagcgcaataagggtgcacggcgaagagagcctagacacaaacggcttccatcagaacggtttaggcaaaaacagagagtcaaagcaagcaaggaagaccaaaaggtggccctgctgcttaacccctgccacgataggatgatgagaacccatcttaggagcctttcaaactaaattcttgatttttgggtgtacacggcaagtagtaaattatatagaaatatggtggttcatcaattacacatgggtgtcaaccaggaagcaggttctggctgtcatagctagtagatagtatatatctttgataaatgtaaagtaggagtattgttgt

SEQ ID NO: 33469 - DNA, 2043 bp, Setaria italica
  Peptide Sequence Number=SeqID_99443
ccagttggtcagccagcctcccgctccttactccgcctcctcgacgtcctcgccgcttccccggctacccctccgcgtccggcaccagcggtgagcagaggaggaggttcttggcagcggccgcgggccatggagaagaggaagcgggtgctggagctgcgggaccggctggaccggacgctggcgctgcccgacctcgcggaggagagctcgctcagggcgctggtgaagaagcagatgcaggcgtcgtccctgaccggctccgatgaaggcgatatcgacctcattgctgaaacgcgggccaaggaagtctcggagtttcttcaaatgctaaacacttcgagtgacgggcgatcttcgaaggttcatgaggtgccacagaaggagtggaaggtgaagcaagatacagaccaattaagagtcatgtaccgcgagggaccagaggggaccccatttcacacccttcttcttgaaggctttgctgatggacctattgatgtttgtacatgtgtgtcatgggaatcggctctatacaaaaaatggtttccacaatacaacctgccaacttttagaattgatcagtcaggctgcttgaaaaaggttcgcattggtgaagaaatttgtttggtcagggtgaaggttccatggccggtttctgaaagagaggctcttctacactactttgaattggagtatcttaaagaagaccttgtcattgtaatcatgaaaactatatcagatttggatactataaatatacggacacatggatttagtagggatggaattcctgaagctggtgacacagttcggatagatgtatttggaggctttgtcttgcaaaggattacaaaagaaagaagcttttttagggcaatagctaatatggatattaagctagactttgttccaccatggttcatcaacttcatatcaaggcagctaatcggcagtgggcataagctgtaccagaaggcagtcagtactgtggcaacttgtgatgaggactacaagagagctttgagaggaccactctatgttaggatccgcgaataccaggattccgatgacaaggtgaaggtgaccacaaaagaggaaaatgctactgaggtgccccctgataatcccattgtacagaatcgtttggcagtaacaaataccacgtcgaatagtgagattgtggaggaggagagcgaacagaacatgtccttgaagatggatattcttccaactagcccttcttaccaaccagccgagcgagcacaacaggtcgaaaataaaccttttatcagtcctgaggtagagcatgcattgggcatattggacaccgctattgcagttatcagaggcgataagaccacgaacatcaccacgctacaaaatttgctcagttatgatgcggcttcgaaaggaagtactgtcagttcgagaagttcacgagctaacattcgcaatgcagacaatcttctgaacggcggtcctgctaccacacaaccacaggactccagagagatccgacaagcatattcactgcccagtgagaaagttagcgatagggcagaagacgccatcgacaaaggttctctgaagaattcgacagcttctaccgtaacaaggacgatgtcaatgacattgagaagcgcaataagggtgcacggcgaagagagcctagacacaaacggcttccatcagaacggtttaggcaaaaacagagagtcaaagcaagcaaggaagaccaaaaggtggccctgctgcttaacccctgccacgataggatgatgagaacccatcttaggagcctttcaaactaaattcttgatttttgggtgtacacggcaagtagtaaattatatagaaatatggtggttcatcaattacacatgggtgtcaaccaggaagcaggttctggctgtcatagctagtagatagtatatatctttgataaatgtaaagtaggagtattgttgtaacaatatgcaattgttttcaattttggggtctagtaattaagtacataccttaattacaaataaaaaaaaaaaa

SEQ ID NO: 33470 - DNA, 506 bp, Setaria italica
  Peptide Sequence Number=SeqID_99444
tttggtctagttcttcttttagttttttttttttttttggtgtaacatatatatatttataggttaaatgttccaccattagatatatcggttaattgatagtctgcaaaataggctaccatgtctggcatgccctccacatatcacatatgacaaaataagaatgctctaaaaggagatcaagttgctcctcttttgctatatatcagagcatgtctaactatgaagcacatgctaaggctgcattcctacaaaataatttgtttcctccaaaatctaaatggaaacacacagcaggtctagtagagacgcttccggcaatcaggagcaccacagtggcatggcagcttcacaatttctccatcaggcccaacaacactgtccaagcgataaccatagtcataggatagctcctgaaggggaagtatagtgtcagcagcaaaaagtgtgacttttgccagcttaacgtcattgtgcgagctcaagacgcactggacgaaaaggtt

SEQ ID NO: 33471 - DNA, 447 bp, Setaria italica
  misc_feature (400)..(447): n is a, c, g, or t
  Peptide Sequence Number=SeqID_99445
tggggtcttcataacagttacaaaataattgagcagaagtggtataagcgcttgctgtgaaacaacccacggtagcatctttcagtatctgatctgaataaacttcagttgtctttttcgtctgaatcatggattcattcatggttgaaaatgaatccttgtacagctgtggtgcatacctgtgtagcacaagctatggaaatagaagagggccctcgtaacttgagaattatagcgtgcgaattttttgtgccccgtaccccctttccagagcttttgaagctctacatcgtgagttcttttggcaatggacgggtccatgtgtgaaaactgaaattattattcgaataaagcaatgaagatacatgtgcggtgtgaaacaaaaaaaaaaaaaaaaaannnnnnnnnnnnnnnnnnnnnnnnnnnnnnnnnnnnnnnnnnnnnnnn

SEQ ID NO: 33472 - DNA, 284 bp, Setaria italica
  Peptide Sequence Number=SeqID_99446
gagtaactgatattcgcgttacattgattgaacttgatttatgttgaagacaacaaatgccaaaacacataacatttagagaatggaaagtaacatgatcgtgatgacaaacacagctgcaataaggtatcatcaactagttgtttcagcacaagtccaactcattaactcaacagactagcggaatcgggacacacaaaatcagcaatagaggtataaaaatgctgataccggctgcctaactacaacaaggcacaggtgcgagtcaccaacgacaatgttga

SEQ ID NO: 33473 - DNA, 2090 bp, Setaria italica
  misc_feature (2027)..(2090): n is a, c, g, or t
  Peptide Sequence Number=SeqID_99447
acctccacctccaccttgctcaccgacgactccgtgctccgcaccggggaggatttcaacgcctcctcctccggagccgccgccgaggccggcgtcgaagctgaaatcaaggaggccgtgcccttcatcaagctctccgatgtcgcgtccgaggccgagaaggcggagcccgatgccacgaggacggagcccgaggccgagcgggccgtcaccgtcgacactgacgtcggcacgggcgacggtgctgcggcggcgacggcggaggaggagaatcccgtcgcggaggcggtttcctgcgacacggaggcgcccgtggactgcacgggggacagggacctcttcaacctgctcatgcgcacagccatcgagcggttccccgacctccacttctaccgcttcggccgtcccgtggcggtgccggggagccccatggagtgcgacctcgcctggcgcttccgccccgccgccgacgccatcggcaccggccggaccacgtactacaaggactaccgccgcttcgcgctcacccgcgacgtcaacacctgcacactcgtcgtcgacagcgtgggcgaataccactcgggtgtaggtgccaagcgcagtggcaagcgcaagggaaagaaggggaagaagggaaagcgtgaggcaccagtgaccgactttgtgccggccaagacacaggttaggctggacgagaatgctgccaacaatgaggctgccggggctgtggccgagccggtgtttgttgttggtgaggctgtcaatgatagcttgccagtggttgcctctgagtccgaattcagccgcggaaggtacctcatttacatgggtggaggcgagaggtgcaagagcatgaaccacttcatttgggggttcttgtgtgctcttggtgaggcgcagttcttgaaccggacacttgtaatggacctcaatgtctgcctcaatgcacggtatacttcaagtggcaaggatgaagagaaagattttaggctctactttgattttgagcacttgaaggaatcagcatcagtgatcgatcagagtcagttctggcaagattgggggaagtggcagaagaaagataggctgaagaacttctacacagaagacatcaggatgaccccgatgaaactccgtgatgtgaaggacacactgatcatgaggaagtttgggaatgttgagccggataactactggtcacgtgtgtgtgagggtgagactgagggagtgatcaagcgcccatggcatttcctgtggaagtcccgacgcttgatggagatcgtatctgccatttcctcgcggatgaactgggactttgattcagtccatgttgtgagaggggagaaagcacagaacacacaactatggccaaaccttgatagagatacctctccggacagtctgcttatgacacttaatgacaaagttggtgctggccggtatttgtacatcgctaccgatgagcctgacaaatcgttctttgacccacttaaggaaaagtataagacacgcttcctggatgatttcaaggacttgtgggatgagaatagtgagtggtttactgaaactaaggagctgagcaacggtaaaccggtggagtttgatgggtacatgagggttgcagttgacactgaggtgtttctgaggggcaagaggcatctggagacattcaacgaccttacacgcgattgcaaggatggcgtgaatacatgcccagcttcctcctgaacatctggtggactaaggtgagctgatattctgaaatattatgctttacagaatatttccaacattgtcgttggtgactcgcacctgtgccttgttgtagttaggcagccggtatcagcatttttatacctctattgctgattttgtgtgtcccgattccgctagtctgttgagttaatgagttggacttgtgctgaaacaactagttgatgataccttattgcagctgtgttttgtcatcacgatcatgttacttccattactaaaatgttatgtgttttggctatttgttgtcttcnnnnnnnnnnnnnnnnnnnnnnnnnnnnnnnnnnnnnnnnnnnnnnnnnnnnnnnnnnnnnnnn

SEQ ID NO: 33474 - DNA, 259 bp, Setaria italica
  Peptide Sequence Number=SeqID_99448
actatgttctccacgacattagtattcacaggattcatgtcaaacgtctgaaacagcaagcgcagagtgcaggcttctacacaaaaaccccttaaaatttcaagaacaagtatctgatgccataatggtaagtcctgacgggtaacttttacaagcatattaaggaacacctcactttcagtaacaagtgaagagctgtagagcctgatgacatgagaaaccagacgtaggactaaacggcggaaagaaggctcccctg

SEQ ID NO: 33475 - DNA, 162 bp, Setaria italica
  Peptide Sequence Number=SeqID_99449
atgcaaaaggggcggtccagattgctgggaacaagattcatttgcgttcccggcttgtgcagcctgcacaaggcgtcggtggcgagtgattcggctcacctcccatccgcgagtccaccgctccgccgtcgggaagctcgtccatcggcgccaagttgaaga

SEQ ID NO: 33476 - DNA, 573 bp, Setaria italica
  Peptide Sequence Number=SeqID_99450
tgaacttattgagccctattccactgtgctgctgaataatagcattaaccgtctcaatgaactttgccttttctattttgacactatcctcatcagcagacccacttttggtgccatcaaagcatagattagggtgccatgtccagagctttctccagtttctcgacacagtgcttgcccttgcagcatctttcagtgacagcagcgatagtacaagaagctgaatctcctgtgataagaaaggtcgataagaggacttgaatctggatcaaaaccacctgataggcatgatagtcgcagagtactcgagagtcaggacacacaatgattgaagtgcacatattggatttcaatgttctttgtaaataaaaatcaagcacatatgcacgcaaattggacattgaaacagatatgaaagatagtgcagaaacctaaaacacaccagggagacatttatttctaccaaattagctaagctagcatgttgtccaaacgatcttcagattttcagtaagctagcaaatttcagtaagctagcaaatttcagtaagcacgatgaatgcggtagaagag

SEQ ID NO: 33477 - DNA, 908 bp, Setaria italica
  Peptide Sequence Number=SeqID_99451
aaattccagttctgagaactgctatgtgggccctgtcaaatctttgttttggaaaatttccagccgaagtgcaagtgaaaccaatactagaaattgtcagccagcttattcattctgctgatgagaagatactggcagatgcatgctggactgtatactatatatgtggtggggtagatgatgccatccaagacatactagatgttggggtctgccctcaacttgtaaacctattgatgcatggatcagctagtgttcttctccctgtcatcatggcactcgcaagaatttctgccggagatgatgctcaagttcaggtcttaatagaaaatggcattctggattgcttagcccagttgctagcacgaagctacccaaagaacatcaagaaacaagcctgtctaattgtttctaatattgccactggcagcaaggatcagattcaggcagtaattgatgcaagcattattagtcctctcattgtcctcctaaagacatcagaggcggatataaaaaaggaagctgcttgggctttatcgaatgctgcgtcgggtgcttcaagtgaacaaattcagtatttggtgagccggggatgtttagagcccctgtgcagcgtcctcacctaccaagatcctgacctagtacatgcttgtctggaaggtcttgagaatatactccaggcaggtgaggcagggaagaagggcgaggaatctgggacgaacccatacgcacagttcatcctagagtgtgggtggttggataaactggaggatctgcaggaagtcaacaacgacaggatctacgagttggtcatgaagctgctacagagttactgggaggaagaagtaagcgagagcgatgatccgattgtcccaggttcaaatgactcggcagacaccgtggaaacc

SEQ ID NO: 33478 - DNA, 227 bp, Setaria italica
  Peptide Sequence Number=SeqID_99452
cggcgggcggcgaggctgggctccgcggcggcgatggtggacgccggcctgatgtgctgggaagagggccggcggcgggaggccgtggagtactaccggagcgcggcggagctggggcatcccgtcgggatgtgcaacctggggtctcctacctcgaagctgatccacacaaggctgaggaagccatccgatggttttatccatcagcatcagcgggcaatgctcgt

SEQ ID NO: 33479 - DNA, 392 bp, Setaria italica
  misc_feature (44)..(44): n is a, c, g, or t
  Peptide Sequence Number=SeqID_99453
ctgttgatctagagtaccagggaactgctgcttcacaaaactcnggagatttggagattcagattcccaatttcttgactggtcggaggccggcctttctttcctcctcttctttcttttgagaacttaattgaatacatattaaacatactcagtggagaaacacacaagttaatgcccattaagtaaacaacaagatggagtcatgaataaccaagactaacgtagaactaaatatgccgcatcttgatcttgaagaaacaacaattcagtaaagaggttgtcacaccacaacaggagcaaacggatgccggtatgaataagatcttaaactgcagtgcaactagaatgaaaaaaaaatcacaatgcaatatgtatccagtaaataactt

SEQ ID NO: 33480 - DNA, 1324 bp, Setaria italica
  Peptide Sequence Number=SeqID_99454
ttttttttttttgttaaaataagtacgattgcgttgatcaaacaagtctttaagaattgaatacatcgggccgggaatctttatgaaaaataacatgttcaaggtgaactgaaacatgtagagtctgaataaacttacaacaatagctagactagaaataatatgacatcatattacagttccacagttaacctaaagaaacagaagactacgtagccaaaaccagttgccactcaaagaatgttctttcaggtatcacatacaacttcacgaagactgccaccagaccagagcacatgaactggaggtaaatttcaaagaaaatgaccagtttcagacaacacggtgagcgtgccttagtcaatggtgctcatttgtacagtgatatgccacggtggatggcagaacaatacacttgcttattgtacagcagtttgcttcggactattccgtggcttctgagcagacatgaagcaaaatcatgcagaccgccgagttcacaagtaattgctctaattcgacatgttgctacttcagtcgcttgctttgactgcatcagtttttgtttcatcaacatcctcaccagcaacttcctttactggttgctgtacatcagtgtcattgccaacttgttcagaagatacttcagggtcagcaggctcacttccattagcacccggtgtagcttcagagatagaattgtccagatcagatgagactgctggttcacctactgttctctctaccattaatggttcatctgccgttttctctgccgctatctcaactgatggggctgaagattctgccgctatctcaactgatggggctgaagattctgccgctgcggctgtacctacttcggtactgccatttgaaacatctgaatgccgttccagactgtctgtattttgcaacggctcattcgctgtactacaatttagctgttcgacacattctgctacatcctttgcctcctctgtactcccatttccaaggcaaacggtttccatttcatcctcagtgccaatgactttaccatcatcagcttcctcggtctctagggatatctcctcagaattgggtgacgatgagggaacagaatcggatatacggtcattgatgcctctctctccatcaaatgtgaaccagtttgaatttgtaaagagggagctgccgtcctggtcatctcccagacgcagagaagatattaccacctcagctgattcatcgtcaaaatacacatcctcatcatcgcgttcaagtgatccttgtgcctcttcaatgtcatcgttgctgtatatcccataacggaatgcttgac

SEQ ID NO: 33481 - DNA, 1662 bp, Setaria italica
  Peptide Sequence Number=SeqID_99455
tcgttttgaggaccctagtcgaggatgaagagctaatggacttgcttttctcatttgtgaaacctgatcatccacatagcacactattatctggttatttcagtaaggttgtaatatgcttgatgctgcggaagactgccccacttatgaattatgttcaggggcatccagagatagttgtccagcttgttgacctgattggcatcacatcaataatggaggtgctgatacgactgattggtgctgatgagaacatatactcaaactacggtgatacattgcagtggttagaaaatacagatgtccttgaaatgattgctgataagtttagctcatcggattctcctgaagtgcatgccaatgctgcagaaattctatgtgcagtgacacgatgtgcacctccatctcttgctgcaaagatatgcagtccaagttttgttggaaggttgttccatcatgctcttgaagaatcaagaccgaaatctgttctggttcattcgttgtctgtgtgcatatcattgctggatccaaaaagacttgcatcagcttcctatcaagcattcagaagcaacttaagtcatggggcattggtcactgccagtccagagacagttgatggcatgcttgagagcctaggcaacttgctgatgttattggacacttctgctgctgaaaatgtattgccaacaacttatggatgtttacgcccacctcttggcaaacatcgtctgaagattgtagagttcatctctgtgctgcttacaattggtagtgaaactgctgaaaaggagctaataaggcaatcagcaataaagcgctcaattgatttgttctttgagtacccatataataactttttgcaccaccatgttgaaaatataattgtttcttgcctggagggtaaaagaactgaacttgttgagcatgttcttaacgagtgtgacattgttggtaaaattcttgttgcggaaagactttcttctttgtcgacagagtctaacgggcctaccataccctcggaagagaaagcccctccaagaattgggaatgttggtcacatgacaaggatagccaataagcttattcagttgggaaatagtaacagcacaatccaggcacatttacaggaaaataccgagtgggttgaatggcaaacaaatgtgctggtcaaacgcaatgaagtggagaatgtttatcactgggcttgtgggcgcccaacatcattacatgatcgtggtagggatagtgatgatgacgacttccgagacagggattatgatgtggcagctcttgctaataacttgagtcaagcattccgttatgggatatacagcaacgatgacattgaagaggcacaaggatcacttgaacgcgatgatgaggatgtgtattttgacgatgaatcagctgaggtggtaatatcttctctgcgtctgggagatgaccaggacggcagctccctctttacaaattcaaactggttcacatttgatggagagagaggcatcaatgaccgtatatccgattctgttccctcatcgtcacccaattctgaggagatatccctagagaccgaggaagctgatgatggtaaagtcattggcactgaggatgaaatggaaaccgtttgccttggaaatgggagtacagaggaggcaaagg

SEQ ID NO: 33482 - DNA, 258 bp, Setaria italica
  Peptide Sequence Number=SeqID_99456
ttaatctatgtttaatacttctaattagtatccaaacattcgatgtgatagaaattttagtaaggactaaagaaccaaacaccccttgcatcttactccgaagattccattgtttggcctcgtgatatctgtctggattgctcactttcatctcaatgtaatttgttccatcgccctttggtggcagtggaatttgaattcagatcatgacactatctgtgcccaatcgtaagctgaactaactaatttgttgcctac

SEQ ID NO: 33483 - DNA, 308 bp, Setaria italica
  Peptide Sequence Number=SeqID_99457
ctgaaaagggactaaagccctcgaacccttttatcccggttggtgtttccaatcgggataaaagagtcccgtggaaaaggactaaagccctcgatctttaatcacggttggtgtttctcgtgaaaaacttttgtctgactgcattcattctagtgtgtcatacattatttacaatcagatgtaatatttttactcttcaccacatgctcaaggaaaaatgtttgaaattttcattgaaaggattagactaatcagtggacaatacaatacactggtgttttgaggaacttttaaagcaagtggaataa

SEQ ID NO: 33484 - DNA, 343 bp, Setaria italica
  Peptide Sequence Number=SeqID_99458
ggggtccgtgacgcggggtagtaggggctcctgtacgggtggatggtgagggagaagcggtcgaggcggcgccgcccgcggcactcgagcgaccggagcagctcctccgggtcgtcgccggggcggaggtggaggtctagggaggacggcgcgggccagcggcgcgcccagagcgcgcgccaccgcgtggagagcgcccccgtgcggatggccggcttgagaggagcagggccaggatccgcagccgcagatcctccggcagcgccgatatgcggtcttcctcctcctgagccgccgccgccgccgccacttcgaatccttccccttcctcacccggccgccg

SEQ ID NO: 33485 - DNA, 249 bp, Setaria italica
  misc_feature (199)..(249): n is a, c, g, or t
  Peptide Sequence Number=SeqID_99459
gtgaagactatggagttgcaaatctgcaggagtagagctaacttttctgatttcagatgtaaatggcaaaggaattgttttgcttgtttactttgaccccctgttttcacctaacaatcggaacacttgactgatgtcaggagttcacggcagttaaaggaacattacattctgttttggtaaccaaaaaaaaaaaaannnnnnnnnnnnnnnnnnnnnnnnnnnnnnnnnnnnnnnnnnnnnnnnnnn

SEQ ID NO: 33486 - DNA, 541 bp, Setaria italica
  Peptide Sequence Number=SeqID_99460
taacctcatgccccatcgcatcatcacccctagctcttaaaatacctccatacaaaaagaaaaaagagaggaagaaacaagaactctaaatacactccatccttgcaccaagatcataagttaggaacagcatggaccccgagaatcacataattcttcattggaaacagggaagtgcttggctctctgacgccatctggtaggagtcttgcgaatgaataactgaagctgcatggaccagcttatacctcagcctctgctaagtagctgagtctgcaggatctggttgtcttccagcaaccggtcgtactcaaggagcagctcctccgactgcttctgcagcgcgttcacatgggcctccgctgccgatgccttcctctcgtgttcttcgttctcgaatttcagcttcttcatgctctcgttcagctttgcaatctcccgctggagcttcttcatttcaccggaggagttgccctccttttcacggagggattggttctccatctgaagtttctcgacctcctcccttgatgtgctggac

SEQ ID NO: 33487 - DNA, 612 bp, Setaria italica
  Peptide Sequence Number=SeqID_99461
gacccagagttgtgtactggcatgcttaaaaacccagatagtggtaagggagataatatacagctggatggatggatattggtcgatactccatttcgagctatgtgcgctgctactccagcagcaggggttaggttataggcaagataccgcctgtccagagccatgtttcgtgtttgacctgatccaagggaaagggaaacaaaccacttgtcaatataactgcagccactttcgatcacatgcacatctatagcttgcattttgatagctgcacttgtactggaaaatattctggatatttggaacttcctccatttcttttccgaaaatggattcctcaaagaagcaactgatggatcaacaagcacagaatagttcagggttggctgagaggctccatcctcccatgttgacaaagatacctgaatgattgacctcaggaacagaagagtactggatggattctgtgtaaatcgatcaaaaatctgttttactctattggaacctgcttcgagttctttcaggcattttgaagataaaggcattcgaatgactgtggagtttgcagtagataatgaagcatcctgtgtaacacgcattgggaggaac

SEQ ID NO: 33488 - DNA, 853 bp, Setaria italica
  Peptide Sequence Number=SeqID_99462
taagaaattcatggtgtttagtgaggagattgttaagtactcacccctttctggctaactctctgctggacttatacactaaaggaggaatgctggatactgcctcaaagatcttcaataggattacacagaaggatgttgcttcatggaacactatgatcttgggatatgggatgctcggtcaacttgatgttgcatttgaattgtttgatttgatgaaggatgatggcatcgactatgatcatgtctcttacattgcagtgttgtcagcatgcagccatggtgggcttgttgagagaggaaagaagtacttcagtcaaatgcttgctcaaaatatgaagccacagcaaatgcactatgcttgcatggtagatcttctggggcgagctggtcaactgtctgaatctgctgaaataaattaaaacatgcctttccgtgctaattctgatgtttggggagcaatgcttgggtcttgccgtatacatggaaacattgaattagcacgatgggcagcagagcacttgtttgagttgaaaccagagcactcaggctactatactctgctgatgaacatgtatgctgaagtagggatgtggagtgaagcaaatgagattaagacattaatgaaatcaaggaaggtacagaaaaatccagcctatagctgggtacagaatgacaataagctacaagcttttcttgttggaaatacctatgagtagtgcgtctcaccggcatccatgtggtctgtgtgctaaatcgagtcaagcatcctctttgcaaacatgtgcagggttgtactattgttaacataaccatccttcagcaccctgttctggctttccaatctttgtgt

SEQ ID NO: 33489 - DNA, 461 bp, Setaria italica
  Peptide Sequence Number=SeqID_99463
cagaaggagctgatctgatggtttgatagctagctgcagcactgctgcactagctatcaaaaccatcagatcagctccttctgtgcattccttcaagtttaaagcaatgaaccaagatgacacaccgccagcaagagctatgatgacccaccgaagaaattccacaggaatgagcaaaagtacctgaaacaaacaaaataggagggcaatttatattaaacataatggccccccttcattcagaagaataaaagtgagttttgatgctcagaaccattaaaacaacatggattctttttacactaagataatcttgtaagcacaaattatatataattgtagcaaaagagaactaaattcctacgtatgtacaaaatggtaaaaattgcatattcttgccagtgatataagaaatcaaatatggatggaatcagaatacttacagatgcaggtatgaaaac

SEQ ID NO: 33490 - DNA, 239 bp, Setaria italica
  Peptide Sequence Number=SeqID_99464
cggggagtcggaggcggaggagcgggacggcgaggaggaggaggaggaggaggcggacagcggggagaaggagagattcgcggtggggatcgcgcgttgcggcgcgatgcgcggggaggagtcgaggtggaggaacttggcggcgcccaacgccgtggaggccatggcgcgatctggtgggcgaggagaggggggatcgcgcgcgtcctctgtcgcgcgtgcgagacggcggcggtgcg

SEQ ID NO: 33491 - DNA, 2365 bp, Setaria italica
  Peptide Sequence Number=SeqID_99465
cactccaccaaaccctcggcgtcggggggaagcagagcagagcacagcggagcaggagttggcgagcggaagcaatggccaatgagtggcggtggtggtggtagcgccctcctcgccttttctccccgccctctcgccctctggttggtgcagcgggtgggagtggggggaactcgcgctgcccccgtcgcttcacgggcacgcctccctcgctcggatctgggccgcgcgcgcgagatcctgagcttcgggcgatggagcccgcggcggctgctgcgggagaagggcagcggttcaagcggattccgcggcaggcgtggtcggggaacctggagctggatccactgctcaatgaaaacttagatcagtggccacatctaaatgagctggtacagtgctacaaggctgattttgtgaaggatgatggcaaatatggacgatacgagagtgttgcaccaccttctttccagaatcaaattttcgagggacctgatactgacatagaaacagagttgcagctttgcaacgttaggcattccaagcctgaggatgctactgaagacgatacaccaagcacctcagggaggcaaatatatgaaaccgaaccatctgcttcatcttcaaaagtgcactgtagtctgtcaccgctgccagcatatgagcctgcgtatgattgggagaatgagaggtctttgatatttggccaaagggtgccagaaagtctccctgcaattaccaacagtggcttgaagataactgtcaaggtactatctttgtcattccaagctggattaattgagcctttcagtggaacgatttgcttgtacaatagagatagaagagaaaaactgtcggaagacttctactttcacatacttccaacagatatgcaggatgctcaaatttccttggatcgtcgaggcgttttctcattggatgccccttcaccatcagtctgcctcttgattcaattagaaaaagctgctactgaagaagggggagtaacaccttctgtttattctcgtaaagagcctgtgcacttaactgagaaagagaagcaaaagctgcaagtctggtctcgaatcatgccttataaagagtcatttgcatgggctatgattcctctgtttgaaggcaaccatgctggtggtcttggtgatgctgcttctcctagcagtcctttagcaccgagtatatcaggatccagttctcaagatagtattgtggaccctatttcaaagcttactttagacggaaaactcaaccattactcaagtggaagctcagttattgtagagatatcaaacttaaacaaagtgaaggaaagctatatagaggactccctccaggatccaaaacgcaaagtacataaaccggtgaaaggtgtactgagattagaagtggaaaaacttcatgatggccaccatgatgcggataatgtttctgaaggtggaagcatggccaatgatttgaatgatgctggtgacctcagtaatggcagatgcaacaggagtagctttgatgggatccgcagttctgtgaattctagtggcgttgcccagaaagatgctcatcacaacggtaaaatttctagttgtgagaacagtgacagttttcaagcttttgacttccggatgatgacccgaagcgaaccattttcacaactttttcattgtctctatgtgtacccgttgactgttagcttgagccgcaaaagaaacctatttgtaagagtggaactgagaaaggatgattctgacatccgtaagcctccattggaggctgttcatcctagggagcggaacacaatgctacagaagtggggccatacgcagattgctgttggaacaagaatggctttgtaccatgatgaacttaaaatcagtctgcctgctcttttgacaccccaacatcatcttgtgttcacatttttccatgtagatctccaaatgaaacttgaagcaccgaaaccagtgattgttggatattctgtacttccactttcgacacatattcagttactttcggatgtatccttgccaattttgagagagcttgtcccacattacctgcaagaaagtggaaaggagagaatggactacctggaggacggaaaaactgttttcaggctgcgtttaaggctctgctcgtcactgtttccagttaatgaaaggataagggacttttttgtcgagtatgaccgccataccctacatacaagtcccccttggggttctgagcttcttgaggccataaatagtttgaagaacgtcgaatctactgcattgttacaatttctgcaaccgatactcaataagctgcttcatcttattggtgatggcggtgagacccttcaggtttgctg

SEQ ID NO: 33492 - DNA, 440 bp, Setaria italica
  Peptide Sequence Number=SeqID_99466
tggaaatatgcatgaaaatgcactgcttcctcatagtttaagcttttgtcacagtgtaacaaactcagcaaattctcaaagaagacgatgactatcaacaaatcctatctgacccattccatcatccttatacgaaagatgtgagcctggcatctaaatgactagtctgaatagtgagtatactgcacacatggtgaactttagtgcccagatgaccagtcctgccaagcaaaccagtatcaccaaaccatattaagtacatcacaggttctgtctcagattcaatcaagctaaaacaggaaagggaaagctgaactataaagggaaacagacagtggacactgaaattggtactaaaaggtgttgcagtatatttgtctattcagaaactaatcgaatattgcttcagcgaacttaaccgagattagcacttcacactg

SEQ ID NO: 33493 - DNA, 413 bp, Setaria italica
  Peptide Sequence Number=SeqID_99467
ttccgactcagtctatactatcttccacattacaacctttagctccttctggccaacagcctagccaacaactgtctacacaggaagacggtgatggagatcctcaaaagcgccttcaagcaacattgcagttggcagcaaccctgcttaagcagattcaaaatcaatcaaatcctggtgcccagaaatagatgcaaggtaacacataatgtatttcaactcttgcttttagtttgcacacagaatttgtattgattcatatttgaacaatgtatttgagcaatgttattgctgcaggatctattacttcagttactgaaagttttgctctattctttatttctggggtcttgtcggtatgaatatatcttacctgcctgctaagaaaaagaatccttggaacctgttattca

SEQ ID NO: 33494 - DNA, 274 bp, Setaria italica
  Peptide Sequence Number=SeqID_99468
atgtaggaacaagcacaagctgcaaagatacaggagcaggaaaacctacttagagcagcagtaaattacggtgaaggtgaaagacataatgtgtttatcagtgttgataaaaaattacaattaggtttccaaaataaatattctttttactttgattcgtgttacaactaccgtacttagcctgctgatattatttgattgtcaggattacgggtacctggagaccagaggcagccacaatctcttcctagccatttagttgaagtacttttcg

SEQ ID NO: 33495 - DNA, 1990 bp, Setaria italica
  Peptide Sequence Number=SeqID_99469
ggacgcgcctcccccttccactccgccgcacaccaccgctcctcccaagcaagtgctccggcgatggacgcggcggcggcggcgctaggggcagcatccggccctggcgctccgcccccgggcgcggccgcaggggagcagcaggcagctccccgggtggagcggctcagcgcgggggtccagcagcagctgaacctggaggggatgcgcgcgcgcgcggtggggctctacaaggccatctcccgcatcctcgaggacttcgacgtcatcgcccgcacaaatcccgccgcgtcccccaagtggcaggacgtgctcggtcagttctcgatggtgagcatggagctcttcaacatcgtggaggacattaagaatgtgtccaaggtgtttgtcgtgtatccccggaatgtcaatgccgagaatgctccaatactacctgtaatgctgtcgtcaaaactgttgcctgagatggaagttgaggaagctacaaaaagagaacaattattgtctggaataacaaatctaccggttcctacccagattgaaaagataaaggttagaatagacatgatcgggagtgcatgtgaaactgctgagaaagtgattgctgactgccgtaagagctatgggctaggaacccgtcagggtacaaatcttgttcctacattggacaaagcacaagctgcaaagatacaggagcaggaaaacctacttagagcagcagtaaattacggtgaaggattacgggtacctggagaccagaggcagccacaatctcttcctagccatttagttgaagtactttcttttggggatgggcaacaaagttttggtgataattctggtggctatcccaaaaattcctcaacattcacacctagtggtgtcaacacccaaggaaatccggttcaggcatctggaggacagttacttggaagacctgcgccatcacctggaggcacaggaacccctaattttgagaatgtgtctactcctccaatgccatatgcgaactctcctaggtcaggcaccaatatgatgaataccccttcaccccagcagcatctaacaccacagcaacagaggcagaagctgatacaagcatctcaacagcagcaactgcacgctcaacagcagttgaggccatcagctgctgggatgctagcacagagcacacttcctcagctacaagatttacagggacaggctcaacaaaaactacaggtccctggtcaacagcaaatgcagtacaaccaagccttgtcacaacagtttcataacaggcagatgcagcctggacgtatgcaaccaggcatggctcagagtcaattgaaccaaggaactcagctacgaagtcacttgggccagtttgctggacctgcaaatagcgcaatgttcactgctgcacaagcatcatcaaactcacaaatgatggcaaatatgcctggaacaatgcaatcacagtcgcttatgccacaaatgcagtacggtatggctggtgggcatccacaaaggagtcatccatcccagatgctgaccgaccaaatgtttggtatgggagccacaaatagcaacatgatgggaatgcagcagcagcagcagcagcagcagcagcaaggggtgtacgggaatatgcaggcaggtgctcagaacatgcaacagggcatggtgggcctccagaaccaggggcagaatcccaacttccctcagcagagacaacagaaccagcaatagtcaaacagctaacgtcaatttgtagaacatgtgaacaaatgtttttcatcacaagatagagcaagagctaccattgtatcaccaaggcgttgatagtttgcttatccgtgttagttgccaatgttgctggacaagtggatagccatgttcttgttgtaaatcgatatagatgtataaacatttgtggataaccaccttgtgtgtgtttcagatatctgtctgccacgggtaagcaaactatcaccaaggcgttgatagt

SEQ ID NO: 33496 - DNA, 373 bp, Setaria italica
  Peptide Sequence Number=SeqID_99470
gaagtcgtgcgtggagaggggtcctccgggcacccattccgggaagatgctcaggccgttgtgctggtggagccccacggtgacgtgcgggaagcaccggacgtgctcgtcgccgtcgaggtcgacggcgtcgtacttggacagaccccgcaggatggtcctgtaggcttccggccaccatggctgcatgttggtgatcaggaactggacctcgccgccgtaccgccgcgacgcgacgaacagcggcaccagcacgtcgctgaagtcgtgccagaagttgcctgtgagcccgccgagcgcgaagatgacggccggcacgccgtaggtcaccgtgcacgccggggcggcggccgggccctgaagctgcgcaacg

SEQ ID NO: 33497 - DNA, 374 bp, Setaria italica
  Peptide Sequence Number=SeqID_99471
acttttgtgccctcattggagcagaaattctaccaaagtagtcgacggatccagtttatacaagctccagctgactaataaaatttctacaactgcattcaagccagcattgcactgagtttttcagaacagcatcagtctatacaggccttggaaattttgttcaagcacttctcctttttcgcaactctaacttggagaattagatggacatttttcttgaatatggacctcaattcttcgttggcctcaataccaattctcccaatctttgaaccgtttttcccaacaagaatctgacgttggctttgctttggtgtaatgaagtgctgctccaccctaagagaaccatctttgagctccttccagtccat

SEQ ID NO: 33498 - DNA, 327 bp, Setaria italica
  misc_feature (5)..(5): n is a, c, g, or t
  Peptide Sequence Number=SeqID_99472
ccgtntcccccgccgccgtcgtcgtcgcggacgccagcgacgacagcacggagaggtaccacccctccgtgctccacaaacggcgccggcatcttctccacgtccatctggacgatgtacgacctccgttcgccgccggccaccgccgccgctgcaagcagcaagaggctgatcgccccggacagcacggcccggaacatcatcgcgtcagacgccgcagcgcagacagactgcgagcgagtggatggatgaactgagctgagctgagctgactcacttgagctcagaactgccgcttcttatgcatgagcggcggagtggcgagag

SEQ ID NO: 33499 - DNA, 432 bp, Setaria italica
  Peptide Sequence Number=SeqID_99473
gagttcgatcagtcgagagaacggccatatcgccagctattgtgcgatctccgggtgaactgctgcggcgcgaagctgagtccaaacatctccctcagggccttccccggctccaggagcccgatcagtctggcgacgagggacgcactctccctcacatgctccaggtccttggtctcggtccagaggcgccgagccacctgcagtcgtctcctcttggaggacagcgagattccccacttggtgtacatgctctcccgttcctggatcgtcagccgcttctgcatctgacggcagagcatctccctctcccgttgcagcttctttgcactgcacaagtgcataggaggtcattgagttcgagtgacgcgacgaagcaaagttgtgcgaagcatggtgaagatgagttaccctgaacacttccctggtttc

SEQ ID NO: 33500 - DNA, 2922 bp, Setaria italica
  Peptide Sequence Number=SeqID_99474
cggaaaaagggaacatttttgtcagctgcagttttttgagttcgatcagtcgagagaacggccatatcgccagctattgtgcgatctccgggtgaactgctgcggcgcgaagctgagtccaaacatctccctcagggccttccccggctccaggagcccgatcagtctggcgacgagggacgcactctccctcacatgctccaggtccttggtctcggtccagaggcgccgagccacctgcagtcgtctcctcttggaggacagcgagattccccacttggtgtacatgctctcccgttcctggatcgtcagccgcttctgcatctgacggcagagcatctccctctcccgttgcagcttctttgcacttgaaaccagggaagtgttcaggctgcctgccaccacatttcgtcccatgcttccattggagtaggtatctttgaggaatgatagcctcctaagctctacttccatgtagatggcgtcggctgggtcccctttaaacagcaagaagaagtaagtcctgtggaccaaggaaacgttgcatccatgccacaggtcaatgatctcttgctgtttcttctcgaattccaatggccaacgcgaaggtgattgcaaggcatccatgatcggatccagtcccacgctccttatcgtcccttctgctaattctccattctcagcctgatcaccacgttgcttttgatactgaacctgggccatttcttttagctccgcaacaaattcacctatgccagcaaattccgtgtcaccagcaacagagccgtttggcttgagtccatccctcgcagtggtaatttcagaaagcattgaccctgcccttgataaagtttcactttctgcatcatagttcagtgcagatacccttctttgacacccttcaggtctccctgggtggtccatgaaacttctgcttggaggggtgcaatcttccttctccaagtcttcgaaaagagtagaacccatcaaagacctacagctcctgcttctgccaattactcttgagcttgacgagttacgtgtagaggatcccagatccatgacaagattggcaaatggttttttgacattctccagatgttgttcaagggtaataggagatacatcattctgtctagaatacacagatggatttggatcattgttcccatgcatactagaacccacattcgaatcttgcagactattgcttcccacagccaatgactctaaacattcattttcttctgtttcatttgtctctatacaccttacttctttgcaaagatcctctgaatcttcattagatatttgagagttatcatctctgccattagttgggggcatcccactgaatggaggactgcacactgaatagctaagagaggtagcaaactgtgcattattttcagattgctgtggcctataatctctttgtgctatatggcgtccttgaaatctaaaattttggccactgctgacaacttctgatgttgttgattgctcatcctcacatggctgaggaacatcaaaagtaaagtttcttccagaagccacggggtgcttcgaaccatggttatctccaacaacctggagcaaatcttgcagtctagattgagcgagatcacgttgtgacttcaattccttaatttctttctccatcttccggatttggctatctttttccttcaccaatgcttcaagaccggaatatgaagctgggcatcgcaattcactctccaacctcgcaagttctttttgcaattgcttaactagcgctttatcagacataaccacgttgacctgggcatttgtgaccacttcctttgcacagcttgcaaacaacagagtatttcttgactgctccatatggcttcgggctgggctcattgtacaaataattgctgttcttgcattgcctcccagagaaggctgtaatatgcgtgtgagctttgaatctcggtatggtatatgcccatttcttaccttgcttagtttccgtatgacagttccaagggtaagtagacttctattaatatggcaaccttccttcagcctagtaccagctgataatgcctgagatgcacgttcacttccagccaaatcaacaaagttcacactagcgacaagtgtagttgacttgtccttacccaagaactcacgagcagaactttcaatagtcagcttaagtatttgatgtgatctggagctgttttcgtttaagtacgtctctccagttctcctttgagcttcacacacagaaataagttctttaaggtggtccgagtccctcaagacaacctcagtaaggttttctacatatgttcccttctccgcatcatcccaaagcctaagagatgtgctttctgcactaagaagatcccttacaacttcattatatatttcaattgctgaaaatttcaatacaaatgctctctcctcatgcttggcaatgtaatcatagatatctgctgctgtatattccgttattccattcatggtgtatgtctttccactactcgtttgaccatatgcaaaaacacttgagttaatgccactaactacagagagggcaactgccttggccccttcattgtatacctctttggtattgcagtcagtacggaataccctgtcaaatgaatatgcagtcggagcagtaggccggtctgggaatgtgctccgggagatgatggtagtgtcgttgatgcactcccactcggccgggtccccccttgcaatctccttgtcgctgagcggcctcagcctcaccgagaccagtatcttctccagcctccccgcaccgcctccgccgcctccattggccacctcggccccatcaaccttgtcccactgcaccggcgcgtcgcctaccaaatacgaccccccaatactactaactaactaaccttaacgtaacaa

SEQ ID NO: 33501 - DNA, 432 bp, Setaria italica
  Peptide Sequence Number=SeqID_99475
aatgaatgtcataaacaactaatgatgttcattacaattagatagcttaatatacatccagttgcgacagtaaattgatacaatagatatacaatcaaatgaatacaggaacaaccatgatacagcagtaacaacatagattcaatagtaccaaatttcggccacaagcaggtcactagctttgaagtaataagcttgtgtcggtgagtgtacaggcaatcgtgcagcagctaacttatgtcttatgtcacaggcagttcttctaagaaagcacaagcatctactgatggagtagttgcagaggatagaagacaatactcgtataattccaaaaggatcatgaacagacatgctatgctagtcccaggttctattgtgcaaccaatagatatgcccacaaaggtccatatgttttatagacttacgccatgg

SEQ ID NO: 33502 - DNA, 828 bp, Setaria italica
  Peptide Sequence Number=SeqID_99476
tggatggatatggtcatggtctttgcgagaagagcatgtcacggcgacagcttgaaaccgtgtggtgacaattatcctgcttccctctccattttcaggaaaacatttcttaatattttgccatgtagatgatgaccagacatcatcaattaaaagtaggtaccttgtgcctcgaaggtaattctccaactccgattttatctggttgtgcttgtcctgcccagcgttgccatcctcctctttatttggagacggctgtctaaatcggctcaatatgcctccgataactggaatcctcttctccgaaatgtccctgctgctgtctttgccttgctgctccccattgttcgcctgcggcttgacttgattcagtatgtccctgaggactacttcaggatccgcgttctgagacacggtgaccattgcacggcactggaactgaggcccgtgtttccggtagagcgccattgcaacggttgtcttccccacgccgccaaatccgacaatggacagcacgccgcgctgcttcctgctctcatcggaggagatccacttctccagatccgccaaatccttcactcccacgggcttcatgatgccgatgagctgacgggtcgtctcctgatgctcagcagctaagtaccccgtcgcaccacccaagttgctcttcttcttgccaggcttcggatctgggaccccatacctgctgcggcggtcacccacatgctgcgcgcgctcctttagctcggcgatcctggcggcgatgtcgcggcggagcttccatgtccggatctcgtacagggtccggcggatggccgcctgccacgg

SEQ ID NO: 33503 - DNA, 139 bp, Setaria italica
  Peptide Sequence Number=SeqID_99477
atcaggcagcattccaacagtcttaaccaacatattacaccagcatcataatgatcataaggcacagaggcagcatcttatccccgaaaggtcatttggtggaggatttttctaccagcctgactccatgcagctattt

SEQ ID NO: 33504 - DNA, 523 bp, Setaria italica
  Peptide Sequence Number=SeqID_99478
acggacatgacaagacagatcatttaactcatgattgaatgaataatagaaagcatctttgtcaggtttgtccctgtcaacacgccttgtccatcgtttggtgtctttaagaagtttcagcacaaattgaacgacacgaggagagtaagctaaaggaggcaccaagcaagtaccagatctttcatatctccatatattaggactgaagatttccagcatggatgaaagcacgcatacttgaactgtacaacagatatcactgttgcaaacgataatttgcattagctgtagaaattcttcaagtatctgcagcaagatagtgccaacaccatctacacagaagactctgtcatgatttgagaacttgaacttcagtctgaacaaggctggaagactatcagcacatcttgctactgatgataacatcatggcatcagaagcatcagggggaaactccatagtgagaccacagactaacttcaaaattctttgggtaaaagacaaacctcaagttaatgtttac

SEQ ID NO: 33505 - DNA, 507 bp, Setaria italica
  Peptide Sequence Number=SeqID_99479
tgaagaggacccgaaagtgatggaagcatatgaactgattggttccctggtataaccgctgaattttctacaatgtgttccatatactgaatatatggtttttgatatatagaagaatggtgttcctgcatgtcctagatatcttattgagcgataagggtacccacgggtccccaccgaccaggatacctgtcggtcctaacaggtgggcctgcccgaccatgctgtgcgggacaaggcatgaagacgcgtggagcacaagctcggaagccgggcgaacaaattctgcccgaatatcgcgggatacttgttgtagtccgactcagattgctttccatgtaacaatcgactaggattagatcctatctgattgtaatcctaggccgtcataggcggccagggatcgcccccccccccccccgagggtacctcaactcaactcaatctcaactcttcgcaccgcaatcagcaatacaatccacagaatgtagagtattactctctgga

SEQ ID NO: 33506 - DNA, 1252 bp, Setaria italica
  misc_feature (1)..(69): n is a, c, g, or t
  Peptide Sequence Number=SeqID_99480
nnnnnnnnnnnnnnnnnnnnnnnnnnnnnnnnnnnnnnnnnnnnnnnnnnnnnnnnnnnnnnnnnnnnngttacatcataaatgttattatattatcgtataaatttggtcaaacttgagacactttgactctccaaaattcttgaaataacttacaatttaggatggatgagtacataagatggatacgattacaaatctgcatgctacatacaacatcatacgaccccagtgccgccctgcagtactacagtgctgaaatgcgcgcgcttcagccggcgatcccttccctgtgtgtgttgcaggacgacacatactgtatatcttgcacgtacagatcaaacgcaaaccccacgcacatttgcacacatcaatttcgttcacccaccactaacccacgcgcgccacacgataacgtatatcacgaggcgaaaacgacggccgctgattcggcaagctcactcacagtcacagcgcggacctgatgacggggaacgacgacgcgtcctcctgcggctgctccgcgggcgggctcagcagcttgccgagctcccgcacgaacgtctccatggcggggccgggcaggcacatgggcacgacgatgccgtcctcgcccttggcgttcttgaacgggatgaggaagctcgccactccggggatggcgccgactcctcccttcgcgggtccgccgtacaccggcttcccccacccgaagtccaggtcgccgaacccggccttggtcacgtccgacgccaggtacgcgcgcaccaccgtgaagtgcggcctcccgcgcagcaccatcaggtccgccaccgaccgcatgtactcggcgcccacctcccccttggcccgcttcacgagctccacggcgtgccccagcggccgcgcggcgaggtcccccgccgtcgccacggccaccgggaacgcgaacgcgttgccgtagtagccctccgggatggcggcgccgccgccggacttgccgccgcgggcgttcacgatgcagatcatccgcatctcctcgtcggcgtccggggccagcgccacggtgcggcacctccacaggaggcccgtgagaaggtcgaacgtggaggcacgcgaccggaggtgcggcggcaggtgcgcgcgcacggcggcgacctcccgccggccgaagaagaaggagcggtgcaccatgtcgtcgagagggatgatggtgcccttggtgtaccggacaaccaacgtacgtaactacgacggtagacgaacgaaacga

SEQ ID NO: 33507 - DNA, 316 bp, Setaria italica
  Peptide Sequence Number=SeqID_99481
gggtgatgcatgtccattccgctgtgggcatggacggatggatggatctcagcactttacaggcacaaacaaaacgctctgagatccactttattgtacatatatagaatatggatggcatgaacatgcatgaaaatgaaattggaaagctcagaatctcaggtcatctggacctttcaagtcatttccctggttattcgtttatttcgtatacgaacccaagctaaaccaactactcatacatataaagccttcatcagagtacgtccataatgatttagctaggttccggaacagaacttgttgaggcagtcca

SEQ ID NO: 33508 - DNA, 241 bp, Setaria italica
  Peptide Sequence Number=SeqID_99482
cagcgagcagcaagcactgaacccacaaaggcacataactgtttgtagccatgacagaaacaaccattatggctgctcctgctcctcaacctcatgtcatggtgcttcccttccctgcacaaggtcatgtcattccactaatggagttgtcccacaggctagtcgactatggattcaagatttactttgtaaacactgagttcaaccacgattgtatccttaagtccatgcaaaacaaggg

SEQ ID NO: 33509 - DNA, 245 bp, Setaria italica
  Peptide Sequence Number=SeqID_99483
cgccccaattctccgcacttcacatacattgccagcacagagttaccgactggcacatcccttactctccccatgaaccctttccgaatagccagggaatgcatcgccatcccgagctccaagtcctcggtgtacgcacatgcttgtaaaatccgggtaatcaagaatctgtccggaatgaccccttccctgaccatagtcactgcgagcgcaatgacctcgctgtacatacccctgatggcgta

SEQ ID NO: 33510 - DNA, 625 bp, Setaria italica
  Peptide Sequence Number=SeqID_99484
ccctcctcgctgccggggcgtggaccaggcgtcgccggggttccaccacgacagcgcccggagccacttccaggagctctccccctccgcgctccccgtcgccgccgtccccctcctcctccgccgcgtacccgttcagcggcgagctggtggcggcgatgcaggagatgatccgggccgaggtccgcaggtacatgtccggcacggggctccgcgccgggtgcggcgccggggccgtgggcgaggcgtgcatcgtggagggcgtgatgcgcgccgccgcggagcgcgtcggcgccaccgtcgtcgtcacccggccgtagggaaaccgaatcagatcgaatcaatgcgaagcattgtgttaatcaagatccgatccctgtgtagcagtactactagtagttgttctcgtggccgttgtatgtaggaggagctctgctcgctgtttattcttcggcatccggccgctctgaattcacaaggaaggaaacagagcggcggcggaagccggaaaggtggaaatggaagaggaggtcggcagtaatcgagcctgccgtttctttacttgaatgtggtcacggtttgttcgaaaaaggaggtgctgtgagtgagatgcgcccaaaacctg

SEQ ID NO: 33511 - DNA, 908 bp, Setaria italica
  Peptide Sequence Number=SeqID_99485
ttaaaaggaaaataaggtaagttagatctttgcatgacggcataatagggaataaagagcaaatgtaccaccttgaccgttgtcatttgccctcaagacaacaaaaacatacttcagaagaggaatgagagtgagggtgtaaataatcaaggaaagagctccaataacatcctcatcgtcatctactccacgaggaaagatattatagaacacatataaaggcgatgtgcccaggtcaccaaagaccaccccaaggctctgaaatgccagccgtattaacaaaactgatgagaacttcttctctctgtacatattcttcagcctgcctgcctcctcatccatgggttgatcaaggttttgatctagttcccacatgctccccctatttgtcacctcactttctgacagcgacgccatcgacctcttttcccctcagcgacagttcctcgaacgaaaatttttgtcctacgaacaccgtattgagactcctatctcacactcgatattcagactcggatctcgtcaccagcatcagtgcattcaattctttcatcaaagaaagattggagcaagcaccaagccttccaaccaaatctccccaccaagcagctctctgcttcctgaagaactgtttccaccactttggtgtttgcaagaaacgaaaatgttccgtcccacagcgaagcggcgagaaatcacagcaaactcacagcacagaccgaaatcactatgcagaaataggccacaggttcctgtagccacgaataatcccgaccaaaaaaccaacctttgtcccgaagacctcaacaaaaatcgaattttgacgccgcgggcgccaagaccgccccgaacaggcgaagcaaaagagccgcgcgaggaggtcggaggaaggttgaggtggtcaggtg

SEQ ID NO: 33512 - DNA, 197 bp, Setaria italica
  Peptide Sequence Number=SeqID_99486
tattcttgacctactgtccgatgctgcagagtgtgttcttcagcagtcagtgattaaaggtcttcaagaggtgccactttcaaatttcgcagatgctgagagcttagtttcacgtggtatgctgaagcgcagcactgctgcaacaagtgccaacagcaagtcaagccgatcacagtgcatcataacgatacgtggtt

SEQ ID NO: 33513 - DNA, 423 bp, Setaria italica
  Peptide Sequence Number=SeqID_99487
ggaagagcggccttctggttgctatgggtcccacaggctctggaagacgcataccatcttcggttctccgaggaatcctggtatactaccgctcatgctacggcaaatcttcaatgcacaagatgaaacaaggttgctagccaaccgtcaagatcattttccttgtcaatgttcgagatactttctgagggaaaaggagaacgcattcttgacctactgtccgatgctgcagagtgtgttcttcagcagtcagtgattaaaggtcttcaagagttcaaatggcatggttgtgtcttgttgagaattccaattggatagtcaggatggacatgggtgggatggtcctgtaccagccttgatttctgatcacaactggatgccttggaagttggaaacgcacatgctatttgaatcgcattgaga

SEQ ID NO: 33514 - DNA, 649 bp, Setaria italica
  Peptide Sequence Number=SeqID_99488
gcctccaggccgcgcgccgcgcgcgccttcgcgccccggcatccccgtcctcgcgccacggcgccgccacctcggcctccacctccgcgcctgggcagggctcgagcacgccgcccctggcgaggaaagcgaaggtgctgggccggctggtgcccggctgccggaagctgccgttctcgacgctcctcgaggagacaaccgactacatcgcggccctgcagatgcagatccgcgtcatgacagcggtcgccgaggcgctgtccgccatctctgccacctcctcctcctccaactccggcgccggctcctcctcctcgccggcgtgaccgaagctccaagattcgtgcattcgctgtaaattttctctctctttttttcctcccacgaatttttcctcgggattagttaacctctagctctccctctctctccccacctagttttccttgtcgtcttgtttccctcatttgggcgagcggttagtgtgatggtgaagaagatgatgatggcgtcccagtgattaacccgtgctgtaatgggggtagaagaagccgtaggtcacagtggttttgtttgtctcccctcctccccttcttccacctcaggattcttttgtaggttggtttgttggtctcttctccgatgaatg

SEQ ID NO: 33515 - DNA, 842 bp, Setaria italica
  Peptide Sequence Number=SeqID_99489
cctcacataaccaagcaccacgcgatacggttcatttgcaggaggtttcctccggaattcaatataatgcttggaaattttctgtgaagaagcgtgaagttcttccgctcgagcacggagttcgtcattgcagcgccacatagagagctcgaacatcaattcttctatctgagagaagtacaagtttgacgccatcattcttgcaagcaagcatacatcccttgtcacctctggcgtaactcttggatttccatcgcggtcgccacccatccaagaagagaactgaatgagaggagcattgtaggggagacgctcatcaatcccgatgttctttagagctgtatccacacgtcgcaaaaactttgggacacccttccatatagtttcatgaaaatagctcatcccgtaacgcatttcatcctgtggggttggttgtgctctccgaatttcgtctgttctaaaacatgcttggatctccctctgcagagcctcgtcgagctcctgcttatcgtcctccgtgatgtccttggcatacagctgcgtgaggcagttccggatcctggcgtgcttctggaggagcgaccttcggacggactgcgtggggtgggcggtgaagacgaggtcgacggtctggttcttgagcgcgtcgaagacctcctccttggactttccgagctctgtgacgaggcgcttgagcgtctcctcgatgtcagactcggtggcagcgaagccctcgtcggcgaagtccccgcgcttgagcttgttccggcggaggtgggcgagctgcacctcctccgcgaggtttgttaggttgagcatgttcgagaaggagctcgccacgg

SEQ ID NO: 33516 - DNA, 992 bp, Setaria italica
  Peptide Sequence Number=SeqID_99490
taccctttacttctaaagtattcggttattcttggtagtccttgtcgtagtctattgcgttgtcctgcatgcggcccagcagtgtcgacaaggacaacatctgatttgtccgggttgcttcttggatcgcttgcttcgctacgactgccggatctctttcatagcccttctcaaagatcggtatctggagcctgcgagcatgggtgcgtagctgctcaacggcaccagacctgaaggtatcacaagctgcaagggtcacactgaggtcatgctggaggagccagtaagcgacctttgcaagattggtggatttgccgactccattcaccccaacgaatacgatgacatacggcctctcacgctccttggcagcgtgcacgtctctcagaatgtcaatggatcggcttggggtcagaatgcgaagaagagcctcctccatggctgcctggacggtggaagctatgcttgtgaaagatcctaccttcttgccctcaaggcttgctgcaatcgattcgcaaagcttctctgcgatctcctccgcaacgttcttggtcatcagcctgtctttcagagctttgaccgcaggctgcagatcagacttgccaattacactgttacctgctgcaatgctctggaacactgaggagaaccatcctttcgctttggagacatctccaacctgttcatccttgtccatcttgcttagtccctccttgactgccacatgatcagtcaccttgccctttcagctgggtctgagaaatccagcttcttgtgggaaggctccttgtcgtggtccttttgtcttccctttttgtcgggtttgttcttctttgtgtcagtgttcttactatgaatgaacttgtctcgcaggaattgtaacatactcagattgaaggccccgccatctttgggttcgggttctcctgaatattcgtccttcccggagtcaccgtcggagccgtcctgcttcctcccaccagcattacccc

SEQ ID NO: 33517 - DNA, 247 bp, Setaria italica
  Peptide Sequence Number=SeqID_99491
ttgcatccagcacactctcccttggttgtcttacatatagaagttttggattagaacctacaagccatgctttgatttaaaacctgtttaaggcagcctagttcataaggcagtttccaggatttgtagcttgggaatacaacgaattgactaataatataagccatacaagctgttctgctgagagcttgagacagatcagatgctagacgctctgcctcctttgagaacaagtcatgtaagttaa

SEQ ID NO: 33518 - DNA, 150 bp, Setaria italica
  Peptide Sequence Number=SeqID_99492
gagcttgacgtttgagtatattctagcagttggcgagaggcactctctccaggaaggcttgggaggatcgtcgacagcgacctccggcagaaaaggagacggtgggaaagctgggtgacaaagctccatttggtggtaaaaatcgttgct

SEQ ID NO: 33519 - DNA, 584 bp, Setaria italica
  Peptide Sequence Number=SeqID_99493
cggcgggagctggaggcggcgctggcgcggctggccgtggccgaggagggcgaggagaggctgtgcttgcagctgggcgagctggaggccgaggccgtgacgcaggccgtcgagtaccgggagcacgtcagggcgctctccgagcggctcgccttcgccgacggtgtgctcaggaactccgggatcgccgccggcgtcgggagcagtggttgatccagcgacatgaccggtacagcagcatcgctcggcgaactctggttgctcgtgacggatctcgtgtaagttgtaaatgtttttcttttcccgaatcacgttgattcgtgtgcgacgatgtatgtagactgtgtggggttgtaaaattagcttgagatgatattgaagagatcagccgctactggttgttctggttggctggtttcatcattataaaatgggatcagatctttccaaaaaaaaaatgggatcagggctgtgccctctgtttctaattaaaataggatcaggctttgatagccaccaactcatgtgccaatggagaagtgatatcatataactagttggacagccaagaattcccaacatac

SEQ ID NO: 33520 - DNA, 249 bp, Setaria italica
  Peptide Sequence Number=SeqID_99494
tgggaaggagggggaggagacagcgatggtgggttcgaggagcggaaggtggtgccgtcgggttgcacggtccatccggcggcgcgggcgagggcggcgaggacgtcgttcatgtcagcgcgggcggggagcgggaagttgccgtgctgccgcagcccggccagcatgcggctcgtgatggcgcgtcggtgccgctcccgcagcttcgtccgctccttctccctctcccgctcccgctcctgagacacg

SEQ ID NO: 33521 - DNA, 378 bp, Setaria italica
  Peptide Sequence Number=SeqID_99495
aaccagctgctctcatgcatttctttcgatttgtcggtgatgatggggtgttctttcttttgaaaagcttgccacaggaccatccctttgaagtgtgcgtacagtttttgcacgccctgagctcagatcactgccaatgctagagcccctttctaaagcatcaattctagtgaaggtcggcagatcttgaagagaagatgaaagtcgcatagtttcttattttgcagtcaggggagcagttactacagaatctcaccgacaaggggcaagatgcagcaagaatctcgggaaactgaagtcataagtagatagcataaccagcagcacggtaagcaagatagcagcgccactacacagcctctgccggttgcggcggtc

SEQ ID NO: 33522 - DNA, 262 bp, Setaria italica
  Peptide Sequence Number=SeqID_99496
tacaggtcttcaaatgattaaatctcgatatgaaaatgttgcattatatgtgtgcgtcgaccgtaggcagatcgatgaacatgttgacttatcagtagcgttgctttatatgtgtgcgtcgaccgtaggcagatcgatgaacatgttgacttatcagtagcgttgctttctctctagtcgtcgtcctcccatgaaggtatgcatgtttgttctctcacgatgatgtagattatccacccgacttttaacttcatgtcaactt

SEQ ID NO: 33523 - DNA, 997 bp, Setaria italica
  Peptide Sequence Number=SeqID_99497
accaaacttactgaggtttctgtcagtgataaacttgaaggcttccgtgcaacaaaagagcactttagaggtttgagttttcctacaatttcatctgtgggaccaaatgcagcagttattcactataaacctgaagcgagtacgtgttcagaaatggatgctggtaaaatttatctttgcgactctggtgcacagtacctggatggtacaacggacattacaagaactgtacattttggtaaaccctcattgcatgagaagtcatgctacacagcagtcttgaaaggtcacatcgcactagacattgctgtatttcctaatgggacaacagggcatgctcttgatatccaatcccatggcctgtgccgtgccgatagtcaagaccctctctccacagtgggctcgcgaagggatatcaagagcatgccctgttgtcccattaggaaatacagcaatgtctggtgcacagtacctggatggtacaacggacattacaagaactgtacattttggtaaaccctcattgcatgagaagtcatgctacacagcagtcttgaaaggtcacatcgcactagacattgctgtatttcctaatgggatatcaagagcatgctcttgatatcctttcgcgagccccactgtggagagagggtcttgactatcggcacggcacaggccatgggattggatcttatctgaatgttcatgaaggtcctcatctaattagcttcagaccttctgctcgaaatgtaccattgcaagcatcaatgactgtaacagatgagcctggttattatgaagatgggagctttggtataagattggagaatgttcttatttgcaaagaggccaatgctaaatttaattttggagataagggttatttggcatttgaacatataactattgggtcttccttatttaccttaggtttcctttaaacttttcttttattttagacaccaagctgctgaacccctgtcgagatcgaatgggt

SEQ ID NO: 33524 - DNA, 487 bp, Setaria italica
  Peptide Sequence Number=SeqID_99498
ctgggacggtgtcgttgacgaggaaccagtagatgtcggtgtcgctgatgggcaccatgccggccctgaggccctgcgagaggaactgccggagctcccgcttggcgccgtggccgccggggaaggtggagagcccgcgcacggcggaccggcccgagctcgccggctccggcaggcccagccaccgcgccaccaccgagtgcacgccgtcgcaaccgatcaggaccttggctcggatcactgcgccgtcgtccagccgcagcacgacggtctccgacgcgtcgccggccgcgcgctcggtgtcgatggagacgagcttggacgagaagcggacggtgcctggcggcagctcctccgcgagcgcctccagcagcgccttcctgtccagcgccctcactctgacttcttcacccccgttcttgttaccagcaaagccggacacctgcatggctccggtctcaagattggtcgccttggacgtttcgta

SEQ ID NO: 33525 - DNA, 362 bp, Setaria italica
  Peptide Sequence Number=SeqID_99499
tcgtccgtagttcgagcagcaccgacgcgtcgcagcccctgacgaagcagtcgtggaagaagaggcggaggagcttggcggggagcgcggcggggtcggcggcgacgcgggccgccacgatgtcgcgcaccacggcctccgccgccgggcagctgtggcggtagaagtgcgccttcagcagcgcgccgtcgcagccggcgccagcgagcagcaccagcgtcgccgcaaagagcgcggccgacgacaccgacggcatccacgatgacgacgtcgtcggcctcatcatgctgctgcagctccgagccgtatcgacggcgacttgtgagccgtgacgtgagtgagacacactgagggggatagtg

SEQ ID NO: 33526 - DNA, 194 bp, Setaria italica
  Peptide Sequence Number=SeqID_99500
cgcgcaacgcgacgcgatgcagcgattggtggttctgctcgctttggtggcggtcgtggcggctgactttcagttggggaacacggtgacgtaccgccgcaccttgaagcaccccattattgggcagcccgtgaactgcctcgtgcaggtctcggagaacgggggcaacactgccctctccatccagcagtgca

SEQ ID NO: 33527 - DNA, 552 bp, Setaria italica
  Peptide Sequence Number=SeqID_99501
gtctgagtgtgagaccccaattatcagaacaccaggtggaagttcgcttctcagtgatgcatgcgattctctacattcggtaaataacttctggacatccttgagtaacacaatcaaattaccgcttttgctttcttctgaaatgacctcaattaactttcctaaagcaacactatcaacttcttcaccagcaaaagaatctggacgaagttcatcagcatgacaatagaagccgtgatttccctcacacaaacctccaagattattaccataagtgataggattgttgaatctaactccaagtttagataactgattgttttcaaaagcaagcaccactttgcctcgagaaccataagcagggcccctttgtgtcagcttaaaggcactaccagtatactctaccctatccccttctctgaaagtgtttaggttggatggcccctcaatatctcttgaactacaaggtgcatcatccatcctggcatccttggaagacgaaccacccagcgtaagagaatcagctatgagaagtcttgctttataatgctt

SEQ ID NO: 33528 - DNA, 276 bp, Setaria italica
  Peptide Sequence Number=SeqID_99502
aaacttatgttcttcacaccatattgctttgcagcttcataaaactgactcttaaaggcatcaatcctgtcatcatcgaagctcaggaaaagcattgctttggtaccatcattctcaaagtatttgaggagatatttgtggttagttggattagtgtcaaagttaactacagttgggaaaccagaaacttcgataaacttttgtagcgcatctttgtcaaaatcctgggaatcagcaaagaggtcatcgaatggtttaaaaagccgaacaacaggc

SEQ ID NO: 33529 - DNA, 548 bp, Setaria italica
  Peptide Sequence Number=SeqID_99503
aagtaatggattttcatgaagatcttgtcagcttggaagctgcttcaaagttgcaactgaaagcattggcggaagagcagcaggcagtcgtaaaaggcctggagaaagttgaactggaactaactgcttcggaaagtgatgggccggtttctgatgttttccgtaagactttaaaggagttcattgatcattctagtgctgatgtacgctctctatcagctttctattctgaagtaggtaaaagcgcagatgcacttgccctttattttggagaagaccctgcaaaattcccttttgagcaagttgctactactcttctcttcttcgtggggttgtttcggaaagctactgatgaaaaccttaagcagattgaggctgagaagaagaaaagcccagaaagaggccgaaaaagaagcaaaccaggacaaaaactacctgtaaaaatcaaaaaaatagggaatgggggacaaatcaccaagatcaccatcatccttcaagtgatatgcgacaaaagttttatgctcagcttttcttccttgggaaatgcc

SEQ ID NO: 33530 - DNA, 432 bp, Setaria italica
  misc_feature (18)..(18): n is a, c, g, or t
  misc_feature (423)..(423): n is a, c, g, or t
  Peptide Sequence Number=SeqID_99504
tccggcgcggccaccgcncggcgctggagctatccgacgtcccctcccctctcccccgcccaccgccccgagcgcatgcacgagctcttcacccgccactggccctcctcctcctcctcctcctccaccggtgccgcggcggcggcggccagcaacccggtccggcacacgctgttccggacgttctggccgctgttcctcttgaacgcgtcgctggcgctgctccgtctcaccgtcatgtacgtggggccgacgctgatccagagcttcgtagactacaccaaggtgggcgcggagaggccgctgggggaaggggcgcggctggtggccacgctgctggcggccaagtgcgcagaggcgctgtgcagccaccagtacaacttccactgccagaagctggggatgcagatccggggcgccctnatcgtggcg

SEQ ID NO: 33531 - DNA, 2158 bp, Setaria italica
  Peptide Sequence Number=SeqID_99505
ttagactaccgtactacaaccgtcatgtacgtaggggaccgaacgactagaataccaagaagcttcgtagactacaccaaggtgggcgcggagaggccgctgggggaaggggcgcggctggtggccacgctgctggcggccaagtgcgcagaggcgctgtgcagccaccagtacaacttccactgccagaagctggggatgcagatccggggcgccctcatcgtggcgctctaccgcaaggggctccggctgtcgtgctccgcgcggcagcggcacgggctcggcatgatcgtcaactacatggccgtcgacgcgcagcagctctccgacatgatgctgcagatccactacctctggctcatgccgctccaggttggcgtggcgctggggctcctgtacacgtacctgggccctccggtgacgtcggcgctggtgggcgtcgccggcgtgatggtgttcgtgctcctgggcacccgccgcaacaaccattaccagttctcgctgatgaaggagcgcgaccagcggatgaaggcgacgaacgagatgctcaactacatgcgcgtgatcaagttccaggcgtgggaggagcacttcaacgcgcgcatcggccggttccgccgcctcgagttcggctggctctcccgcttcatgtactccatctccggcaacatcatcgcgctctggagcgcccccgtcgtcgtctccgcgctcgtcttcgccacctgcgtgctctggggagggacgcgcctcgacgccgggctcgtcttcaccgccacctccttcttcaagatcctgcaggagcccatgaggaacttcccacaggctatgatccaggcctcgcaggccatgatctcgctgcagcgactcgactcgtacatgacgagcgcggagctggacgacggcgccgtggagcgggagcccgccgctgcggcgtcaggcggcgacggcggggcggccgtgcaggtgaaggacggcgtgttcgcgtgggacgacgaggtggaggacgggcaggaggtgctgcgcgggatcgacctggacatccggacgggcgcgctggcggccgtggtgggcatggtagggtccggcaagtcgtcgctgctcggatgcatcctcggcgagatgcgcaaggtctccggcaaggtgaaggtgtgtggcagcacagcatacgttgctcagacagcatggattcagaacggcaccatcgaggagaacattctcttcgggaagcccatgcaccgggagaggtacaaggaggtgatcagggtatgctgcctggagaaagacttggagatgatggagtttggcgaccagacagagattggtgagcgtggcatcaaccttagcggcgggcagaagcagcgcatccagctcgcccgcgccgtataccaggactgcgatatctacctcctcgacgatgtcttcagcgcagtcgatgcacacaccggcacagaaatcttcaaggaatgtgtgagaggtgctctgaagaacaagaccgtagtgcttgtgacccaccaagttgatttcttgcacaatgccgatatcatatacgtgatgaaggacggcatgatcgtgcaatcgggcaagtacgacgagctcctccagctcggctccgacttcgcggcgctggtcgcggcccacgacagctccatggagctcgtagagagcgcggcgccggcgagcgagggcgagctccccctctcccggcagccgtcgagcaagcggaacgccgactcgccgtcgtcgtcctccatcgtggcgcccaaggccgagaaggcgtcggcgcggctgattaaggacgaggagcgcgcgagcgggcacgtgagcctcgccgtgtacaagcagtacatgacggaggcgtggggctggtggggcccgctcgtggtggtggcggtctccatcgcgtggcagtgctcgctggtggccagcgactactggctcgccgacgagacctccgcggagaacgccgcctcgttccggccgtccctgttcatcagcgtgtactccatcatcgccgccgtctcggtggtgctcgtcgcggcgcgctccttcctcgtggccttcatcggcctccagactgcggacaagtttttcaagcagatcctcaacagcatcctgcacgcgcccatgtccttcttcgacaccacgccgtccggcagga

SEQ ID NO: 33532 - DNA, 2227 bp, Setaria italica
  Peptide Sequence Number=SeqID_99506
tgtattcttctttcctttgttccgttttcttttcgtttctttggttattgttagtcgttgttcctattgttactattctaccgtcggtgtggggcccggctcgtggtggtggcggtctccatcgcgtggcagtgctcgctggtggccagcgactactggctcgccgacgagacctccgcggagaacgccgcctcgttccggccgtccctgttcatcagcgtgtactccatcatcgccgccgtctcggtggtgctcgtcgcggcgcgctccttcctcgtggccttcatcggcctccagactgcggacaagtttttcaagcagatcctcaacagcatcctgcacgcgcccatgtccttcttcgacaccacgccgtccggcaggatcctcagcagggcgtcatcggatcagacgaacgtcgatctcttcctgccgttcttcgtctggatgagcgtgtccatgtacatcaccgtgatcagtgtgctgatcgtcacgtgccaggtggcctggccgtctgtcgtcgccatcatccctctggtgatactgaacctctggtaccggggctactatttggcaacgtcaagggagctgacccgcctcgagtcgatcacaaaggctccggtgatccaccacttctcggagacggttcagggtgtcatgaccatcaggtgcttcaggaaggaggacagcttcttgcaggagaacctgaaccgggtgaacgcaagcctgaagatggacttccacaacaatggcgccaacgagtggctcggtttccggctcgagctgatcggaagcttcgttctctgcttcacagccttgctcatggtcacattgccaagtagcttcgtgcagccagagtacgttggtctatcactatcgtatggtctatcgctcaaccaggtgttgttttgggccatctggatcagttgcttcatagaaaacaaaatggtctcagttgagaggataaagcagttcacaaacattccttcagaggccgcatggaggatcaaggagtgcctaccagatgctaactggccaacaaaaggtgacatcgatgtcattgatctcaagtttaggtataggcacaacactccgctagtgttgaagggcattacaataagtatacatggaggagaaaagattggagttgttggtcgaactggtagcggcaaatcaacgctgatccaggcattgttcagaatagtagagccttctgaggggaaaataattattgatggagttgacatctgcactttaggactccatgaccttagatctcggtttggtatcattcctcaggagcctgttctctttgaggggactattcggagcaacattgatccacttgagcaatattctgatgatgaaatctggcaggctttggaacggtgtcaattgagagaagccgtgacttcaaaatccgaaaagcttgatgcttcagttgtcgacaacggtgagaactggagtgtaggacagaggcaactgctatgcctaggccgggtgatgctcaaacgcagcaggatactgttcatggatgaggctactgcttcggtggattcccaaaccgatgctgtgattcagaagatcattcgggaagacttttcagcttgtacaatcatcagcattgcccacagaataccaacagttatggattgcgacagagtcctagttatcgatgcaggactagcaaaggagtttgaccggcctgcgaatttgatcgagaggccatctctctttggagcgttagttcaagagtatgcaaaccggtcatccgacgtgtaaccttggagatgacatatttttgactcaagattctggaggaaatagggaatggaaatttcttggtgtggtgtggtgaacaagcaagctgcattcaagctctgaataaaactgcgagccctcaaaagttcaggagcggtaaccaggtgttggggcttgggggaatggaaggtcagagaatagccacaatgtgataaggcatcaagttgactaagacgaggacacgaagtagatttcaggatgtgttccggccgtttaagctgaatttttcatttttttcctaaaactgtgagctgaagatgatgaatgaaactaatttcacggaaattgcaaaatatttgcttctccagagaacttgtgtgggttgtttatttgtactcgatccattaagatttacttgtcctctgtagcatcgatgcggtttttaataaacatatttagccagtgttct

SEQ ID NO: 33533 - DNA, 495 bp, Setaria italica
  misc_feature (43)..(43): n is a, c, g, or t
  Peptide Sequence Number=SeqID_99507
tcatggcttcaattatgtacattcgccaatgactcaatccttntaagcttccataagatcttttcaggcttatgagccgcttatctcatttcctgtgcctcattctttctgttccagagttcagaacaaaaatgcagatagaaggtcagaagcaacaaaaagcaaaaggaaaagagaaggaaactaaatgaagagcctcatccgcagaacgaaaatgatccagttgatgatgccaaggaggatgacgattagctctgcagaagtgatagttacatgcggaaaaccaacatatgttagtgtttatgttgtaagttgtatgctctatgtgctccatgttacctcagtactgcaacactttctgtagacttgatagggagctgtataattcaagtgcccagctgctatcaggttccgactctgtctggtggtgcaattagaattctgttcctgataatgtttttctgaatgacatcagcaatatcttggttgcaaaaa

SEQ ID NO: 33534 - DNA, 219 bp, Setaria italica
  Peptide Sequence Number=SeqID_99508
gactcgaggcgaggcgcggtaatcaggagtgagcagttgccggcgcccaggatgtcgagccggcaccgcacgaggaggtgaagatctagagccaccgtaccggagcagtcgcagccaagcatcgacagatcggtgaggttggggcacgccgcgatggcgtccctgacggcgctgtcccgcagcggcgcgccgacgacctccagcacgcggagcctctcc

SEQ ID NO: 33535 - DNA, 493 bp, Setaria italica
  Peptide Sequence Number=SeqID_99509
ccgcgacgccgaggagcttgcgcagcgtgagggggggaggcgtgaagcctccgcacggagactggccaactttgctcgcaagtgctgggactcagtccgccgtgtcccgaggggccgaccgggagcgtgagttgaagacccaggccaacggtgaaatcgccaagttgcggggtctgctcgacgaggagcgcggtgagcacagcgccctgcgagatgcggcccgcatcgtctgcgacgactttggcgtagctccggaggaggggtcgagctctctgccggctcgtgtcctcgaggtgcgccgtcgccgtcgcgagatcgccgtggacgcgcttcaccttggcgtgcggcgagccttcggggtcttcggctctcactattctggcatcaactttgccgggatgagtgaagggtacgccgcgggctacaccgaagctgagctggacgagatcgatgccgcggtgaccgcgccggcggaggtcctcgcgaagcttct

SEQ ID NO: 33536 - DNA, 144 bp, Setaria italica
  Peptide Sequence Number=SeqID_99510
caaaaagagacaaaatattcttcctccttcaaagttccaagacctccacgtgtcagggtaggcaagctctgaccgcagatcagggccgtccacgaggatctcagcggtcggcaccaattttcgcgtgcccagctgcgcatccgg

SEQ ID NO: 33537 - DNA, 734 bp, Setaria italica
  Peptide Sequence Number=SeqID_99511
accgcgccatccaaatctaggttctggaacatctggcttgagctgcacatgttggcccctatttaatggaatgactttgataacttcacttgtcaaaacacgtgcttctccagtacaaaatgacacaacaaggtggtcattgtctacaatagactggacaaaaccaatgcttctgggtcctgcaccttgccaaccaaaagccggtgaagtgacagttcttctaaatttcacccaatccgcaacttcgtatatggttggggaaagatgaactcctttatcttcaagtgtttccatcaattcttcataaatccattctcgtggaagcctctcaagaaaatctcttagtgtccagcctcggtggtttctcacatcaacagcaggtgacggctgttgtagcatttggacaatccaagtcatgttttcacgtatcatttttgctgcatcagcagctatatgaaaagcattgtcaccatcatcatcctgtatgttgcagtttgctccagctgccaaaagcaagccaacacatgagtttgcacctctgttgagtgcaacatggagtggggttgtattttgagcatttcttatatttacatcaactcctgcttccagtatgatcttaaccagctccacgtcatcgatcattgctgcagtatgtaatgcagttctacagtgtggatcgtcttgtgctgtaggatcagcaccaacagcgagcaatgttcttactaactctcgta

SEQ ID NO: 33538 - DNA, 2935 bp, Setaria italica
  misc_feature (1)..(61): n is a, c, g, or t
  Peptide Sequence Number=SeqID_99512
nnnnnnnnnnnnnnnnnnnnnnnnnnnnnnnnnnnnnnnnnnnnnnnnnnnnnnnnnnnnnactagccgccaatcaagtaagtatacaaggccactatcaattaaattaatgttcaggtcccaacctggtacactggtatatgatacactgaaaccaaaaaaggcgtcaggcgcataattatacatgtaaaccaaggaaaaaaacctaggtggtggttatcaactctatttcactattgccgtctctttccattcctgggttatcaacatgaaatacacccctccatgctagcgaccataactatgtgcaacttgcaactccactgcaggttgagatcttactaaatttgaagtgctgcaaaatggatgggtgcaagaaatcaggtatggggtcaaaagaatacagcaagcctatgaaaaaaaaccattaggagcctccgtcagtgagggggcgtcatcaagaatgatatcagcagggtccccgatccaaagtctatccctccaccgaaatttgatcctcagctttccatttgcatcgacacctataacctcgcctttgctcgcataggtctccatcccccaaccccacctgggggatacaagaccaggtcgtatccgtactttatcaccttgtcggaagggcctcaccttttccacctcccacgctttgcacaaccatagtctctcacagaagcagaaagcaatccagagctctccatcatcagcccgatggaccacccctatgctgttgtggttcacatcaccccattgatatgttggggttgcaatggagtccttaaccttcacccagtccccaacacagatttcttcctcttcctccactttctccacctctgctgggtctatcaaccaagccctggcaccagctggggtgtgaatccttaacttcccatcagcgtcaattgatgagattgtccctatactcaaatgattatgattagaccaaccaaatcttggctggcggatacaacctctgattcgaacacgctgcccaacaacaaacttgctaactccttcaagctggctagaaggccctatccacctttcctgctcaccacaaaaagccacatgaatggttccatcccaaacatcaccttgatatcccaccccatgcaccacaccaatgctaccaggcctgagagatctccattgatccgcatcattccgcagcctaacccactctccaacctcaaatattttctcaatttcaagatctgcaggatcacctctccacaatccaggcacaccaaagaaggcaaccctaacttctccgtcagcatgtacaccagcgattatgcctctagaatcaggcctcgcatctctccatccccatctaggctctgaaattccagcacggaaccgaacatgctgacctatcttaaaggactctaccttctcaatgtctgtgttatgagttaaccatttcccattcctgaagcaaccagctaactccaagtaaccagagtcctggatgctgtggactactgcaatgcttattctgccaatactgttccagtcataggtaggtctgctcccaatacttggtttttggcggacccagtctccaacctcaaaagctgaaagcctctcagcatcaccaggagcaaccttccataaactttttcggccagaaaccttgatatttaaagtcccatccatgtcaatcctcgctatggctccaatggttgctgcagtttcattcaaccatccaaggcgtggctgagatatggaaggtgacacatgaactttttcccctacctcaaatggctgtgccttctccacatctgcaacagaacaaagaaaaagcttgcttctgaagcagaaagcaataccaacatccccatcatcttgtagactatgcactattccaatactattacgagtcacatcctcccatccatatttgggtgaaggtactgttgctttaactctaacccaatcaccaaccttaaagttctcaatcttctccatgtctgatggatctgcttgccatggtgcagcccgattaggaatatctatgatgagcagaccatcactctcgatgtcaattattttccccacactgtgatgggtctccccaccccatgcatatctgggttctgcgacagacctctttacgcatacttggtcgccaatcttgaatgggtcaacatgttcgacctcctctggttcacacaaccatggattggacaaatagcaaaggcccaatagaagactgctatctggtctgatggagtatacaataccaacacttccaggagtaatagactccatgccatgtacagcaactgttagcgagggacgaatccgaacccagttaccaaccttatattcttcaaccctttcaatctcagcaggatcagctctccatcccctggaagctcctgggaaaccaaccctcaagattccatcatcatcaacacagagaaccgtcccaatgctatcccgcgactgaccgcgccatccaaatctaggttctggaacatctggcttgagctgcacatgttggcccctatttaatggaatgactttgataacttcacttgtcaaaacacgtgcttctccagtacaaaatgacacaacaaggtggtcattgtctacaattttttgcaaaatcaagagcatcaaactaagcaaaaccaaacaggccaccaaaatgtcacagaagcacaaataacaaaaatgttacagaagcacaaatatacgaagttaattcctaattgttgtgtagccatactgaatctatttagaattgacagataaatagtgaaactttgatgatatgtctcttgaaaagatgtatatataaccaaaagggagtaaataaaagtgcagataaagccacagcagtaccaaaggaccttagttgtaaaggattgcaaatacacacgaacaaatggatcattattattct

SEQ ID NO: 33539 - DNA, 376 bp, Setaria italica
  Peptide Sequence Number=SeqID_99513
tagaggatggctcaatggcttcatcgtcccagaacacacattggcatgtttgtacaccgctagcaaagtcagcgccacaggagtagcagaactcatgcccacacctgcacaagtgacaaagtgacctttagtacctagataaaaaaaaaaagcacatgtatttttgaatcaaccatctttagtgcattcattttttggggcaacggtcatgtgtgacggcaacacaaaacatgcttcactacttaaaagcggcaacacaaaatatgcagtattgtttatgctacaagttttgtatgacatcatttttgcatgcaacaaatatgcagtatgtttggaacagaatcatgcaagaccaagtggcaatctagaattaaat

SEQ ID NO: 33540 - DNA, 2496 bp, Setaria italica
  Peptide Sequence Number=SeqID_99514
ttttttttgaagacaaataatttatgcgacttatttgaaagtgcaacaggcatcaactgggcacttgctcatgttgctgattcaattcaacacagataattccaggaacctcgcaaatatatgtggctcacttgaaaaaaaaaaatagcagaatctaaacctgcagagttacaactggagaactcttttgctgatgtgcaccagaaaccaaagtaggtaatgcaggggtaaaacagcatcagtgtatggaagcataacacttcccttctgtcaattatcaatcagggacatggaaacatattattctgaataaaactcggtatgtgccatttctttactgctatctataaccttttttttgttcactggatgtagtcatcgttgtagctgtcgctgatcaccgagacaaatcgctcgagccatggcagctgatggaggtccttcatggtgtcaacgatatacgagtcggcgcagcggggtggcgattggcaggggttgtctcccaggctgaagccacccgctaggaacctctgtatgagtgccagttgcgcacgctcctgctccgagtacccctcgacagcggcggttggcatgcagtcgaatgtgtcccacgcccagatctcggatgctgcttggctggatcgtgctgcggaggatggctcaatggcttcatcgtcccagaacacacattggcatgtttgtacaccgctagcaaagtcagcgccacaggagtagcagaactcatgcccacaccagcaagtcatatggaagcagccttgtgttaattcaatcattcgtcgacatctctgacaacgcctccacctattgttttgagcaagccgatgcaaagataggtctccagcatctctttcctcgacaggcaagctctggtactcatcacagcccatcatgatgtgccatggcactccacagttgatacagatatctctatggcattctgggcactcaacacaactgagatctgactgacttgatgaacttgcccgagaaaagtgctgactaaggtctaataacactgaacagtttggaaagggacaataaaatctctccatgtctgaggtgccagcttctgcgaatgctctctccagggaatcatagctactaactggaaggaatgacttacactcactagctgaaattagatatttacaccttaattgcggacaccttataggccgctttgaggtcagcagcttctcttcaacatatgcagccaggcaattatagcaaaatgtgtgtgaacaacctgtcttgatcatctgagaacctagtttttcctcacagcagatcgggcaggtgccaacctcatagggagaaagatacctgatgcctatcgcttctttggccaactgcaagggcctctcaagttcaaagctaggaagcaatatcaaatcaaagtcttccagcttatcaactagttcaagaatcctgtggcctaaagctaccaaaagctggtcttcaagaatttcagcttctgctatctgaaagtatagcttctctgagttggtgaaggcgaagatcttccttatcccattctgcagcgccaccagcaggccatccatgagtgccaagtgctcagccaccagctcctccacatagaaatccagcttcttctgcaccttgagaacaggcactcctggcgacctctccatcaccactccaatcccagacaatttcttcccctctgcctcagggcttgacacgcccttgaagaacaggcgcactgaggtctcatcgagctccccctttgtgacaccggccgtgaaggactcctcggtgtcctcccactcctcctcatccccacagcagctcctgaagtcatcttcccccctcgaattgccagcgcctgcctcaggtatcctctcctccatcctcaaacaatgaatgacgaaatccccgcaaccaattgaatcagaatgtccttccaaccccaattccagcagcaatctccatcagtaagggcacaagcagtctgcaaggaagcgcgaaggtggcctgttcctttttgccgcaactactcccgggccagcaccagtggcctacctactagtgcagtgacaaccccacagcacagattgggcgctccgggatttcgggtcagaaattgatggaggaaacggccaggaagcaccagacggagctccagagcgcgaattccagagcagcgatggcgaaattggccgggacggcgaccaaattgacccagacgctggagctctccccgatcctccagttcctcatacgtgaccggctcggtaagcactcggaagggggggaattcaccaccacgaggtcctgttcttctcgtctgatgaccggggagggagtcacgtcgatggatggatggatggatggaagggagagggcctgaccgccgccgggccgggtggcctcggtgaggaggaggaggtgcgggcgtcgcaaatggggacaaagatgggagcttttccggcggcggtgaggtgaggggtaggc

SEQ ID NO: 33541 - DNA, 439 bp, Setaria italica
  Peptide Sequence Number=SeqID_99515
ccgcgccctctccatcacagaccgaggcgacatggaggcgattcatggcagacatggcgcgcgaaccaaagaaagaaggtcagtcgagagcaccgccgcatgcaggtgattgcagccagtcgcgccgcctggcatcacgttccgtccagctagaggtgcgtcgtcaatgcatgccctttatatgattcaattcatgcatgtgcttggtcattggaactgctagctccttgttcatggttgttaacaatgcaagctggttgtgtcgacctatgctggagggcctgcgttgcacattcacaacaacagaaagcaagtactacactgcaactcaaaaaatcaggcaaccagcagacctctggcgcaaactggggtgaatggaggccgctccaatacctcaggttttgtcaaaatatgagctctagcagcattgataaggatg

SEQ ID NO: 33542 - DNA, 153 bp, Setaria italica
  Peptide Sequence Number=SeqID_99516
gcacatatatcagcagagcatttaagagaataaaaccatagatttaacagttctgataaattatcatttaatgttaattgttcttttgaatagtaacaaacatgcatctcgttcttacaaagaacttactgtaaatgggaaaaaaacatatca

SEQ ID NO: 33543 - DNA, 587 bp, Setaria italica
  Peptide Sequence Number=SeqID_99517
ggctacgttggcaggtgggggagaggtgactggagcgagagcagcagcaatggcgagaagcggaggaagaggggcaggcccgcaggctggccaaggcgagctcctcctcgtcggcgtcagtggcgtcgtcctccgcgtcatgggcaagtggctcgacagtcatggactggggcagcccggaggatgccgagttgcagagcggcgacggcttctccctccttgtctacgcctggaagagctagtgtgatgggctagcggcggcggcagcggcagaagcggctcgccggcattgtttcgattgatgattggttctcgattcagtgaggatttctcttcccattgttgtaagttgcaattgtttaccgagcaatgttcttgtgcagttttgagtgcttgctccactgaccataccattttttacaattctccattgacaaccggagaaatgagcttctaccatactgtgtgatcaatggtccatccaaattaggtggcaaatcgctaaaattcgacagatcattggttcgttctcttttgaattctacatatcattgcgtcgttctcttcattaggtagtgcattgtggg

SEQ ID NO: 33544 - DNA, 444 bp, Setaria italica
  Peptide Sequence Number=SeqID_99518
tgccctcacgtcgccatgagctaagagatacgtgaacccagatgcgatggcttctctcagagcttccagctcgtactctaacgcagggtcttcttctgcagacatggagctggagggaagcacaggagcattaccatctctggtgcccattctgttgtcatcaccagatctctgatcagaaagcagtggagtttgcagatcgccttcacaagcaggagactgaggcacctcagatacaacagatatgtcatcacgctcagcatccgttgtgcttgcctcaagcgcgatttcctgggcttccctcctcaaaaatttctcaagactctcgaccagaagctgctcaaagaagccatgatcctccttcctaacatccttataaccatagcgcgcgacgcagcgaaacatatgtcccgcttgaagaaaggttcttgttccgaagggttg

SEQ ID NO: 33545 - DNA, 2754 bp, Setaria italica
  Peptide Sequence Number=SeqID_99519
tttttaagaattatgtaatacataacaacgaagtattgacaagaattatgtagaaaggggcatgtggaggccaggcccaatatttggcatttgctccactgcattatttgaagagtcaacaaatgcaaggagcatttggatacacatacacactagggatgatggcagaaacatagctgttcatacagatacagcctccacatatcatacaaacaactgaagacgtgccgatcaaagggtgaaatgaatggaaaatcgaacacacacagccatgtccgcggctaaaattcggagcagatggcaaggggcagcaatgaattcaatcagtactgcagtacaatctctaaactaccagctggtacagcacgccatccaagagaccaagattcaaggttcagtcttgtggcgcgattgtagcagagtcccaatcagaccatgtacgtcataccgacacgcatgatgttcgagtgggggaccttcagggtcgcggtgccagccctgcagttcctcctgaggaatgcgtagaaatagttgatgataaacttcttcgtgaagaatgactccttcctcgccctcacgtcgccatgagctaagagatacgtgaacccagatgcgatggcttctctcagagcttccagctcgtactctaacgcagggtcttcttctgcagacatggagctggagggaagcacaggagcattaccatctctggtgcccattctgttgtcatcaccagatctctgatcagaaagcagtggagtttgcagatcgccttcacaagcaggagactgaggcacctcagatacaacagatatgtcatcacgctcagcatccgttgtgcttgcctcaagcgcgatttcctgggcttccctcctcaaaaatttctcaagactctcgaccagaagctgctcaaagaagccatgatcctccttcctaacatccttataaccatagcgcgcgacgcagcgaaacatatggtagtccttttgaccaacccttcggaacaagaacctttcttcaagcgggacatatgggatcggaacatactttatgcaaacaaaaacgatcgtggagtgcattgctggcagcgtgaccaacagttggccaaagattgatgggattccctggaccaattcgttgtacacaagtccaatgcctggaactcttacagtcccgagtgtggctccaaggtcaaggatgcagtccagtgatatcttgccccgcatctcactctgatatttcaacacacttccatagttccatgtgtacattatgcagagaaacagtgatgagaaagccagcggtaaccaacctccttcttttatctttgacagaacggcggttaagtaaacaaactccactgtgccaaaaagaataggaaagaacagcacaagaaacaagttggtttgccatataagcatcatcaccaaagtcaccagtacagtgctaaccatcatgacaccaacttcagcaataccatatgcattggcgatatcattggtacttctgaaagcagccacaatgatgatgcacatgaccataagaaaccaattcatcacaggtatgtaaatctgacccatgactttcttggaagtatggattatcttaatcctaggaaagcaaccaagagccatcgcctgctttatgcatgagaatgttgcagatatcatagcttggctggcaatcatagcagcaagtgtagcaatcacaaatactggccagaatagaactcctggtacagagtcataaaatactctttgtacagcaagtggatttttcatcaaaaatgcagcttgtcccatgtaagcaataagcagacaggggaatacaatagcggtaaatgctatctgtattgatttgacagagaaatggcccaaatcagcaaacattgcttcagctcctgtgatgcacaggacacaaccaccaagagctgaccatgcctttaagccgtttgttgcgaaaaacaagtatatatacaccggattgaatgctctcacaacagatatatcatacttaacaatattatatattccaatagagcccaaattaagaaaccagagtcccaaaataggagcaaacatgaatccaactttgccagtcccgaacctctgcacgctaaacagtagcacaagaactatgatggagactattacaacagcatctgtatcgaatcctcgaacttgaccctggagaccactgacagcagacatgactgacattgacggagtgagaatgccgtcaccaatcaccatagaagttcccatcagaactaagaacaggagaatgttcttgaagagcggtttcttttctaggcagtctttgacaaacatagcacgctcaagttcgggagttggcaacttaagcctaaaactagatatatcttcatccacacgctgctgattcggaagcaggctaacttttgcatacctgcaaatcaatgaatacagtgcaaaagtcgcccccttccccattgtcattagccttgagcactataaacacgtatttcgcgaaaggtattaacgcgatcgtgtacatgaccagcgaaagtgctcccaggatctcaacctccgactttatgggcaccttgctgaacacatcgctgaagacgtagagagggctcgtccccatgtctccgtagaccacgccgagggtttgaaaagccatcgcgatggtgctcaccatcgataattccttgctgctgtgcccgtgcgcgccgcgcacgttcatggcctcgacgtcgagcgagtccacccg

SEQ ID NO: 33546 - DNA, 508 bp, Setaria italica
  Peptide Sequence Number=SeqID_99520
gagcccccgggcagcctcgtcgccaccctgcgggggcagttcgagatcctgtccctcacgggcaccgtgctgccgccgcccgcgcccccgggggccagcagcctcagcgtgtacctcgccggcggccagggacaggtggtggggtgggaatgtcgtcggtcagctcatcgccgccgggcccgtggttctcatggccgcctcgttcgccaatgctatctacgagcgtctgcctctggagggagaggaagagcccccccacggctaccgcagcagcagccacagccacagagccccaaggtgaagcagaaccggctggagcacaaccacaacaacaggaggcgtcgcagtcatcaggggtgactggaggtgatgctggtggcggcggcattggccatggcatgtcactgtacgatctcggagggaacatggctggctaccagttgcccggagacaactttggcagctggaggccaacattttgatcggcataccaagctcttggcaatgg

SEQ ID NO: 33547 - DNA, 499 bp, Setaria italica
  Peptide Sequence Number=SeqID_99521
aggttgagaccgctgcccccatccatgagtaccttggtgaggcgcgtcgtgccgacgatggggtcgaacgacgagagggtaacgccccggactgccggacgcgtccagggtggtcggacctatcgaaggtgatggccggcccggaccagtcgaggaaggccggggtcgcaggctcggccgcgtagacctcccggcgctccagctttttgctggcgcttggtgtcgtatgctgcggagccgccgaagatcatgaagcagccgtcgaccttagggaagccgtcttccttctcttcgtcgcccttcttctcttcatcaggcttccgcttccgatcgcccttcactgggttgcctacaaagtacctcttcatgaggttgcgatctttgtaggcgtgcttcgcggggaactcgtggttcgggcacggtccctcaagcaacttgtcgaagaagccgggagcgccttcgggggtgctgccccgcttgcgctcgaccgcggccacga

SEQ ID NO: 33548 - DNA, 1511 bp, Setaria italica
  Peptide Sequence Number=SeqID_99522
aagcgggcgcggggacggccggtgtggaggcggatcctgttcgcctccaagaagacccgcagcatcatcatgctcaacgccctcaccgtcatctatggtcaagtgatattccagttttgaaagaggttgaggccctgacagagcccgcagtcttcaacatggtgcgattcgttgttgcggcgatccccttcataccgtttgcggtctgcgcctttggggaccgccgtgtacggaatgcaggactggagctgggagtctgggtcagcttagcttaccttgctcaagctattggattgctctcatccgatgctggccgagcatccttcatcacggccttcacggtcatagtagtgcctctgattgatggccttcttggtgcctcgatccccaagctcacttggttcggagctatcgtgtcactagtaggaattggcctcctggaatgtggtggctctcctccatgtgttggtgatgttttgaacttctttagcgccgtattttttgggatccatatgctcagaacggagcaaatatcaaggagtacagacaagaagaagtttttggctcttcttagcttcgaggtccttgtggtggctttatcctctatactttggtttatgttcaaagatggctacgttgataccagcgagtccagctttgaatcatggacttttggtatgctttgggatacagcagcttcatttccttggataccagcattgtacactggagttctttctacggtgttatgtatgtgggcagagatggtagcgatgggcgatgtttcagcaactgaaactgcaattgtttacggtttggaaccagtttggggagctgccttcgcttggttccttctcggtgaaagatgggacaacgctgcattgattggagctgctcttgtattatgtggcagtttaactgtccagctatttgggtcagttcctgagaagtccaagaaagttcaaaagcgcaatagcaatcctttggaaaccccaatgaagcgacaagactacttatatttatctcctataccagttgattccaggaagatcatgggaagacaattagaaaggaaagacaatgcattgtagcccaacatcaaggcaagtaaggaaatcctgcaatggcaggctcgggtatcaaatcattatcctgatcctgaagcatctttcttggctgatcaatgtgagaggatgttgcacgaccaatgctctatatgcagaatgctttcctgtttgcgttatcttggagctcgtatttggatttctgttctcagatgactgtgccagctacatgctagaatgcctcatgcatattaggaaatgaggcattgctagctggaaactcgaggtccatggtccacctagacacaaatactgacgttgagtgcaataacttagtaaattttcggcgttttcaactgtacagatttcatgtaaatatgtgtgcgcagctagataattgtataatgccgaactaagcattcctctgtatattactgaaatgacaaa

SEQ ID NO: 33549 - DNA, 253 bp, Setaria italica
  Peptide Sequence Number=SeqID_99523
atatcagccttgaagatgatcccaaaccagcccatcaggaaagatccgagcatattagaaggaagatcagggtatagcgggctttggtctgaggtgagtgccaagcattctgggccaaacagcttttggagtccatatcttgtgaataccttatcattatcaaaagcataattactcaataatgcatcataggtagtcaccctgtaatagcacgtaaaaaaattacctaaaagtaactaagtacttaaaatta

SEQ ID NO: 33550 - DNA, 1019 bp, Setaria italica
  Peptide Sequence Number=SeqID_99524
ttagttttttttttttttttttgaccaaaccagtccggtttctttttgaaagaaaacgcatttgacaactgggttcggcaatcacaagcaaatgtcagatgtgtgcctacgcacattccagcagcaaaacaccacaaacacatgatcaaatggctgatttacgatagatagtagctcggcctcccccaatattacatacagggctcccaacatattcggtaccacgatgcgaacaaactatacatatactctattgtccatgcaatgatgatgcatatactaaggaacatccatatccacaattcatctccccattatcccggagtaatggcaccaccttctgatggcagatcagcgagtcgttacaacagctgcggcagcaccttgtgctcggtgtaaggcctgttcgatggtagcgagagttgcctcctccattggctttttgggtcacccttcatacgatgtcatcaaatatcagggacaagacgagcccctgcacaaattggctcctcctgattcgctccaccttgacctcagggagcaaaggctcatccacactctctgctgctttctggtctaagttatcacttcccacttctgtctcatccaagggctctttcttagcatcccttggcaaatctacttcagagaaattaccaacaaaagaggacagtagaggatcaggcactgtgctgactggggcagcacgtgacgatctacttatactctcaagatctctcttcaatgatgcaagcgttgaataacgtgaccccgacaaaccttgctggtttctccacttatccttcaagaaagctcgatgctgtaagctcatgtggtcaactaacatgtcaaccttacctgcacaaattgggcacaccccggcattggcctcggcgtggtgttcatcctccatgtggcacagcagccccacggcgtccagctcctcgccgcagaacgggcagggcagctcgtccgccaccccgacccccgccgcccgctcctcctcctcctcgtcgaga

SEQ ID NO: 33551 - DNA, 395 bp, Setaria italica
  Peptide Sequence Number=SeqID_99525
tcctagtcagtcgcggactggatgaactggagcgccgcctcgtcgcgcggccctgcagcacgcgtgcccatgcacatgtacacgtctggtgagtagtattgcttgtggtggccgtcgacgaagctgttgagcgcccaactggcgaaccccatcatgaagacgtacaggacgaggttgagcagcagcagcggccccgccacgttcctcctccccaacgcctcccacaacatgagcgccattgcctctcgatctctctatctgaggtgctctcccaaatcctgaaacgatcggtcaagcagatgatctcccgatctctatctgcaacaaccaaaagaaactactacttacgaatacttagtagtttactagacaaggtagtagacaagtagactaca

SEQ ID NO: 33552 - DNA, 366 bp, Setaria italica
  Peptide Sequence Number=SeqID_99526
gaccttggccgccgcgccgacgacggccgccagcagcgcggactggatgaactggagcgccgcctcgtcgcgcggccctggtgagtagtattgcttgtggtggccgtcgacgaagctgttgagcgcccaactggcgaaccccatcatgaagacgtacaggacgaggttgagcagcagcagcggccccgccacgttcctcctccccaacgcctcccacaacatgagcgccattgcctctcgatctctctatctgaggtgctctcccaaatcctgaaacgatcggtcaagcagatgatctcccgatctctatctgcaacaccaaagaactctcttcgatcttgtgtttctgcaggtgtgcagtgctca

SEQ ID NO: 33553 - DNA, 425 bp, Setaria italica
  Peptide Sequence Number=SeqID_99527
gcagtactatcagcagcattacttgtcagtttcttgactttcctggttgcgaagcatgtgttcccagagctacagaaccctgccccataggttgcccagcagcaggcaactgggatgctaataccacattatcagatctaagcattgttggctgttgttttatggcatcttgaaaactgttaactgggccaccaggttgatgtagaaattgctgtggcggcgcaagatgactcgtaggtctgccagctgaagtttgaacatgatgcccagcatagccatagccaggaacatgctgctgcatatatggctgaccatgaggttgtgaaggttgggaatgcaagtgttgttgtgatgagggtattccttgctggtatggctgaccttgtgaggaaacatatgagtgaggaggcaatccttgcagtgat

SEQ ID NO: 33554 - DNA, 1025 bp, Setaria italica
  Peptide Sequence Number=SeqID_99528
agcaagcatttgttcttgttggagcttcttgatctacacgggatgagatctttttaatgggattggagggagctaatcagactcaaacattgtatggaatgtgagttggccactttgatcttgtagagtttgtcctcaaggcaatggaaaagttttcactagttctgttggatcatggaatttatagagaactggatcaaaaattcagattggactattgtcagctgtggaaagcattgatactgttggatacaaaaacaattctggagttaggcgagcagttcggtgttggcaaatatgcaaagtactttcctgtaatattcacaggcagaaccctggaaagcaaatcagctcttggcacacaaatgtctagtgaagagcagaggcgtttaaaggaggacttgagctctctgggaatggatgatatatcttcatttatggaagccttgccacgggacttttatgtcatactgcgaacagatggactattgaggtccattttggggaatcttggggcgccacgccatgttcggcttctcacttatgcaaaatgtgctatacatgggctcgagaaacagcccaaactggagtctggtgcaattaaccggatgttcttgcaagtcaaaacaaatatcagctatctccatctgagggtacttattgaaatagcgggattgttagcaaaagtaaatgatgcaaggcacaaggccgtgagcaagctcagacagatgtttcgggagatcagtcaaggccttcatctccttacataatgccctgaagtgtgtcaatggtggtggaggaagtatgcaggagtcaaatcataactgcaattgcggattggatgtgtatcttgtatgattaaatcatacgtctgttgtaacatcggggcagtgttttgccaatactgtgggccctgtacatgtcagctcaggcagcaaggaattgtattatgattgaatgctgtcgtaagaaccaaaaggttgccacagaagttgtacattagggcaagagcaatgtttatagac

SEQ ID NO: 33555 - DNA, 342 bp, Setaria italica
  Peptide Sequence Number=SeqID_99529
acgaccgaagactgccgcggtggaggctgcgtggcatgtgggagctcgcctccgtcctcaacttcctccacgttttccggccattgctgaacgttgccgtggagttcactgcagaggagctggaggacgcgatcataacgtccaatggcacactggatgacgtgcatatgcctctgttaaagtcaattcctcctgtatctcgaatggccatgggacgtggaacatgggtaacggtgttatgtaaaaaattgaagcactggtggcattgggttgcagaaggcgatctacctattgttgcctcgcatggagcgggaaattgaacgttttacaggacacttgaat

SEQ ID NO: 33556 - DNA, 319 bp, Setaria italica
  Peptide Sequence Number=SeqID_99530
tcttgtcagatgctttgctgtatgagccgaaatgatctcggtcattgctgttgtatgaactggctcttcttgatggagtaggagatatagattgccttctacctctccgattcatgtccgatccactgaaagatgaaggagatccacccctagaactggatactggacgatctgacagagatgtgcgcaggttcgaaggtgcttcaaaagagaaaccagggtcacttgactgaacaccttgaaggtttagcgaatatgacctgtgactagctttaactggtgaatttctccttcttccgtttgaaattggatcaactta

SEQ ID NO: 33557 - DNA, 105 bp, Setaria italica
  Peptide Sequence Number=SeqID_99531
cttcagtccaacgatggtctggaagagacctctatgaacagatagttgctgagagggctggtgcaccagctgagtcagcgaaagtttaatgatctccacattcag

SEQ ID NO: 33558 - DNA, 590 bp, Setaria italica
  Peptide Sequence Number=SeqID_99532
caatatgctgatgctgtgattgaagttctgccaacccagttgattcctgatgacaatgaaggaaaggtgctgcgtgttaaattgatcatgaaagaaggcgtgaagcacttcaacccagtttacctcttcgatgaaggatcaagcatcagctgggtaccttgtggaagaaagctcacatgctcttaccctggcatcaaattgcccatccatctccagcactgatacctcatggccaaagtaagtgtccgggccatatgcaactttgatctcatgtatgagcaggtgaaggcaatcaaagaaggccagacaattgagaagccaatctacaaccatgtcactggcctcctcgacccaccagaggttatcacgcccccaaacgatttttgttcattgagggcttgcacccaatgttcgatgagcgtgtgagggacctactagatttcagtatttacttggacatcagtgatgaggttaagtttgcatggaaaattcagcgggacatggcagagcgtgggcacagccttgaaagcatccaggctagtattgaagcgaggaaaccagattttgatgccttcatcgatccgcagaag

SEQ ID NO: 33559 - DNA, 2344 bp, Setaria italica
  Peptide Sequence Number=SeqID_99533
tgggtaccttactagatttcagtatttacttggacatcagtgatgaggttaagtttgcatggaaaattcaggtcagctgaacagaaataattatatttttcttgttcctcatgagtcataaaagggacttttatgctgttttctatcatctaaaatatatcaccgatactttggcagcgggacatggcagagcgtgggcacagccttgaaagcatccaggctagtattgaagcgaggaaaccagattttgatgccttcatcggtacagcattctgtcaactttgtcttttttaattgaagtcgcaagttatgttatgatcagcctaagttgtttctggaataaaaaagactatgcaacaaaatgctacatcaactaatgaaattcaaactcaacaaaatgaagacatgttaacgcttaccactcggtgtgacagatccgcagaagcaatatgctgatgctgtgattgaagttctgccaacccagttgattcctgatgacaatgaaggaaaggtgctgcgtgttaaattgatcatgaaagaaggcgtgaagcacttcaacccagtttacctcttcgatgaaggatcaagcatcagctgggtaccttgtggaagaaagctcacatgctcttaccctggcatcaaatttgcatatggcccggacacttactttggccatgaggtaattcatctctgtttatttgtcttcttcagtcaggaaaaagtttgtctgttacttggtaaactaacttgacacctgataactatctagctagtagttcaaattaggatttaaaaaaaagaccaaaccacttttaaaactagtgatcaagaatttccttggctgacaaactaaactgttgatcagtctctacctgacccaaagtttttagagttagcatttgcttgatgtattcaggtatcagtgctggagatggatgggcaatttgacagactagatgagctcatctacgtggagagccatctaagcaacctctcaactaaattctacggagaggtgacacagcaaatgctaaagcatgcagacttcccaggaagcaacaatggaacaggtctcttccattgttgcttcctgggaagtctgcatgctttagcatttgctgtgtcacctctccgtagaatttagttgaggggaggttgcttagatggctctccacgtagatgagctcatctagtctgtcaaattgcccatccatctccagcactgatacctcatggccaaagtaagtgtccgggccatatgcaaatttgatgccagggtaagagcatgtgagctttcttccacaaggtacccagctgatgcttgatccttcatcgaagaggtaaactgggttgaagtgcttcacgccttctttcatgatcaatttaacacgcagcacctttccttcattgtcatcaggaatcaactgggttggcagaacttcaatcacagcatcagcatattgcttctgcggatcgatgaaggcatcaaaatctggtttcctcgcttcaatactagcctggatgctttcaaggctgtgcccacgctctgccatgtcccgctgaattttccatgcaaacttaacctcatcactgatgtccaagtaaatactgaaatctagtaggtccctcacacgctcatcgaacattgggtgcaagccctcaatgacaaaaatctttgggggcgtgataacctctggtgggtcgaggaggccagtgacatggttgtagattggcttctcaattgtctggccttctttgattgccttcacctgctcatacatgagatcaaagttgttcgcccttgggtcgagggctgtcacacccttctccttcctcccggttctgtccaaggaatggtagtcatcaaggcatatcacggtcgtggtgtcactgatgagcgtgttggagtccgggttcccgcccttgggtggctctgcggcaccaccaaacacactggtgagccggcgcatgaaggtactcttcccgcatcccgagtctgctgccaggccaatcaccactggcttctcgacggagcatgaaatctggaaggttcttgcccctccgtgccttctgccgcctctcctgttgctggtgaagaagatgacttgcttctgcctgaagcctgcgttcgagacggttgtgcatggggagtgcagagaggtggtggtgtgcgcaggcttcaggcagaagcaagtcatcttcttcaccagcaacaggagaggcggcagaaggcacggagggcaagaaccttcagatttcatgctccgtcgagaagccagtggtgattggcctggcagcagactcgggatgcgggaagagtaccttcatgcgccggctcaccagt

SEQ ID NO: 33560 - DNA, 931 bp, Setaria italica
  Peptide Sequence Number=SeqID_99534
tttttttttaaaacaaagaaacgaaaatactatattccacaaatgaacagccaaatttacaataacgactcgtctgttcagtaagcttgggccataaattcgggttacaaatggggtaacacacacaacttctgcagtcacgaactcaatgaacatgctatgagcaactatataatatgtgagcaaactgaagaatggatgactgaggtcatcatggtgcactgaaattcttctctgcgaaatcatgcacctgtctcgcgttgtgtctacattgcaacagtcgatttgagtcctgggtctagtatgagctaaatttcccttaagatgggccatcctttctttgaaatctcattaatcttggagctaattctcttttgggtatttgcagggcagagctcagcagcatatgcattaagcttagcagctagtgttgatgtcaggagctcctcctctggcaaattcccaatcaattgaaggaggaatggcttgcgcttcagttcaaatttctgatgttctggttcagcaggatgaaacacccccaatggttggatctgtgtggtaataacgctgctgcgatccttagcttgttctttctctttgctaagagcagccaatctggcctcaatggttccattagtaaagatgacagatctgtactggttgccaacatctggcccttgcccaaacacctcccgtggatcatgacttgcccagaacacatccaaaagctgcctgtagtgaatcagccggggatcatactcaaccttgacgcactcggcgtggtcggcgaggttgcggtactcgggattggccttggagccgccggcgtaaccaacggaggtgcggatcacgccgggaaggcagccaaacgccgcctccgacctccagaagctcccagcgcgaacaccgccgtggccggcgctcccccgcg

SEQ ID NO: 33561 - DNA, 863 bp, Setaria italica
  Peptide Sequence Number=SeqID_99535
tcttgtagttctgatggtaagcatctcctagatatgaatcctggctctcctcagggcacccagcaagtggagagggtgtcaattcaatcgatctgtcagaaacatttttccacctttggatggctacattgcttagggaacattgctcttattcttcatggtacatctgctgtaaggactttggaagatcttgctagaggactggccacagtcttgatcaggatatcatccttcttccactttttcgtctgtagacaagaaaggatgctagaaaatgtccattcttgtgctgacgcagagcaagcaaagcctcaacctgtaagagaagaggacatgagtgcttctttacaacgccttgaaaagctcgagtccctgtgcaatcatctaatgagcaaacctccagatatgccaaaggataaagaacttgtactgtttcaggctttcgatcggataaaatcccttgaagctgatctggagaggactaaaacagcgttggaggctgccgtggcaaagcaaatggaattggaggacagtgtggaagctctgcagcaccggtcggctagtgttgttaggaggagattgtgctgttcataaaagtaggatcatctttacgccgtaagctgtctggattaactgacgaacctgaagctgccggcgccaattttgactcagttcttctcaaccctcagaagaggctacccgtcaatccgtcatacagattgagtctgaagaagcacggctgctgctggcgatggaaaaagattcaggcttcgctttgtgacttccaagtttcagttcatggcaagcagtctagactactgtcacaccaacatgatctttcttttttggcagatctatattat

SEQ ID NO: 33562 - DNA, 220 bp, Setaria italica
  Peptide Sequence Number=SeqID_99536
ggccaacaccaacaacagcatcatcagctactacaggagagcaacaatccacccatcgccatcatccgtttcaaatattctttctttctcaacatgcatgattgctcactcctaatgacaaggtgaacaagcacatatcatgccaccaggccatctagtaaactcgttctgcagaatcttggtgctcgttcagagcaatgttcatgcgagattcgatcag

SEQ ID NO: 33563 - DNA, 747 bp, Setaria italica
  misc_feature (9)..(9): n is a, c, g, or t
  Peptide Sequence Number=SeqID_99537
ggcagttcnctttagttttttttttgttataagcaacggtcactagtagtagcagcagcacgtaaatggtagtagtagatacatcaggcagggcacgtaaggtgacatgccaaaccaatgggctaagcgctctctctccatagctctcacctcacacacacacacacacggctaagccaatcacgtgacgatcttcacttactactaacaacaagcagcattacgttacgtacgtacgttacacctgcagcagcagcggtggcggcggctgctgcgaacaaacagagcactcgttgaagcatgaatgggagggacggcggcggccggtcgccgtcggtcggggttgggttcaagaggaggtggcgatgcgcggctcccagaagaagagctgcccacggagctggttgcaccggcgcatgtggttgagcagctcctccttgctgctgcgccgcttcgccgtcatcaggagcttgttctcgccgcacgtggcgccggggacgacgtcctcaccattgcacggcggcggggcggtggcactcaggaccgaggccgcggccagcgccgcgacagccgtggtggtggacccggtggagcgcctgctgtgcttgggcgagtgctcctgcggcgcggtgggggcggcgccggcgttgatctcgcaggtggccgctggctcggcgcccacgaacttgttgatgacgagcgaggagcggcgcacgcgcgggccactcccgctgcgcgcctgcggct

SEQ ID NO: 33564 - DNA, 171 bp, Setaria italica
  Peptide Sequence Number=SeqID_99538
ccgacctccacaagacagcctctgcagattgctttgacgccgaacaacgggcatctgagatctgctgcagttagaatggcatattttgctaagaagcaaactatgactgccacgcctttatcatctagtttggaggaggcaaaaagaaatgagcctgttgtcaaaatgtgt

SEQ ID NO: 33565 - DNA, 266 bp, Setaria italica
  Peptide Sequence Number=SeqID_99539
gcagaaaagaatttcccaaggaagatgctatgttcttcagtacgaagcaaacaggatcagggttttcctttttggcctttccttgttaagatccctcgaaatggttgatgaatccactgctttaaagctgtgttctccaacgaacataggatctgtgggtcgttttccagtaaaaacttcaaggagtatgattccgtagcggaacacatcgctcctgtgtgatgctcttccaagggatccataatctgctcaagaaattcgcaggg

SEQ ID NO: 33566 - DNA, 150 bp, Setaria italica
  Peptide Sequence Number=SeqID_99540
gggcgggtcagcctcggcggcgccgccgcgatcgtcgcgacgcgcgagcgagcgaggattcggaaggggcgtggggctgtgcggggaccctcgtgaccccggcggccgctgcgattctgcgaacgggaagatttggtttgacttggttcg

SEQ ID NO: 33567 - DNA, 379 bp, Setaria italica
  Peptide Sequence Number=SeqID_99541
catcagattgattctgtgagattagggaagttgcgttttttcttccttcaaaataaaaatccattcatatctaatcatttgtctgtgcatacattgtttgatttatttgtgtgactaaaaaaatctttttcccatatatgaaggttgttattcctttgagagatattgatgagatcaggagaagccagcatgctgttattaatccagctattacaatatttctccgaatgggtgctggaggattttggtgttcctccattaggatgtccagatggaagagtcaggtacaaatttgcatcattttggaacagaaaccatacatttagagcattgcagcgagctgtgaagaacttccaaatgatgatagaggctgagaaac

SEQ ID NO: 33568 - DNA, 413 bp, Setaria italica
  Peptide Sequence Number=SeqID_99542
gacaaaatggatctggtattcgaaactttacagcaagtacatgatgttccatttggttcattctttgaggtacactgtaggtggtctgtgaaaactatcagttctgattcgtgcagccttaacataagtgctggtttgtgatttcttcagatttctgtgtgttcttttatttctttatactgtggtggctatgctcttctctacttaagctgcagattaatgtagtgattttattaatgcaatagccatgcttcattttcaggtgcacatttcaagaagtggtgcataatgcaatctaaaataaagagtggtgctgtggatgagttgaaaaaggagtcaaggaaatgttagactttgcacaggcgtatatgctcaaagttaggtctcctaaccaagagaacagtgatcttacc

SEQ ID NO: 33569 - DNA, 325 bp, Setaria italica
  misc_feature (300)..(325): n is a, c, g, or t
  Peptide Sequence Number=SeqID_99543
ttaagtttcttttccttttttgtttttctttattttcttctacccattctggcagtttgactgatgtatatgtgtaaaaggtgaaatatagtgctgactctgagcaggtcagttttgtgttgttgaagatataaacaaagaaagaaacaaagagaaatctgtgccctagaaccatcagaacttgtgcagtgtacatctctctagttagaaaaggctttgtgtacaaataaaagttcatgtcctaaaaacctcgcaacattcatgtgtatttgtttagaagacaaaaaaaaaaaaaaaaannnnnnnnnnnnnnnnnnnnnnnnnn

SEQ ID NO: 33570 - DNA, 562 bp, Setaria italica
  Peptide Sequence Number=SeqID_99544
aaaagttaccaattagaaaacaagggactagaacttcttctttgacaaaaggttgtaattgccctgttaatgcagcacaatcttcaggaacatttccatgcactgcggagcagttttttagtattcttttaagtgatgactcgagttacataacagagtaccggacagatcggaaggataaagatataaatctgggccaatggcacgtcgcggatgagtatgatggtcaggtgcgagaacttaattgtaaatcaatatgccatagtccaatgtgccctccttattcagcgatgacagagtggcagcatatggttctttcagctgacaaaatggatctggtattcgaaactgtacagcaagtacatgatgttccatttggttcattctttgaggtacactgtaggtggtctgtgaaaactatcagttctgattcgtgcagccttaacataagtgctggtgcacatttcaagaagtggtagcaataaatagacaaatactaaaaataaaagaagtaggtagactagtaggaataagaaagttaagaaaaaaggaaagtaacaaa

SEQ ID NO: 33571 - DNA, 798 bp, Setaria italica
  Peptide Sequence Number=SeqID_99545
aagagggttgatccctgaaccaaggaccaagatactggtgaaagctatacatatgaagaaagatggggctgtcacagaagatcagtctgcaaatattacagggaagaatctaaaactggatccacgatctagactattccatgttcataaatagtttgctgtcagatcttacttctataacctgaacagaggattgctgggcacgtattatgtgtcaaaagattctcttctacccagtctccagatcacaatggccacaccttgggctacaataaatcatcagcaaagtgtattggcattatgtatcccagaaagttttgctcagacttttcaatgccagggtatgtttttatgtctgatacggatcaattgcaagtactgtattacaccgctcgtattatgaaggttatgtgaaatatgacagatgtttgtttattcatctgttatgcatggctgtgtctactgtctagttgttggcttgttgccaacatatgcagcagcaggtagcttcagccgctcagaagccgaaatgatggttggtgctgccagtacaatagctatgtctagacccagaaagcttaggacatgtcttgccagcctgcagttttgtactcgtagcaccaaccatctccgggttctggcccggttatatacatgatttggaatgggcatccgctgatcgattgaaaccttgaactgcttccgtgtttgtcttttaccatctatatagtatggttagtcaacggcatgcagtacacccatgcatatgattgcagtaggatgacatggcacgaccag

SEQ ID NO: 33572 - DNA, 222 bp, Setaria italica
  misc_feature (204)..(204): n is a, c, g, or t
  Peptide Sequence Number=SeqID_99546
gaaattctgttacggactggaaaagagatatcagattttcatgggttatcagttttctgtattgcttttacatcattgctaggtcaactataccgtaagcgatatctatgtgatgaagcagatagtgagcttaaatatgcccgagatcttcttgtggaaaatgatgcaattatttcatgtaagccatgcaagttgactatgganatatcagttgacatgcaa

SEQ ID NO: 33573 - DNA, 443 bp, Setaria italica
  Peptide Sequence Number=SeqID_99547
tcaaactgctccagaattaaaattcattctttgtgtagagcagccaagaatatgaggccaacttttcacagcaataccaaggactgtactggaaatctttttcgctttaagaacaaaaggatccgtttgtagttctctatcacacttgttgaaaggatccatggatacttcagcaacatcctactaccaatatgttcttgttcaatgccagccttctcccattcatgaatcctcggcttgatatcattttcaatgtcagaaagaatgataggaggaaatgacagcaaaactgatgcaatccttgggtttggaattccaatgtactcaagaaaatcaattaatggctttagatgattatcctcagagcagagaagcagcatgggaaacgactcaatgaggtaaggaaatgacacatctccatgtcccaacatgctaacaccacc

SEQ ID NO: 33574 - DNA, 313 bp, Setaria italica
  Peptide Sequence Number=SeqID_99548
gattcctgcctctctccctctctcgctcgccgtctctttcctcgcgccgccgcttcgcccagcaaacgcgcgtgcgccctcctctcatctcgccaagaaaagcaccgatggagacgccgctgtccaccaggaggatcacccgctcgctcgccgccgcggccgccgcatcagcccagaagagcgccgccgcggggacggattccgcggcccagttctccctggccaagaacgccaccgcgggggacccccagccgcgcgccgcgctgcacgacatcaccaacgactcccccatcgtcggcctcgccgcgggcgg

SEQ ID NO: 33575 - DNA, 676 bp, Setaria italica
  Peptide Sequence Number=SeqID_99549
tcctctcatctcgccagaaaagcaccgatggagagccgctgtccacccaggaggatcacccgctcgctcgccgccgcggccgccgcatcagcccgatctctttcttgaatcttgacgagttcttgaatgtgtttcccgacgatgccttctccaattttgcgcagagaagagcgccgccgcggggacggattccgcggcccagttctccctggccaagaacgccaccgcgggggagccccagccgcgcgccgcgctgcacgacatcaccaacgactcccccatcgtcggcctcgccgcgggcggcctccacggcaccgacaagacccccgcctccaccgcagccaagacccgccgcagggccccgcgccgcacgcccggctccggggaggcgctcctgcgcggccaggtcaaggcgctcctgcacaaggtcgaggaggagcagggatgcgccccagcggctctcgtcaggccagcacgcatccaggcgctgctcggggtctccaggtcgccggcccagctcctggcgcccacgccggccaacacgccgcagatcgggcccgtccccgcggccagggaaggcctcctgatgcctgatggcgtccccgtggtgccctgcgtcctcgaggaggaggaactgctgcttcctaagctgcagatcattgcagctcccctgccg

SEQ ID NO: 33576 - DNA, 236 bp, Setaria italica
  Peptide Sequence Number=SeqID_99550
atcacagaacacctgatcagcagccactgcacgctcaaagccatcgacaccaacttggaccagccggaggagacgaagaccatcaacctgtgggcatggacggcgaatcggacatggacggcgaatcaaagctcaatccccaagtgcgtctggctaacgttcaccggccgtgcacgtgatgccaggctcgagtcagtgttggtgtccaagacgccaccagaacactggcaatgcgg

SEQ ID NO: 33577 - DNA, 490 bp, Setaria italica
  Peptide Sequence Number=SeqID_99551
ccgtggtgtgttcgtcgcctcatgtgcccgtccgttgctggttcgttcctgctcgcggaaaggcggaggcagatgccatcatccggttgaggaatggagaccgcggcggcgaaggcggcccggctggcacggagcagcctggctgcggcagctccgtgcccggcggcgaacggcggcgtggtcgtcttcttcgcggcgcttgtcgccggggctctcgtcaccgcctcctggatgtatgccagcgccagagtcactccgatcagtcctgtcggtaccccaaccttagcgcacgatgccgcaacggggccggagccagcgccggctccgccacggttcaccgacgccggcacgaagagcacgaaccagacaccggccaatttcgctccaccgcctcgtcctcctgagctgccacccgcgccgtcccccgccggtgcagcagcgccagccccgcgggagtgcccggcctacttccggtggatccatgaggacc

SEQ ID NO: 33578 - DNA, 964 bp, Setaria italica
  Peptide Sequence Number=SeqID_99552
ttttctaagtcacagaaacatattttgtattcgttctaaccatacccggaatcgggttacaagtgcgccgatcgctttgctacgacttcaaacgtagcgagcagtttcatgtactgtacggtacagtactagtatgacatacacacctccatgcaccatgcagtacagtactacccacccaactgaactgaagaatgttgaccatcctacagttgcaggtgacgacttacgcgactccatcgacacggccacaatcacagcatatagaaagtacaacgggaagagatcagagcctcgatctctcatcatcgtccacagttgcagtataagaatcacgaggcctggccttccgcggcggcctcagccttcttcttggccctggagtcgctccactcgccgtaggagtaggacgcgaggccccagagcgagagcaccagcgccacgcccttctcgctgctgaacttctcgtgcaggaagatcacggcggccacctccgtgaccgggatgaacacggcgatgaggatgcccgcgagcagcgtgtgcacgcagaagatgacccccacggcgcccaggaagaagcactgccacagcacggccgaccacaccagcaccgtgtagtaccgggcctcccctagctcgaagtgcttcgcctcccttgggatcgcctggaaatccttgttcacgatcatgcccacggtgcagaacgcggtggcgaagaaccccatcaccagctgcatctctatcaccagcgcgtacgtcacggcgcgcccgccgccggcggcgcgcctgtacgcgagctcgaccagcggcaggaccaggccgtagagcgcggcggcgccgagcgtgaggatgaaccccagccagtactggcccctggtgaccccggggggccggtcggaggagacgtgcagccccagcacgacggcgcccacggtgaggagcgccacggcgttcacggacgcgg

SEQ ID NO: 33579 - DNA, 289 bp, Setaria italica
  Peptide Sequence Number=SeqID_99553
cggcagaagtatgaacctctgtggattgagggaggcgaccatggtaacttggagagattcccagtgtacgcaagacatttgaagaagttcctatcggccataaaaaaactgccagctgaaaaagaatctgcagctgagagtgaaaaatcaccagctgagaacaaaacactatctgatgatgtagctatttgcgaggttccttccatgatctcgcgaaggttggagccatcgaggaagagcgcgattcatgagcagcctatgctgggcaccggacatgtggacaaacgca

SEQ ID NO: 33580 - DNA, 1706 bp, Setaria italica
  Peptide Sequence Number=SeqID_99554
cgcgtccggcaaagacggcggcccgccccccggcagctacggcggctacctcggcctcaccaacgcctccactgacggcaacgccaccaacgagttcgtggccgtggagctggactcagtgaagcagtcctacgacccggacgacaaccacatcggcctcgacgtcaacagcgtccgctccaccgtcaccaccccgctcgcccgtttcggcatcgagctcgcgcccgtccccaacgccaccaacgacggcagcatctacctctggatcgactacaacggcacgacgcggcacatctgggtgtacatcgcgcccgcgtccgcgaacgcgaacatcaggaagccggcgacccccgtgctcaacgcgtcgctggacctctccacgatcctcctgggaaagaagggctacttcggcttctcggcgtccaccggcgttgagtaccagctcaactgcgtgaacatgtggaacatgacggtggaagtgctccacgacgacagcgcccccaagaaggctccgttgtccggctggaagctcggggtggccatcggcgcgccgtgcgccgccgcgctggcgctggggctgctcgccggcctgtacttcatgaagaagcggaagaaggtcggggacgacccgagctcggtgttcaacaacgccacactcctgcggagcatcccgggcgtgcccaaggagttcgacttcaaggatctgcgcaaggggaccggcaacttcgacgagaagatgaagctggggcagggcgggtacggcgtggtgtaccgcgccaccgtgcccgggaataacgggcagagcgtggaggtggccgtgaagcagttctccggcgccaacaccaagggccaggaggacttcctcgccgagctcagcatcatcaaccgcctccgccaccgtaatctcgtcaagctcgtcggctggtgccatgacaacggcgtgctgctgctggtgtacgactacatgccctacggcagcctggaccgtcacatcttcggcggcaaggactcgccggggctggactggaggcagcgccacaccgtcgtggccggcgtggcgtcggcgctcaactacctccaccacgagttcgaccagacagtgatccaccgcgacatcaagccgtccaacatcatgctggactcctcgtaccacgcccggctcggcgacttcggcctggcgcgcgcgctcgagtccgacaagacctcctacaccgacaagatcggcgtgccggggacgctggggtacattgcgcccgagtgcttccacacggggcgcgccacgcgggagtcggacgtgttcggcttcggcgccgtgatcctggaggtgatctgcggccgccgcatctcctgctgcaacccggccggctgcagccagctgctggagtgggtgtggaagctccacggcgccgggcgcgtgctggaggccgtcgacccgcggctggcgggggagtacgacgaggaggaggccgagcggctgctgctgctgggcctggcgtgcagccaccccaacccgcggaagcggcccacggcgcagaccatcctgcagaacctgcagacgcgctccgtgccgccgctccccgtgcccacgtccaagccggtgttcatgtggcccgtgccgctcgtcgacggggaggtggtggaggaggagggggagtacggcggcgaggagacggcggggacgtccatgtcgcacagcgagctcacca

SEQ ID NO: 33581 - DNA, 887 bp, Setaria italica
  Peptide Sequence Number=SeqID_99555
aggggaaaatggccgtgggcgccttaaagatatggaacagaagttacggatgaggcagcaatatatgataacacaagttgctcagatatatcctgtgaggcctttagatgaacaatctccagatcacaagcctggatttaccaccaacatcaccaaaacaagaaatgctggatcagggtttcaaaatggctcccaaaacagacctttagccatctttggtttacagttatcaaagctttctgtgaaaaagaccggctacttcagtgacaagacagagtttcagaaatcatctactgttctgggatatgctgcacatgtagtctccctcattgcatcatatctcaacattcctcttcgatatccgttgcgctttggaggttcacagtcatatgttcttgatcatgcacctgcagtagagccatcatctataacttcagttgtgagttctgtacatccaagcacaagcatgaggacgatggaattccctctgttttttgatggccaggagacaacaagatcggcatatgcaatattcttattaaacaaggatattgaacaacttttgaattacatcggcgctgaaagtcttggcccgagacatgtattatctaacctcaagcagctgacaacgatcgtccagtcgcaacaatacatttctagttgatggatttgaccccaaaactttttttggagttccgagtgtggttagtgcagatatggattggtgctatttttacaggcacgattcctttctcatggcacagaagactccatgtttctgctgatgtgttcatgtaaacaagtaaatgaacttgctggtgtaaaatgtaatcactgccaagtgtatagggaagatgtggattatagatgagatgctaactatcagg

SEQ ID NO: 33582 - DNA, 528 bp, Setaria italica
  Peptide Sequence Number=SeqID_99556
ataggacgcactggtatgtggtagaggtagcttagcagctagccatggcggcaacatgtgccgcagctcttgttgttgcgctgatgatggtgagctgggcggcggttctcgccgccgcgtcgctggacacgtcgccggtgccgttccaagccggcttcatgccgctgtttggcggcgacaacctcgtccggtcgccggacggccgctccgtccgcctcaaactcgatcgccgcacgggctccgggttcgtgtccaagtcggcgtaccaccatggatacttcagtgcttccatcaagctgcccgacgatcacaccgctggcgtcgtcgtcgccttctacctgtcgaacggcgacgtgttcccccgcaaccacgacgaggtggacttcgagctgctgggcaaccggcgcggccacgagtggcgcgtccagaccaatatctacggcaacggcagcacctcccgcgggcgcgaggagcgctacctcctccccttcgaccccaccctccgccaccacgcctacgccgtcgcct

SEQ ID NO: 33583 - DNA, 390 bp, Setaria italica
  Peptide Sequence Number=SeqID_99557
aaagacaaagtacaatacaagacaagaccaactgccatagcataccggcgggcatggggatgatggggtcgtgcctcggcggcggcctgccggtggccgtcatgctctgcctcaacgtggtggcggcggtcatggtgtcgctcgtcaaggtggccatggacggcggcatgaacccgctcgtcatcgtcacgctgcagcagctcacggcctccgtcttcctcgcgccaatagcattcttcaaggagaggaagtcgaggccaaagctgacgctggagatcttcgcctacatcttcgtcagtgcggcgctcggcgctgctctgcgtcagtacatgatcttcgtggccctgcgctacaccacggccaccttcgtcactgccttctccaacatcg

SEQ ID NO: 33584 - DNA, 679 bp, Setaria italica
  Peptide Sequence Number=SeqID_99558
ggtcaaaaaagttacaggtattttttttaataaagttacaaataattcttccatcactaagaagctatgatattgacacgcttaacagacatcagaaattggtaacacatggaaaggaccacctcgctaagagtgataactgataatagtcttgacacatgctaacacccacatcagtaattgaaagcacatgggcagggcactagacgaatgccacatgataactgtttacagatctctaggctctagccaacttgttctcaagaatacggattaaccaactgaatattggatagattgtccgccactgagcatctggagtatgtaatccttcttatagatttctggcagtgctaaaaacatgtccatttggtttggttcctttgcgaaatgcttgcggcggttaccacttcaattccagttaagccaagcttttctacttcagaaatggctgttactttggccttcctttggggctcttcacacaatgacttctcttgcatatcagtaccatactccacctctgcaatcaccctgccattctgagtaatagtctggaaatgatcaagagcatccttgaactgttccattgctgctgttgtggtgctgacatgctgaacaacactctgaaagcgatcatgggcatccttgaactgctccattcctgtggccattgcca

SEQ ID NO: 33585 - DNA, 107 bp, Setaria italica
  Peptide Sequence Number=SeqID_99559
tcactcagaagacattggttaactggacctaatagagtagcagtataattcgcgtcgtgcaacggtgctgccggcgagtgccacggcagtgcagcacggcgagcaca

SEQ ID NO: 33586 - DNA, 663 bp, Setaria italica
  misc_feature (625)..(663): n is a, c, g, or t
  Peptide Sequence Number=SeqID_99560
tcagcggctgcacgcgagccgcgcgccggacacggagtacggccgggccaaggtgttcttgcacaaccatcacctctgcgccgtggccacacagctcgttgcgccgccattgcttgtgctgtcactgcttgcattgtggcgggtgcaagggaaggacttctttgagggcttggagggactgggttggcttgttggatggtctgttgccatgaaggaggcggcattgcttgcggcccggtgggtcgtggctgtgtggtcggtggtgactgtgatcacgcttgtttgctacaaacgtggatggttattcgtcttgtgatcagtccttccttagcttgttttctgcctgtgtgattgcttcggacgaagctggtgtctgatgaggtggattgccggagttttggtaccacggcacaagtttttgtgtgcactgttatgttgcaagagcaatgttggatcaattcttttgaattttcttgtgtctgtccttactggagaagcaatttgagatcagattttttttttcccctttcggggtggagtaatgttacagaaaactgactggtcagtcaccctgttgtactctttgatggatatatcaatggatcacatttttagaaaacttttnnnnnnnnnnnnnnnnnnnnnnnnnnnnnnnnnnnnnnn

SEQ ID NO: 33587 - DNA, 485 bp, Setaria italica
  Peptide Sequence Number=SeqID_99561
gtttttttttttagtgaaaaaattagttaggatcgaagagagagatgtctccaccggttaagctcatcggcgccttcggcagcccagccgtccaccgcgctgaggcggccctgcggctcaagggcgtgccttacgagctcatcctcgaagacctggagaacaagagcgagctgctcctcacgcacaaccccatccacaagaaggtccccgtgctcctccatggagaccgcaccatctgcgagtccctcgtcatcctcgagtacatcgacgagacattcgacgggccggccctcctgccgaccgatccctacgaccgcgccatggctcgtttctgggctcacttcatggactacaaggtactgaaattacagccatttcttgcgattaatcccaagtaatattatctccgattttactgaactctagcaactgtacacagtgcgccaagccgctcatgttgtcggtgtggtcggagggagagacgc

SEQ ID NO: 33588 - DNA, 287 bp, Setaria italica
  Peptide Sequence Number=SeqID_99562
aaaacaagaataccaaaaactctcaagagagttcaatccagggtatatggggtctacaagctccacgtggtggatactgatgaaaggagcaattggatgagatgccaacaaaccatgagcattgcctctgatatcccactggtgaaatccatactcgcgagttaggggcacgccgagctccgtaatgcaggcatgaaggcggtcgtcacttccatacagcttggggtacctctcgatgcacacatcgagcgtccgcgcgagtgcgacggcgagggggaagctaagcg

SEQ ID NO: 33589 - DNA, 336 bp, Setaria italica
  Peptide Sequence Number=SeqID_99563
gcgcactctcagtgcacttgctattgatctttcatactgctctggccattctgattttctatctttttggcaatactgcgaagtggatgaaggcccttctgccttatcacaaattttgactcattacaccgtgtcatggataataggaaagttgataatgacagttgacccaatggcatgtcattgttcatagtagcctgagaagctgtagaaagaagactagaacaccaatcaggaactgatggagccaaggccaacttctggtcttccaaaagagctcgagccaccagagttccatgccacttgacagttctttcagatgctttcaatgcagtt

SEQ ID NO: 33590 - DNA, 335 bp, Setaria italica
  misc_feature (292)..(292): n is a, c, g, or t
  Peptide Sequence Number=SeqID_99564
aattcaggatttagctctttcgagaaaaccaaggtgccctgtgaagtaccatttccattaacaggattactgaattctaagtttccacgaaaggggacatctttcccggtctctttattggattcatcattttgcctcatagccaatttgttaatagaaccaatactggtgttgtcagtttctgaagttttattcggggggcttctgatcgtcacctttaccttccctgaggtcaagggaattcggtgctgcttgaaatcggaaactatggtaacagatggctctgaaactntcgcaactgaggaacttggagatggatagacactggcaggaat

SEQ ID NO: 33591 - DNA, 286 bp, Setaria italica
  Peptide Sequence Number=SeqID_99565
aagaacaaaataaccgcaatactaaactcgatcaaaccgcgcacgaaaaaacccaaccgaaattcccccaaaaatttctgattccaccagaaatctcgaatcccgatgcaccccgtcaacaccagcgcatgagctttctccgcacgctcgcggacaccttctcctcgctgctcttctcgtcgggaggcggggcgcccatggacgcggcgggggcggcgccgtcgccggctgcggtggtgggggagcgcgtggcgttgaagctcaggggctacttcgagctcgccaa

SEQ ID NO: 33592 - DNA, 183 bp, Setaria italica
  Peptide Sequence Number=SeqID_99566
gccggagggaggggaggcctcgctgattttgctcgatttcgcgtgcggatttggggtctccggcgtctgatctgccgtttgatgcccggaatttggcatctctcaggggcggaggaggacgccgcggcggcgagatggtgcggggcggcgagaagcagcatttcttcccgctcaccagctctg

SEQ ID NO: 33593 - DNA, 455 bp, Setaria italica
  Peptide Sequence Number=SeqID_99567
gctgcaggtgctcttcttcgagcagctacagctccgccgcgccatcacgggcacgctgctcgcccccgccggcgccagcgccgtgcctccgcgcgcgatgcggcagcagcgcccggtctccggcgagtggcggggcgcgacggtactggcgcaggagagccaggtgctgcggttggacatggacagcgtggcgagccgggtgcaggagctggagcgcgagtgctccagcatgcgcagggccatcaagaagatcgacggcagcagcggcagcggcagcggcggccggtcgcccggaggtcgcagcgcggacggcggcgatttgtccgggcccgcggtcggcgggtggagggcgcggcacgggtgcaagttcagcacgcaggtgtgcgactcgcacgcgcgcaatgtggtggcgtccagggcatccaggatcgggatgagcccgtagcccatacgtt

SEQ ID NO: 33594 - DNA, 907 bp, Setaria italica
  Peptide Sequence Number=SeqID_99568
tcgtagtgctccacgacggtactggcgcaggagagccaggtgctgcggttggacagcggcagcggcggccggtcgcccggaggtcgcagcgcggacggcggcgatttgtccgggcccgcggtcggcgggtggagggcgcggcacgggtgcaagttcagcacgcaggtgtgcgactcgcacgcgcgcaatgtggtggcgtccagggcatccaggatcgggatgagcccgtagcccatacgttcagttgcaggactcgtcggtatcctctggtgctagcttcagaaagcacgaaaaatttcaagcaatcgcaaaccaaccgattgggaatcagcagcaatggaattgagaatgtctgagaagttcctgatcgttaaccgttggagagatccaagatctcaggtcctgcacattttcatctctgatccgtggacctgaaactgaaaggcaccatatggccatggccttccgtgccggcatgagagggctaaggatccgtgtgcattgtctgtaatgtaggaggcggtttgtaatgtagcaaggcaggttttggttcagctcgtttctaccactccattccgtgcatgtccaattgtctgctactgctccgtttgacatgttacatggatgctatacaaaggacagtcgtcgacaccggacctgtcagggtttcatcaggttgcagtacacgtgccaatcttgccaggctcaccgggaatagcctacagccctacatgacaaagcttgtgttctgaacatgacatctggccagtacattcgttggtctcgtcatcttcccctgaaccttgaagtgtgtgttggttgctcattgcacaaagcctgaattgttgcagaagcactcaatctgctatcggtgatccattttctagcctatctgacaaccacgacc

SEQ ID NO: 33595 - DNA, 382 bp, Setaria italica
  Peptide Sequence Number=SeqID_99569
cctattggttatgtgtttgagcccattcattaatgagatgctcgcttcctaactgttcctatagtaacatttcctgcatgctgttctaagtttcccttgatgttatggtatggtaatgctcatcagataaaataaatgagtgtcctcctgtttttatgtactgaacaagctctctgacttgcttccctcaggtttaactccagtttctgtgctcatttcatttttacagttaccataaggcaaacaacttgggcagccatatctggcatgccttgtttattctcgtattaattttattccttatcggtatcaatcaagcttggtagaatcaaaatatgcactagctgggatcctcaggctagggacttgcatctgtaggaga

SEQ ID NO: 33596 - DNA, 336 bp, Setaria italica
  Peptide Sequence Number=SeqID_99570
agttatgatggcatttatcatgtgccatcataagtttgtggtccattgataatatattacaaaattgatggatgtagtagaaaagcactccgattaccccatgaatccacttctagatcaaatagttgaacacaaaaatagtaaaacatggtaaacttcacatagctagcaattgtatcctcactccaaatacaattaaactactaaatatgttcctctgtgatctaagtttagagtactcaaagaacttacactttttgaatttaggtatttaaggagaccatagacctggaacaacgtcgtcctgatttgattgaagaagcaaaactgatcttg

SEQ ID NO: 33597 - DNA, 617 bp, Setaria italica
  Peptide Sequence Number=SeqID_99571
atgatttgtcatctactacagagtgggacatgatagtacagagttttcctaaaatggaaaatacaagccggatcataatcacaacaagggaagagaatattgcaaagtattgttcaaagaagcaagaaaatatatataagctcaaaattttagagagtacggatgcacttgacaccttcacaagttaggtatttaaggagaccatagacctggaacaacgtcgtcctgatttgattgaagaagcaaaactgatcttgaagaagtgtgacggacttccccttgcaatagtcaccatcggtggtttcttggctaaccaaccaaaaacagccatggagtggaggaaactaaaggagcatattagtgctgaattggagataaaccctgagcttgaagccattagaacaattctaagtaaaagttatgatggtttaccctatcatctcaagtcttgttttttgtatctgtccatctttcctgaagaccacaaagttagccgcagacgtttgacgcggcggtggactgcagaaggttattcaagggagatccatgaaaagtttgcggaggagatagctgatggatactttatggaattaataggtaggagcatgatcctacca

SEQ ID NO: 33598 - DNA, 1562 bp, Setaria italica
  misc_feature (1)..(45): n is a, c, g, or t
  Peptide Sequence Number=SeqID_99572
nnnnnnnnnnnnnnnnnnnnnnnnnnnnnnnnnnnnnnnnnnnnntttttttttttttttggttccatctcaaaaggaatatccaaaacgatccacagccttcaacacatttcataatccagaagaacaattaataacctgacaaaataaacaaccaattcgtgcgtgctcaccaaaactggcgcagttgataacacaccacagcgagcaaaatggtctataaccttagtaatgatttctctaagctgccaactaggcaatgtatctgatataagataatgcccacacagagagcaagatgcaattaaccctaggcacttgatacatcaaacggcatgtcaccatcatcttgtgcttgggctcgacgacttttgctgcttggccttctccaccagaggtttcagctgctgcttctctgcaagcatcttcaacaagttgaacaggaaagggatgtagttgtgcttcctccggatgttctccgtcttccacttcttgaacttctcttcttccatgatgatcttctcgctgacagtttcaattgctgatatcacctctgtgagcgagttgttcaaagattctgtggcggaagtcttgttcatctcctgtaaaatttgctcccttctcttctccagatcctccagctcggcactgtacacctccttcctattctttatgatggccataagattgaacctaatctcactctgtgaataacgctcgattctttcttgaatgactggctgcaccatctgtagccaatcgaggtcatcaagaccaccgcactgcccaaggtttacaggcccttccttcagcccatccagctcatagagcacaccttcaaaaggtaaatagcttatgaaatggtacacatcatcatccttagtcgcggctctctgctcatcagaaatgaatggctctggccttgcaaaactgttatgagctgtccgaatggattcgctgttgccgatggctaagcccttcagatcaggtgtaaaagctcctgtgaattccttcaattgagataactctggacctatgtcaatttctgggcggttcatgagaactgagagaatagcttgagtagcacatgcattattgatcacttggtgagcaaagaaaaggtttggattaggatctctgacaacaggtcgttcatccttttccccaggtatccacttgaagagaaaaattagcccatatattggccgcagttcactaagagagtccacatcaagagagtaaagctcttccacctgcacacctttcacttgcatttgctggatcaactcggtgaaaacaccagggtcagactcaatcgtgcaccaggacatccttgcgaaatactctaagtctcgagaggcaggcccagccggaggaggaatcgatccgagcccggatggatctcagctccacgcacgcaagctgagcagcagcagagggcggggagaggagggccgcgccgttggacgagcgagagcgaagacttggcggacggaagggcgtgtcgccagccggtgaggcggccggcggtgaggcggaggagattgcggcgtggcgtaaga

SEQ ID NO: 33599 - DNA, 376 bp, Setaria italica
  Peptide Sequence Number=SeqID_99573
ttttttttaaatttaaattttaattgttcatcttttattcgtgtatagctccatatataaagcatccatcaatgcttttacaacgtcaatctcatgaggtccatgttacagcagtatatccttattgaaactaaggccatatcaaatctaccatacagtcgatacgacaggtcagatccaagtagtaaacaagtacctagcgtatacacctctgaaagcatgattgcagcaccatcaaaacgagtgagttcccagatccaataatgaaggtttcttcccaacaaagcttaaccttgctccttgcaatcactaatgtcttcctaaaatttaacagagaagatgatgaagcatatatgtcccatagattgatccaatg

SEQ ID NO: 33600 - DNA, 1275 bp, Setaria italica
  Peptide Sequence Number=SeqID_99574
cataaaactccgaactggatgtaattatgtatttacatagtgtactttacaaagacttgaaaagatgttaaaactatatgataaacacaaaacattcagaactcttgcctctttacaaatccctctatgagcctattatgtcacctacacctgcaaaagaaaaataaaatactctagccactcaaactggttttggagaaggggcaggcttccccttcatggccactttcacgccattgctgtccaagctccgactgcttggcctcttctgtaggtgatggtgccctccctccttggtgtcctggagctgttccaacgctgttaccacctcatccatgctgggcctttgcctggactccactgagaggcattgcagtgccagtgctgcagccttctgggccctagcaagggaatactggccgcccagacggggggtccaggatgcgaaatatgcgccgcttgcttctcaggtatggcctagcccactccaccaagttgtgctccccgtttgggcgattcttgtccagtgcgcggcgtcctgacagcatttctaggagtactactccaaagctgtagacgtcactcttggttgtcagatgacctgtcgcaaggtattccggagctgcatacccatgagtccccatcactctggtggagacatgactcttgtcaccagttggaccatccttcgccagcccgaaatcagagagctttgcattgaagttcgcatctagaagaatatttgaggtcttgaaatcacgatagatcactttagccttatcactgtggagaaaggcaagacctttagctgctccaagggcaattttcattcgtaggttccatgacagcggctggaaatgggagctccttctgaacagatgattttctaaactcccacgcggcatgaactcatagacaaggagacgctgttcatcttctagacagtagccaacgagctttactagatacgggtccgataacgttccaaggtaattcacttcagccagccattccttgtgaccctggtaaccttcctggttcagcctcttgacagcaatgaccatccctgtgcctggcctagttggggcgagtgtcttctcatcgatccatcccttgaagaccgacccaaacccaccctcgccgagcacactgtccggtctgaagtttctggtggcagtcctgagctcgttgaaggtgaaggccttgacgtttgccgactccaggatttcatcctcgctacgtggggttggaagcattgatgctgacgacgcatgg

SEQ ID NO: 33601 - DNA, 272 bp, Setaria italica
  Peptide Sequence Number=SeqID_99575
tcgctcatcactttcttaccgatcggttacacacgcaaacagggttcagatatttttggcgctgtacagtgtactcccttttctttggtggtgaagggcaatgtaaaacgcacactaatataaaattcaggatcactctaaagagatcatcttgcaactcagcacgaaaacctaaacctaaacacaacaaacaatgatcctagattcctagtaccattttctacgcgaaccctttcacccgttacacttctctttgcgcgcaatccaaggat

SEQ ID NO: 33602 - DNA, 190 bp, Setaria italica
  Peptide Sequence Number=SeqID_99576
ataccttctcgtggactattgtggacaatttcgacagcttgctggtttgagatgtgctcccataatccatctgacgcaaagatcaaaaaccggtcttgtgaactaagaactctcgaacagatagatggctctgatgtgagaacaggccgacgaagaggttcagagaggtggaaacgagctgtggacggat

SEQ ID NO: 33603 - DNA, 421 bp, Setaria italica
  Peptide Sequence Number=SeqID_99577
gggtggctctcaggtgatatgatccctgtatcctggagtacaacctgcactgaagcattgtatggcaacctataaaccctcgttcctttcatggtttgaaggttcttggggccgcttcctgtatagttgaacttgtgtggtggtgttgctgggaaatcatcggtgaacacccctggaatgttgtaatagtgtgcttgtagaattggtgtggatggcataatgaacgtcacattgttgattgttccaaccaaccttgttgcgttaatgcattttgcacatgggttgacacccacgccaacggtaaacacaagggagtggtctactgtcagtggcacattggctgggtactcctctgaattgaggctacggagggactcaacaaattttgagacgatggtggtggcattttgaggtggtggct

SEQ ID NO: 33604 - DNA, 418 bp, Setaria italica
  Peptide Sequence Number=SeqID_99578
ggcgtagaccacggaacgcggtggcctgccgtccagccaggccctcgtcgtcgccgtcagcggggtgtagaggtggaagccgtaggacgtgtcgtccggcaagctgttgtcgaggtaggctgacggcacggttggacccaccgtcttggctctccacgtggacgccatgtaatccgattcctgtggttgcaactcgtggaacgagttgatgaggacgtggtcggccgcgtccaggccgttgaactggttcgtcagcaggtccaggtacgcggggtagtcgctgggctccgccaggaacgacggcatgtcgcccggcatgagtcccgccggcagcccgggcagctctacgggctccccgccggcgagcggcggcctgatccttccggcgaaggtgtgcgcgtacgccacgtccaccgcg

SEQ ID NO: 33605 - DNA, 260 bp, Setaria italica
  Peptide Sequence Number=SeqID_99579
gtacaccaaattcttcaactgtgactgtagttaagagcagagagtctgtagttgctttcacatccactgtgacattcttctgcttcagctgggcctggatctcactaaagatagcctcatttttctttgtgctcgcagctgttatcgccgctccgttcgaggtgtaggtggtcagggtaaacttctggtccgtatggaagtccttgttcaggagatccctggccttcttgaccgaatagtacggaagtaagaagaactaa

SEQ ID NO: 33606 - DNA, 703 bp, Setaria italica
  Peptide Sequence Number=SeqID_99580
gtacttgacatccactaagcagctcagagcagttaaatctggttgcctgagtggaatactgactgacagtgcacagatcagaatcttgtcctgggaagtaagtggtttcggctgaaagtgatcaaaagggacagttgtatcctgttttacacactcaaagagccactccgcagtaatggttggagttcctcttttggagtaaacctcatactttggaccgcttgcaaatttgcagataagatgactcactcccttgtacgctttttctgtaaacttagcgcctaaagcgaagcacaagttcttcagcagaaatctttctctctctccgtattgtgaaatacagaatcggaagttttcaaatcctgggaatggaatgcgacagcgcaaaggagagaagataggatggcttccaacatcttgcaagcaaccctcctccaaacacgtgcgtatccattgagttgaaacaactgttgaatgagagaagtcacaaggcgtgccattccgtccatggcactcaattgtgtaatccacaactgcagattgtatatcatccaccacaacgcctccaccttctctgatccaatcaacaacctcaggtctcttatcatgagaaaatgaatttgaaaagccaaatgtttccctttgaaaacatttgatctgctacttcctgaattcactgcagatgttcctttagatttgggat

SEQ ID NO: 33607 - DNA, 504 bp, Setaria italica
  Peptide Sequence Number=SeqID_99581
tcgtgcacgtcgggaccaccgcgttggacgaaggcggggcgccggcgctggggcaggcggggacggaggaggcactggaattcttcatgttcgatgtcgacagggtgctgcgcgtcggtgggctgctctgggttgacagctacatgtgccacagcgaggaacggatgaaggtggttgtgaggctcattggcaggtttggttacaagaagctgaagtgggttacaggagagaaggctggcacagggagcacaaagacggcaatgtatctctctgcggttttgcaaaagccggcacggggttgaaatcgaatggatggatggattatttgttttcttcttgatctgaggtatgaatgtaccttctgattgttcaggggatttgacttgagaaatgagcatgccgaatagatgccgtggattaggttgattctattgtttgttcagatagcaacttaaaataaagtgaaaggagtataattgttctaacttttgttatcatgtaatg

SEQ ID NO: 33608 - DNA, 530 bp, Setaria italica
  Peptide Sequence Number=SeqID_99582
aactcttaaagatctgaatattgtatttttatccttcatgtttcaacagcagaattcattagtttttacaaatcccgaatcaagaaggtacatgacattgaccatatttataattctaaactttgctgctgattccgtgaagtccttattgaacttcaagtaaactaatgtaacttctgattcaaagaggccaaattgttttctgattctatccagttgcgcatagcatgtgatgcatacctccggacggtattgggaaaagtgaagtagcagaaaatggggtgccaatccctaacaaagatgcagcctgtgtggatccaagctcaagtgtggagaatgaaccaaatggtgtgaactgcaacacgggccagggtgaacttaaagggttcgttgttaatggagcagggctagtttgcgtgtgggatggaggcaaaacagaaggcagtggaagagttggataagatcttggggaagttgctgcagtggggaatgaagtttgttgtagctggcttgatattagttgttaaaaa

SEQ ID NO: 33609 - DNA, 407 bp, Setaria italica
  Peptide Sequence Number=SeqID_99583
cgatcagtgacccccgcaaacaagaaaagcggccagcttccttcagctccgagaaagcttcgagccagagcgggggctagaagacgatggtcggaatcttctccaggttctcttccggcgcccaccgccgctccaagagcgtcgctgaggttgtggagacgttggcccccaacatgagtaccggagagtctgacccagcagctgttcctgcagagagtcctcacggtattgaggttggcgttgaattcaagccggtggagcgccctgtggagcctgtcaatcttgatcaaccagtgaaatgcccgcttcctgagccttctatactgcatgatgggaggatatggaaggaaaagttgtcttcagttagcgtgagggtgaggactgacttgccgatcgtgcaggaaggg

SEQ ID NO: 33610 - DNA, 441 bp, Setaria italica
  Peptide Sequence Number=SeqID_99584
gaggagaactcggaggcgtggttgtcttacgatgatggcgcccggcacgcccagcttctccacctcccactcgaacgtcacgccgaacttggactcgctggatgtcagcgacggcagggacgtcagccactgctccaggctcgcctccgcgcacaccttgccgcggttgccgttgtttgggtcgacacgggggagctgatgagctggcaggtgatgccgcggccgaggaactcgccgatgttgtcgatgacggtggcgcccatgctggtgacgtcaaagccgaggacgctcttgcgcatgagcaccaccgagccgttgagccggccattcttgttcccggtcagacccccgatgatccctccgaacatcttcgcttcacctagtgcctagctgctagcctgctactacgttgcttagcacagattgcagttgcaggctttg

SEQ ID NO: 33611 - DNA, 221 bp, Setaria italica
  Peptide Sequence Number=SeqID_99585
aacggcgacgcgaagggttggcgtgccgttgccgtcgccggagccgccgccggcggcggcggcggcgggtcctgcctctgctcctgatgctgctccgcggccagccggtcttccacctgaggagcaggggacgagagctctcggcgtcagagaggagggaggacagctcgtgtgcgattgaagaagagaagagaaggtgagaacggcttgggggtccgttt

SEQ ID NO: 33612 - DNA, 404 bp, Setaria italica
  Peptide Sequence Number=SeqID_99586
tgaatgaatttttcttgaattttttttatacatggtttgctttctaaatttgggagagtagacgcggggagaaatgcctctaaattaggccattttctggtccagctctggatggatggatggatggtttacactttacacggatggttttgttttccttgtggtccaccgctgcgattacaagccatacacgacgctgcctgcagctggaagtaattaagcagcttggctctagtactcccacagcagcggctcctcgagacggaacacgccggcgccggcgccggggaagcacacgtcgtcgtcccacgatgcggcgcacgagagctggcacgacgagggtccgtgtctggtgaggtcgaggaggaggtcagggaggtcgaacagcgcgtcgtcggggttgc

SEQ ID NO: 33613 - DNA, 342 bp, Setaria italica
  Peptide Sequence Number=SeqID_99587
ccttcgtccagatcggtcggttatgtaggggttgggtttgggttcatggcaggcaggggtctacatgagacctgtgtagtaccatttgaatgcacaccgcctcacttcttgactgacatttatgcgttcttgtacggttgtaactgtgggctgcaaatttttcacagggccgaattaaccatgggatgatttaccctcagattagtagtgtaggctggggccataactccaaggatagagctgttagagtcatcgggcctgctcagattttggttccgtaatgtgttgttttgggttcgtattagaactccatgatttcgcgtatatcaccatgttttggcg

SEQ ID NO: 33614 - DNA, 238 bp, Setaria italica
  Peptide Sequence Number=SeqID_99588
cgaacggccagggaggcggcggggccaggaacgacgaggcgacgcggctggagcgtgcaatggcccaagcattccagagcaccgctgagctggccaagaaccttcccaccggcgccgtgctcgtcttcgaggtgctgtcgccggtgttcaccaacggcggtaagtgccaagacgtgaaccgtgtcatgacggcctggcttgtggggctctgcgccgctgcgtgcttcttcctctgctt

SEQ ID NO: 33615 - DNA, 148 bp, Setaria italica
  Peptide Sequence Number=SeqID_99589
gtaaccccatctataatttgacaaaaacaataaaccaagttggcctgtggcagagtatcagaaagggacatcgataatttctgcagacttaaaaattaatgtgtatgccctatattgatggagggagagactttcttttttcagatga

SEQ ID NO: 33616 - DNA, 930 bp, Setaria italica
  Peptide Sequence Number=SeqID_99590
tgtactaccagcaggtccagactgtgatcaactcgttcgagacggtcgcagggttcagcaacgccgctccgttcgcggccatggcgctgagggccatggcgaagcatttcaagtgcctcaagggcatgatactgagccagctgaggaatgcgtccaaggctgctgccagcaaagagggattcagcaaggacatcgccatgttcgggctcgccagcggcagtgccgccgccctccagagagcaagcagcgtggctgcgttcggccagccgcacaacatctggcggccgcagcgtgggctcccagagcgagccgtctccgtgcttcgtgcttggctgttcgaacacttcctgcatccatatccaactgatggtgacaagcaaatgctagctaaacagacgggtttaacacggaaccaggtatcgaattggtttatcaatgcaagagtccggctgtggaaaccgatggtggaagaaatccacaacctcgagatgaggcaggtccacaagcatccagcccttgacaagagccagcgcgctatgcatcaccagacccagcattcttctgagagcagcgggaagccctccgatccttccgactcccagctcggccaaagcagcagcatcactcggaaccacgccatccctgcttctcagggcttcccggatgagctctcccagatgtcccactccatccagcaggggcaggtcactttcgcatacaatggcctgtcgacgccgcagcatcagcacagcctcgcgtcatcgcagcaccaccagcagctcggatcaatgagcggcatcggcggggcggggaacggtggtgtgtccctcaccctcggcctccaccagaacaacagggtgtgcatcgccgagccgctcccggcgtccctcccgcccaacctcgcccaccgtttcgggctggaggaggtca

SEQ ID NO: 33617 - DNA, 148 bp, Setaria italica
  Peptide Sequence Number=SeqID_99591
ggctctacaattaaatcaaggttcacagatgagcactttcatgcatgcaaggaggatgccaagtttgcatgggtcagagcactagattttacacctaatagctcttttggggagtgttccactcttgtcttaaaactgagcaaaggtg

SEQ ID NO: 33618 - DNA, 753 bp, Setaria italica
  misc_feature (668)..(753): n is a, c, g, or t
  Peptide Sequence Number=SeqID_99592
ctcagccggcggcgtagggttttgctcgcaccatttccaggtcagcggagcgagcgcgaagccggccatggcgccgacacaggccaagtcaggtctcttcgtcggcatcaacaaggggcacattgtcaccaagcgcgagctgccgcttcgcccgtccgaccgcaaggggaaagctactaagagggtgactttcgtcagaagcctgattagggaggttgctggatttgccccctatgagaaacgtatcactgagcttctgaaggttgggaaggacaagcgtgcacttaaggtggccaagagaaagcttggtactcacaagagagcaaagaagaagagagaggagatggcaaatgtcgtcaggaagatgaggtctggtggtggtgctgcggacaagaagaaatagattttgcagaatcatgatcctgtggcgtcctttgtttatgtgcttcattagtccctgcgaataggaattttctagccttggcaactgttttggcctcaagaacaacccagtgttctgagtaaacctatgaagttttggaaactattatcgccacatgggttctttgctgatcgcctcaatcgatttgaaaaagattccgtttattctattgcttgtgcatgacaagcaccaattagccggttgcaattcaaaaaaaaaaaaaaannnnnnnnnnnnnnnnnnnnnnnnnnnnnnnnnnnnnnnnnnnnnnnnnnnnnnnnnnnnnnnnnnnnnnnnnnnnnnnnnnnnnn

SEQ ID NO: 33619 - DNA, 1500 bp, Setaria italica
  Peptide Sequence Number=SeqID_99593
ccgcccgccgcttccaatcctagggtttttgcccgccgcgacgccgcaccgcagcgcgatggagcccacctcgtcggcgtcgatcgcgcggcagacgtgggagctggagaacaacatccccgcggcggccaccgacccggacgcgatggacgcgatctaccgctacgacgacgcggcgcaggcgagggcgcagcaggagaagccctgggcaaacgacccgcaccacttccgccgcgccaagatctccgcgctcgcgctcctcaagatggtcgtccacgcccgcgcggggggcaccatcgaggtcatggggctcatgcagggcaagtgcgagggcgacgccatcatcgtcatggacgccttcgctctccccgtcgagggcaccgagactagggtcaatgcccaggccgacgcctacgagtacatggtcgagtactcaaccatcaacaagcaggctgggaggttggagaatgtagttggctggtatcattcacaccctggttatggatgctggctgtcaggcattgatgtgtcaactcagatgcttaatcaacaatttacagagccattcttggctgttgtgatagaccctacaaggactgtttctgctggtaaagtagagattggggctttcaggacatacccaaaagattacaagccaccagatgagcctgtgtccgagtatcagactattccactcaacaagatagaagattttggtgtccactgcaaacagtactatgctttggatataacttatttcaagtcatccctggactctcacctccttgatctgctctggaacaagtactgggtcaacacattgtcttcatcaccacttctgggcaacagggattatgttgctgggcagatctttgatttagctgataaactagagcaagcggaaggccagctggcacacagtcgatttggtggtatgcttatgccatcacaacggaagaaagagcaagatgagtctccactggccaaggtaactcgagatagctccaaaatcacagctgaacaggtccatggtctcatgtcacaggtaataaaagacatcctcttcaactctgtccacccatcaagcaaggcaagcacaagtgctccagattcatccgggcctgagcctatggttgaagcctgagagttgcagtgaaacggaacgctgaaatctgagttatgtcatcgcttcagatcgtggccctttagctatctgattcagaatgcgcaaaccaagttacattttgtcaaaacaaaatcattatgtaattatgagttgccttctgtatcttgggttctcaatgagagggaggtgtgatttactggagtaaaattcacttggtaggatgatcgctatgttgatgctcacgttaatctggctcagtgccaacctttatggagtgtcaaacaagttctttataattggctagcagttagtttgagaccatggcacttgattggatttttgaagcttcatatcctgactagaggaagatgaac

SEQ ID NO: 33620 - DNA, 101 bp, Setaria italica
  Peptide Sequence Number=SeqID_99594
tcctcgtaatcacgtccaggataccggttgttgcgcttgtgtattcccatggatccccaccgacacaaccaatcatcattttctcgccactgtacatggga

SEQ ID NO: 33621 - DNA, 220 bp, Setaria italica
  Peptide Sequence Number=SeqID_99595
aatgggcatctctcaacatctgggtggccaaaaaggttctgtgatgatgctgattcactgagaaagctgccgaaaaacatttccatcctgacaagtgcaaaaccagacaagcattagcgacatagcaggatgtatttgatatagaatgatgaacactaaaactagtatatacatcagtgatactaaaagtagttgtgtcattgacagaatcatacaataa

SEQ ID NO: 33622 - DNA, 450 bp, Setaria italica
  Peptide Sequence Number=SeqID_99596
gttgggagggatgtgatctgcgtccttgcagcaatagagcttcaagtttatgcagctaatgatgctgattagtgtttactgttcacatcatcgaccatacaagaagatacacttccagtttttcaccttaatcccacactacctttgtttgttgacctggtacaaaccatctttttcatatgccctattttacccattagacactcaatatttttaaggccacaaattaaaataaaacgcatggatgattagagaaagtatagtgcccagaaaattacatttcatttggaaatgtcttgctgaaaagtactgataattatatattcccgtgcatttattcaagcaacatgaattttgtaagttaaattcacataataaaggtactgaaagataagctgtgatttttttgtacttcaacgtggaatgctaaataagcacgatttgcaagct

SEQ ID NO: 33623 - DNA, 277 bp, Setaria italica
  Peptide Sequence Number=SeqID_99597
cgggcgcgccggcttctgccgggccccgccatcttcactgtcgccaccgccacgcgctctctcgtcccctccgattccgatgagaaatttcaatatttgggttccaattcgcacaccatttgacactcaatacgtatgctttccaaaattacgcgaattctttcagttcaggtgttttcttctccttttctctattttctttcttcttttgaacttccagcccatgtgagaagtcaattttgcccctaccttatcttcagaagctccgctcctctcc

SEQ ID NO: 33624 - DNA, 2234 bp, Setaria italica
  Peptide Sequence Number=SeqID_99598
acctaacagttagaatgttgcttgtcattgttgtactctccagaatttacacgatctctcattcatagggataacatggtttatgcgcctttcatgcctggtaaacagatgcagctgctagctatttcgacaattgaatcacatcctaatctgaccaaggttttcggcagctcgaaatttacaagcctcaagataatctaggcattcagaagagggaaaaagaaaagcaacctaacctagccactctcgaaactgtcatgtcccacttgccccctcagctaatctaactttgactgaagactcgtttgggacatccgttgcttggcaactttcagtctcagaaggttgcacgatttgtgtcgccgaagttccttcatcatcagaagcttctgactttcttttctcacgatcttgactgtcctgatctgtggaaacctcttcgtcgtcagcaaaggcttttcctgacttgctactctcggaagcctggctgtcctcttctgtggaagcctctccatcgttgtcggaagcttctcctgacttccttttcttgcaagccggactgtcctgatatgtggaagcatcttcattgtcaccattagcattccctgactttcttttctggcaagctggactgtcctgatctatgggtacctcttcatcaccagaagtagccttggattgactagcacacacaccattctcagtgttggtttcctcaatttcagattctcttggcttactggctgattgtggatcccggaaaactggcccgtttgaagagctaccattagtggcgcaaatcactgcatctaactgtgttctaacagaaactgccacagccattgcatggtcactgatcacagtatcactgggtgggcaacgaacaagatttgccaatgcctggtaatagcggaacagggccaacgatggtggtgccaatcccctgtcgcggcagaccttggtcgactttattgcatgtttgcaaaggttcccattcctcgaccagctacaatcgcacaatgcaaactcagaacctggattccacacgacatgggacttctccttattcttctggctgaccactctggcacaattaccttcaatgacaacatcagaatctggaatctgcaatccctggcgccatgggtttgggccactgctccactcactcctccagtaacgtgaaaagctgtcctttcctgagtattcatccagccagtagtaagaatgaacctttgtacccaacttatgaaccaaccaatctgcacgccagtaaacattttcatttgcctcattcagtagccgaagttttagcaggtgatggtaactctcgattgctgaagctacctctgcagtagccaatggagtggcctttaagatagttgtccatgccccaagtcttggaagccacagggctttgaagtagtctagaaacccagaacaatcaacaaaatcttgcagaaaggcttcaaataattcaacatcaccacttcctctgcatatactggatattgcatctccaagaaatttagccatggctgaacgcttctcattgtctgaacatttattaaccaaattttatgccaagcatgccggatacgccacaaactgatcagaaccgggcactggaacacttcccttattgtgcgaacatctgccaagggatcatcaataataaagccacccaattgccacgtaggatcttttgtgtgagctcgatcataaagagcgcccatccatttatatatttcaccatgtgcaaaattaggagttataatccaggcaacaggaattgcatttttctgctggtcgaagacaaggatgctgtgtacaggatactttagcttatttgttccaaactttgaatcagaagccagtaaactatggctgccaaactgaatcatttgctgtagctgccaatctgtctgaatgcccaggacaaaggtgtccgtatctgaaaaatcttcatagaaaaatacgcagtcctggtgattttcaacccatatgctaatactaatagactactcacactgagtcggagaacgcagaatttcctttccagtctcctaacatatctgtgagtaagaagatcatctctatatgatctccttgcttttcaaccattttagtatgcctctgcattatggtctccacaggaataccaacatagagcaaagacatgacttgcagacgaagctcatctgatatgtatggtgcaaacattgcctttgcac

SEQ ID NO: 33625 - DNA, 714 bp, Setaria italica
  Peptide Sequence Number=SeqID_99599
agtacgaaacccaacaccctccgccgcccacaaagccgtcgccgcgccgccgagtacgcgctctgctcccggtgatccccttcctccaatcctcattggctggggcgtggaggcgtggattggaccggggatccgtccgtacttggattggtttcttctttcaccgataaggagccctagcttatagagattgtggccaaccggaatgtccgaggtaaacccaacaccggcaacagaggatccacctccattagtgaatggagaatttgctgcttcagataagaataataatgctgagaagttcgggcctgaggagagcagggaagtagcagtgactagcaacaatgctgatgaagtgaagaatggctgtgaaaatggaactgagggcgcagcagatgaggtcgcaaatattgtagaggctgatgattcgaacggaggtgattcaggttgtgctaatgtggtggtcgctgaagatgttaaaatgattgacacacaacatgaagtcaatactgaaggtgcggatgttaaaatggttgatacacagcatgaagccaatactgaagcggaggatgtgaaaatggttgacacacaacatgaagccaatattgaagctaaggatgtgaaaatggatggcacacaagatgtaaaaatggttcacacacagcatgaagccaatattgaagctgaggaagatgcgtgtcaagataaggaagg

SEQ ID NO: 33626 - DNA, 743 bp, Setaria italica
  Peptide Sequence Number=SeqID_99600
agcttgatctcctgggtgatcctttgcagtacagcgtatacagagaggaggcgattgatgccatgatatctgctttggagagcagttcacggagcaaaaaggtccaagaacaatgtgctcgtgctcttttaatcttggccgggcggttttcatcttcaggagaacccatagcagaagcatggctactaaagagagcaggcctagacgattccctctctgaatcctttaggagaacggagatattcaaagataagagtgttcgagcagaagaagaaaaggtggttgaagaacggctgaagaaacttgccttaatgttactaaacagcgggggcaaaaggttcctcgcggcactgtcaaactgcatatctgatggaataccaagtctaagtcggtcctgcctcatcaccgtaacatggatgagcagctccctgtcaccactgggtggatgcaacgatttccagcctctagcatgctccgttcttgcaccgaaccttttagatagcttaagctatgacagagttttggaggagagggtgcttgcttcactgtcactgctgaatgttgtgagacatccagaatgcatggagaaggttttcccactgaagaaagacacaatcgagtcattgcaagatcttgcagaagtgacgtggactgcaaaggagctcctcttcgcctgctgcagatgacatgtagggtcggatcctcagtgatcaaaactacactctacactccatcatgtaatt

SEQ ID NO: 33627 - DNA, 167 bp, Setaria italica
  Peptide Sequence Number=SeqID_99601
accaacaagcattcagccaaaaacaacttcgtgtcacaatttactctttcgatactgtccctcccactgctctatgcctctatcagtacatagaagtgtatgtggcatctcaagataaaagtgcatctagctatcattttcttgatatagctgctggatgtgtattc

SEQ ID NO: 33628 - DNA, 269 bp, Setaria italica
  Peptide Sequence Number=SeqID_99602
ttatagccactgaccttaaaaatccagaaagatggggcttatcaggagcttctttgggtgatatttgactggttttgctaggagatgaggcatctttgtggatgggcttctcggcatcggttctctgatgcatcttggcagtggtaggagtggaaggctgggtgaagaagttacttttagtgctctggacactactaggtggtttctgagtggtagaatctgtctgccgtgatggtggttgttggttttggttggttttttcttagttt

SEQ ID NO: 33629 - DNA, 265 bp, Setaria italica
  Peptide Sequence Number=SeqID_99603
cggacgcgagatctcgggaagggtcatcgacgctaagcagcggtatttttgtgtcgtctggagcacagacaagatggttaatgcaatcaaggggttgttcatctcctggtaagctcctgatacaactgaaaatcaaatccataattttatttcttgttaaccacatgtttataatattcctttaaagtttttccaaacaagttacactcctgtcaatcctctgtttcccccccagtgatatacctatggcgcagttcatcattaa

SEQ ID NO: 33630 - DNA, 709 bp, Setaria italica
  Peptide Sequence Number=SeqID_99604
taaaggtaaaggtaagtaattaagtggagatagagaccaagcgggggtagcgggcggcggacggagcggcgacgccggcgagccgccttcagccttggtgtttgatccgattctggagcgcggctgaaaccggcgaggcagccgcagcggacgcgagatctcgggaagggtcatcgacgctaagcagcggtatttttgtgtcgtctggagcacagacaagatggttaatgcaatcaaggggttgttcatctcctgtgatatacctatggcgcagttcatcattaatctgaatgcctcaatgccaccatcggagaggttcatcgtgcacatgcttgatcctacacacatgtttgttcagcctcatgtggcagaaatgatcagaagtaagataggggagttcagggaccagaacagctacgagaagcctcagtgaaggatcattccacctcttccctccccccaaaagtccaaagatgtgtaccttgtgctcataatatgccgaactcctatatgggtgattggatggcgttgccatgcctcacccatgatgatctagaataataatatatatttgtgttttagtctaaaaaatctggtgtatttcagtgactttctttgtacccggattgagccttttacttgggtccctgccactttgtggcgctgataaactttctactcacacattatgtattgctgttgtgaactc

SEQ ID NO: 33631 - DNA, 396 bp, Setaria italica
  misc_feature (306)..(306): n is a, c, g, or t
  Peptide Sequence Number=SeqID_99605
atccaaacatcaaggaaccagccttccccagatgatccacaaacaggtagaattactgctaccaatggggaaaatgcctctgataaaccaaaaggcaacagaaaactagatgttcctatgcaagctacccaggaccatcatggttcatctactggtgctgttcctgaaagctgctctccctcagagtgtactgctttggataaactggaaaaagcttcgcaaacagttaaaggtgcaaacaacattgttgaagacagtgaagcactgtcaaccgttatcagccccatcaaaacttggctgactaancctccaagctcacccagggaactgaacattgatggagcaaaccagtcactcagaattattaaaaacttattgatgccggtcatgtcaatc

SEQ ID NO: 33632 - DNA, 776 bp, Setaria italica
  misc_feature (6)..(6): n is a, c, g, or t
  misc_feature (12)..(12): n is a, c, g, or t
  Peptide Sequence Number=SeqID_99606
tttttntttttntttttttgtaaacaatacagttttctatgttttgcttgtatcatggaacaggctagagatattccaatatggtacagtatcaaacaatctattgtaatatacatccagaaacaatttagtcacgtgctcagcaaagagtacatttttccagtctaaacggaaagagctttttagctctaaaattgaccaaatacatggtcactgaattagatttgctatggcgatgcacatcgtagcaactcatcctggcagcagctgctgaaagcaaagagtacccttttagtgcacctctggtgcacctatatctgtttttctggaaccaaacaactgtcttttttatactatgttagcacacatctgacatctcatccacagacctggttcaccaaaggtagtgcgctagtttcccattctgttgaccatttcgaacatgatgctgtatccatggcaccttctttgagggatttcaaggcaacgcattcttctggaaaccccttaaatagcatcataagttcatcggcaagctccgaagatgttgagaaaagtaaggaccatttttgtttacttttacaagctcctcgatgcaggagaaagaatcagataaaaaggttgaagttgcgacgtgttgccttccggacgatgtggctcgcaatagaggactaccctctattgcttgggtcagctgatctaggagtatcgttgcatacatcttcgtcagggctggacctacctatgaaggtggttgatatgtttggatgtggatt

SEQ ID NO: 33633 - DNA, 1703 bp, Setaria italica
  Peptide Sequence Number=SeqID_99607
ttttatttttttgtttttttgtatcttacagatttaaacgcaaggaaacaatacagttttctatgtttttgcttgtatcatggaacaggctagagatattccaatatggtacagtatcaaacaatctattgtaatatacatccagaaacaatttagtcacgtgctcagcaaagagtacatttttccagtctaaaacggaagagctttttagctctaaaattgaccaaatacatggtcactgaattagatttgctatggcgatgcacatcgtagcaactcatcctggcagcagctgctgaaagcaaagagtacccttttagtgcacctctggtgcacctatatctgtttttctggaaccaaacaactgtctttttatactatgttagcacacatctgacatctcatccacagacctggttcactaggaccgacagggcatgcagtaccactccctctcactcgccaaccaggctggcatggaagtggacattgttgcaaatggaggaagtgatcctcacctgtcattgagagagaatccatcaattcacatccatgagatgaaaacagtgaagttaacaggaatttcaaagatatctggtgccctggcacttctacttaaagctgctgtccagtttgttttgctggtttggttcctttgttttaagattcctcggcctgatgtccttcttgttcagaatccaccctctgttccaacgcttgctgctgtaaaactggcaagctggctaagaggtgctaaatttattgtggattggcataacttcggatatacattgctgggattatctcatggcagaagtcacatcgtagtcaaaatctatttctggtttgagaagcactttggacagatggctgatggcgctctttgtgttacaaaagcaatgcagcatgagcttgcccaaaattggggaatcagagcgacggttctttatgatcaatctcctgaatttttccaccctgcttcgatgatggagaaacatgggttgtttagcaggttagggaatgccatttgtagtgctatgggcaatgctgattgcatatctgtggagaaagaagtggaagacatcaacactaatgtctttatcagtaagattgatggcgaaattgttttgaagcctaacagacccgcacttgtcgtgagcagcacaagctggacaccggacgaagatttcagcatacttctggaagcagcactgatgtatgatagacgtgttgctgcaactttaggtgaagatgattcaatggatgaggggcaactttggactgatatcaagaagggaaagcaatttgtctacccaagattactgttcattatcactggtaaaggacctgataggaagaaatatgagaatcagataaaaaggttgaagttgcgacgtgttgccttccggacgatgtggctcgcaatagaggactaccctctattgcttgggtcagctgatctaggagtatcgttgcatacatcttcgtcagggctggacctacctatgaaggtggttgatatgtttggatgtggattgccagtttgtgctgcttctttctcctgcatcgaggagcttgtaaaagtaaacaaaaatggtcttcttttctcaacatcttcggagcttgccgatgaacttatgatgctatttaaggggtttccagaagaatgcgttgccttgaaatccctcaaagaaggtgccatg

SEQ ID NO: 33634 - DNA, 774 bp, Setaria italica
  Peptide Sequence Number=SeqID_99608
aatcaccactgcaacaacagcaacaataagaactccttcggatccatttgcagactttgagcagcgggagcctgagcagttttctggattcacagattgaggcacttcccgtgtcttgacagtaccatctggtccaaaaggctcaggcttgctgggtttcaggccatcctctgaagaagggcaaagctctagcaaactgaagccaactccacagagccctttgttattcatatactggaaaccaccattcattcttctcaatccaacagggacactcccagaaagggtgttattgcgaatatcaaagacctcaagcaatggaacctcagcaatcttcgatgggattgagccaaacaggctgttgaagctcaaatcaagccgtctcagctgcgttagctcaccaagggttgccggaatggctcctgtaagctgattggactgcattgcgagcacagttagcttattcaggttgcccaactggggaggtatgctgcctgtcaactgattgtaacccagctgcaacactgcaaaaggataagacaataatgtaagttaatctatttcttcatattgcaaatcagcatttcgatgcccaaatgccaaaaatcatctgcttgtataaactctcatgatagactataacctggggtggtatgcagctatgatgtgaacttgtactatagggtataggctcttgggagtaagaaatgcatgtgcaagttaataaataaaccctgtggcagcaactaatgtttgaactgttggccacttgaa

SEQ ID NO: 33635 - DNA, 190 bp, Setaria italica
  Peptide Sequence Number=SeqID_99609
cagctgcgccccggccgccgccatccgcgcggcggtggcgtcgcccgctcggaccggtccgcgcgccgggatctcactcgtcagcttcactcccggcggtgggacttcggggtccggagactctattgctctcggagcttggacgccggccaaggctggccaaccccggcggagaaggaagcgtaggtcg

SEQ ID NO: 33636 - DNA, 240 bp, Setaria italica
  Peptide Sequence Number=SeqID_99610
aaaaaaaaattagctgccttagcaccacagtccacagccacatgagcccttaaacattttggtaatcacagattatcacctccccacaagcaagactcacaattagtccaaagtaatatcatcagcccaccgggcccatgagacaataaccataacgattagttatttgatgatttcacttccgttccgtgtgcgccgagacgtcgccatgcgccagcaccatcctcccagggctccgct

SEQ ID NO: 33637 - DNA, 221 bp, Setaria italica
  Peptide Sequence Number=SeqID_99611
cagggaatgaggaagaagggagagcagagcagaggaggtggggtgttgcagtgtctgggaaggttggtgtataatttggactgcctctagattttcagagcagcaaaacttgatcggtgcatttctgtgttgtgtatgagaagcagagcacactcaataagcttgttgtccttttgaatcatacaacgactgcaagcaatgattttgcctttctcaaaaaa

SEQ ID NO: 33638 - DNA, 597 bp, Setaria italica
  Peptide Sequence Number=SeqID_99612
tgtcacggccttaaacctgccatggcgtgatgctcttgctgttgttgctgaggtcttgcatccagcaactccagtaatttcttctggcttaacttgatgcaagacctcagcaacaacagcaagagcatcacgttaagccagaagaaattactggagttgctggaaaactttctgatgcagaatccatgatggctctgaaagattttgttaacagaatgggttcagacaaggtcctctgcgagggaaatggtccgaatcctccagcagatctgcgatcgaactacctgatgaatacaggcattgctgggcttgaaaaagctgatgtcttccttttggttggcactcagccaagagtggaggctgctatggttaatgctaggattcggaagaccgttggagcaacacaagcaaaggtgggctacatcggtcctccagccgacttgaactatgaccatgagcatcttggcacaggtcctcagacccttgttgagattgcagaggtcgacatcctttctgctcagtactgcaatctgccaaaaaccctgtcatcattgctgctcagtactgcaatctgccaaaaaccctgtcatcattgct

SEQ ID NO: 33639 - DNA, 2331 bp, Setaria italica
  Peptide Sequence Number=SeqID_99613
cggagctgccgccgccgagggagcccgtggggggcgcccgggtggagcttccgcccaacccggaggacgcgctcgaggtgttcgtggacgggcacgcggtgcggatccccaagggcttcaccgtgctccaggcctgcgaggtcgccggcgtcgacatcccgcgcttctgctaccacagcagactctccatcgccgggaactgccgcatgtgcctcgtcgaggtcgagaagtcgcccaagcccgtagcctcctgcgccatgcctgccctcccagggatgaagattaagacaaacaccccagtggcgaagaaggcgagggagggtgtcatggagttcctgctgatgaaccatccactagactgcccaatttgcgatcagggtggggagtgcgacctccaggatcagtctatggcatttggtgctgaccgtggtcggttcaccgagatgaagcggtcagttgtggacaagaatttgggccccttggtaaagacagtgatgacccgttgcatccaatgcacaaggtgtgtcaggtttgcaactgaggttgctggtgttcaagaccttggtatgttaggtcgtggcagtggtgaagaaattggaacatatgttgagaaacttatgacaagtgaactatctggaaatgttattgatatctgccctgttggggctcttacatccaagccatttgcatttaaagctcggaactgggagctgaagggcaccgagactattgatgttactgatgcagtagggtcaaacataagagttgacagcagaggtcctgaagttatgcgtattgttccacgtatcaatgaggacatcaatgaggaatggatatctgacaaaacgcggttttgttatgatggtctgaagaggcaaagactaaatgaccctatgattcgtggtcctgatggcaggtttaaggccgtgacatggcgtgatgctcttgctgttgttgctgaggtcttgcatcaagttaagccagaagaaattactggagttgctggaaaactttctgatgcagaatccatgatggctctgaaagattttgttaacagaatgggttcagacaaggtcctctgcgagggaaatggtccgaatcctccagcagatctgcgatcgaactacctgatgaatacaggcattgctgggcttgaaaaagctgatgtcttccttttggttggcactcagccaagagtggaggctgctatggttaatgctaggattcggaagaccgttggagcaacacaagcaaaggtgggctacatcggtcctccagccgacttgaactatgaccatgagcatcttggcacaggtcctcagacccttgttgagattgcagagggtcgacatcctttctgctcagtactgcaatctgccaaaaaccctgtcatcattgctggagctggattatttgaacgggaggaccaagatgccctattctcaacgattgagactgtagccaagaagttcaatgtgacaagaccagactggaatggccttaatgtcctattgctccatgctgcgcaggctgcagctcttgatcttggccttgttgctaatcctgctgagagcatcaagtcagcgaagttcttgtacctgatgggagctgatgatataagcctagacaagcttccagaagatgcatttgttgtttaccagggacaccatggtgacaaggctgtctatagggccaatgttattctgccatcttcagcattcagtgagaaggaaggtacctacgagaacactgaaggttgcacccagtggaccatcccagctgttcctactgttggtgatgctagggatgattggaagatcattcgtgctctttctgaagttgctggggctcagctgccttacgacagtctctcagctgtgagggaccgaatcagtactgttgcgcctaatctcattcatgtagatgagaaggaaccatgcacaatttctgctgaggtgaagccgccagtaaagcaacaagtgagctcaaccccgttcaaaaccgtcatcgagaacttctatatgactgatgcaatcacacgagcttcaaagataatggcccaatgcagtgcgaccttgttgaagaagtgagctctgctccccttcaagctaatcatcggcaaacagcatcctagttcccttttttccttgctacgagtttcaccacccgttgcttgcttggttgggaggttggtgtataatttggactgcctctagattttcagagcagcaaaacttgatcggtgcatttctgtgttgtgtatgagaagcagagcacactcaataagcttgttgtccttttgaatctacaacgctgcaagcaatgattttg

SEQ ID NO: 33640 - DNA, 2339 bp, Setaria italica
  Peptide Sequence Number=SeqID_99614
gatactgatgataaggtagctaaagtgagaagcactggactatctacacaagctgaaagcacacatgaacaaaaaagttcgcaaatcataaaatcctcagttcagcatatggttccacggattgctgaaggtggaaaccgaaacatgaccctggaagatgatggtacaccagtgtcaaagttcacttgtgtacaagaggtcagggagcaagatgcaacagtggaggacttgagcaaaacattgccaattactattgaagtgccaaaagttattgatgtgcagggagagggaaatggtattgcgcaaactaccctgcagtcaccaaggcaaagcgtaaatgtcagttggttgataccaaccaataaatctgctgcagaagatgttccagaatctcaaggttcaacaaaaaatgtaccggttattgtcttggatgatgatagtgatgagagaggcaaagagctagaaaattcagaggctcttgatcaaggtcttcataagcaaaataaaaagaattgtttagggatgattgacctgaactgtgctgaattacgacaagaagggtttctccatttgggtgacccatcaattcaaaagctgccagatcaggatataattgctagtgctcaaaagcagatgtcccaaccaattgaaaggatgtttttcacaaaggagaaagacactatccatggcaagcaacaacagcatgaagaaagctcaaccatgcatacctcgtactcaaatttctttgacctggctccaccaaggaacactgggagtttgaagagaccaaggaacttgccttcagaattgaagttcagaataatggacaaggctcctgaattcagtttagacctaagcctggatagtttccaagacagtagagtgtctgccttgaggagtgataagttgtttcttggaggcacctccagcatatctcataagctgacagaaaggcttggcacatactcctacaagaggcactcagctccgtggtcagaagaagagttggattttctttggattggagttaggaggtatggcgtcaacaattggaatgcaatgatgagggatacacggatacggttttcaaactcaaggatgcctgaggatcttgctaagcaatgggacaaggagcagaagaagcttctgacgtctgctctgggtcctgcaccacctcttcatatagcggaggattatctcggtagagcttcgtgctcaggttgctcaaagtctccatttcttggagcacaaacagacctttcattgggcgatgtctaccttagcaatgctcatgcttcagaaagaagtcggcatcatttgtcaagtttggggctgttaaaccttcatggaactgatggtgggccaagaaatctgtccctgggaggcttccctggggcttcttcctcgcatggaagaagtggcagcaggcgcaagagggcatccaagctccaaaagtcatactacgacagcaagtcaccttggttccaggaaccatcagagagggcgtctcacctctttcccatgaaccaacaaccgatcaacagccttccccagtggctgaccaaggatgcggagaccggcacaagccgaatcgaccgggagatgtggccgagcatggcactagcaccggtgcattctgctgcggatcctccgagggatagcctgagaggtaatctgttttctgatgacgtgaagccccatgtcctccctgatgcttccctgaagcgcgcgatgaggaggaacgcggattggcgctcgttcagcaagaggctgttccagagcggtgaccccttggatctgaaccgggggactgcagctgcagccatcgcaggagccaatggtgtcactcctagcgacaccggcgcgtcatcggaagagacggtgtcagacagctgagggcccgtgcttatcatgggcccttgttatacctgtacgtcatgttgcaattacatcttctagtattttgatgctggtgaagagtaggaacgaactgtttaatctgcaatgccatgccatgccagtgaataatctgattgcatcttgtaaagcagcagctgcagcagcgtatatcttgctaggtgttattttagttctctccatccatgggagaagaggttttactctgtccctccgtttcaaattgtagatcgttttagcttttttaagtttataaatattattatgcactagatataatatatctctaggtgcataataatgtctataaacatataaaagttaaaacgattgtagtcacaacgatctacaatttagaacgcggagagtatcctgtaatatctcagtcgtgtaagcagaagagatttattaccttaatttaa

SEQ ID NO: 33641 - DNA, 299 bp, Setaria italica
  Peptide Sequence Number=SeqID_99615
tcaccgccgcgccgcgctgctgcacggtgctcacgaactcctccctcaaccatttctcgtcggcgacgagctccgtgacgggcttctccccgtgctcggtcctggccgtggcgtggctggcgtccgggaactgcgtggaggagtggttcccccacacgacgacgttcctgacgtcggcgacgtgcacgcctagcctctcggcgatctggcccagggcgcggttgtggtcgagtcgcgtcaggcaggtgatgttctggcgggcaccgccggcgcgaactccttcagcatgagcgcgttcg

SEQ ID NO: 33642 - DNA, 393 bp, Setaria italica
  Peptide Sequence Number=SeqID_99616
acggccgggagcaaagagcccgccgcgagccaccgtcgccgtggcggcggcgagggcgccgggacacatccggcagccgttttcaacccactcctcccagctaatgcggaccgtccatgccctgccggttatgtcgccggcgctgctgccggcagaagcagctacgacaacgacatgtgggccaccggtagcgccgcggcgacaggcggtgctgttcttgcggccgcggacgttggccggaacgccgcggccgcggagtcggtaacgccgtcgccgacgagcactgcgagcgcttgcacggatgcgcaggcgggctgcgacgacgagttcctgaaggcgatggtcgatgacgcgagcatcctgtttggggatttctacctcaacagcaaccat

SEQ ID NO: 33643 - DNA, 1302 bp, Setaria italica
  Peptide Sequence Number=SeqID_99617
ttttttacacaaggatgggtaatttattctgaccacggaaaaaaaacaacaaaacatgttacgtccactagttacacaaggatgggtaatttattctgaccacggaaaaaaacaacaaaacatgctacgtccccaacccagagatgatatagatggaacaaagtttggattggtcgagcctatttccacaatgggtagcaaggcaaggtaatgacaaagtggaattgtatgctacgaacaactgaagatcgaggacgacgctagacggtgagaccggagccctcgaacttggagcgggtgatgtcgtcgatgcgccgcgccgtctccggtgagaggtggttcacccagtcccccaccacgccacgccggaagaagaagctgttctccaccgcgccgatccccagctctgtcctgccgcttttcgtcgcctcaagcccgcacatgcgctcgaaagcgcacagcctgacgatggcgtccgccgtgtcgtcctcgccggcgacgccgaacgggagccccacgaactccgctagccgccggacgtgcgccgcggggtccctcatcatctcctcgtaccggaagaagagcacccggtcgggccgcgccaggtgcgcgcgccagtacccgagcacgtgctcccagtacgggccgaacggcgactcgccggcgcagaacatgtcggcggcggcctcggcggagaggagccccatcccctccttggccctgaacttgtttatgaagtgccatagagagaccagggtgtccttggggtcgcggcacacgtacacgaccttgcagccgccgccggcgacggaccccggcagcgccgcgaaggggacgtgcgtggcgaagagcctcggatccgggaggtcgccgatgtcggggactctgccgtgcgcgtagatctggtactccaagatctggacgcactcgtggggcccgagggagtggaaagggtggtcggcggcgtccggagggtgctcccgccggcgcacggtggcgtagaggagcgctttggtccacgtggtgccggtcttgagcaggctggcgaggacgacgtccgtgggccgcgcggcgaagcgggcgccggcgaccatggcgccgaccatgggcacctggctggcgcgccagccttggccgtggaggtagagccgcaggtacgacaggccatcggagctcggcagggaggagaccagatcggtgaaacgctggtagagttgctggttggtttcctccgcttgcgcatcggcttcttgctggggaacggtttgcacggaggacgacatggcgagttggcgacgccgc

SEQ ID NO: 33644 - DNA, 369 bp, Setaria italica
  Peptide Sequence Number=SeqID_99618
aggacatatcctcaacaacatcaagccagccaaagatgagatatgcaccacccaaagcccatctatcagcagtaccactgcagctgctcatgaaaccatcattgcttacatgatcatttgttttcatctgcacttcatttgacttgataacctgcccagtgcttgcgtagcgcagaagcatgtcgcaattctgctcattaacacaactagatgatacaagcaagactcctaaaggaatcaacagatgcaatagattatggcatgagggaaggaagtctgatagttttcagcttgcacttgtagtaagtctagtttgttgtcttactaaaattttggtaactagtctaattctattctaaaatttactta

SEQ ID NO: 33645 - DNA, 355 bp, Setaria italica
  Peptide Sequence Number=SeqID_99619
atcatgctaacacatgaattaaaaagggcgtacacgatgctgaaagctcccacacaaggtgaggtctggggaagggaatttctagaccgacaccctagcttagttttgcaaggaggctggatcaaacccaggaccctccaggccacaagttgatacttgagaaactctaacgtgtcatgcagtatcacaaaataacatggtttaaacagtccacaaggtctaaagtctaatcaggacaatgaagagataggtccgaaacactttcttgatgggacatcatttgtttcaaaccaaacagtttcttatttcaccatgcattttcatgatttacgaatacaggacatcattcaaaaag

SEQ ID NO: 33646 - DNA, 180 bp, Setaria italica
  Peptide Sequence Number=SeqID_99620
cggagaggaaaacaaccaaaatctgaattaaaatgattggacagttggaaaccttttccacgtgctatataatttcctttgatgaatactgcattttgaatcttaaagtcatgatggacacatggccagtttccaaattaacaggcaatcaggttgatgaagtttgatgtttcattgttt

SEQ ID NO: 33647 - DNA, 653 bp, Setaria italica
  Peptide Sequence Number=SeqID_99621
ctcctgagaagaagtctgaggatggttgcagaattgaatctagccaatgcaaccacaaagataacagctcacctgatggtagtgcacttatgactggggcacagactaaatgcacgtctgcgaatagcaaatcatccgatgctgcatctgcttctgtggaaaagtccgatgctgacatcgatgacgaggatgacctgcctttcgatttgagcattgattctggctcattgacctgtgttgcttgtggaattcttggctatccattcatggcaattctgcaaccttccaaagaagcattggaagggatttcccctgttcatagggaaagatccacgctgagttttgaaaaagaaaaaattcaaatgtatttccttgctgtcctgctggtggcaatttcggatcttcctttgttcccaatagaacttcctgctctgtggaacaatcatgtctggctactcctgcggagcagactaacatcgaccctcagaatgtaaattcacataaagatatttctttaacggagaatgaacttgctggacctgtgcaacaacacagtgatagttcacattcttgcagaagtgaaaatactcttcattcatgcagtaacagggaaaaatctgataatactatacctaaagacagtcttggcccag

SEQ ID NO: 33648 - DNA, 289 bp, Setaria italica
  Peptide Sequence Number=SeqID_99622
ctcgtcctcccgggcacgtttccgcgacggcaacaccaccaccccgccgccgccgttgcacgtcagctcactctgcgcggcgctgaccacgccgccggccgggcagttgtactggtacgccttgttgcccgccgcggctgacaggagcgctagcatctgctcctcggccaacccggcgccgccgaagggcggcaggcacccggggaggccgccgaactgcgcctgcacggccatgtctacgaagtcttctccaggagagggagggagcagggggaagaggggagagacg

SEQ ID NO: 33649 - DNA, 330 bp, Setaria italica
  Peptide Sequence Number=SeqID_99623
cgggcccattgtttgaattggacgttgggtctatgactggccgatggccgtctgctgggtgtcctgaaacagtgacttgacaaaatgacgattgagaggcgtattatcacaattgctggctcaagcttcagccacacaagcaaggcatcttgaaaaaagaggacggtaggtgccctgtcctcctgatatagttggccttctctgacgtcctcgccgcactttcgttgagcttcgcctccgcatttgcccgcttctcctcggctatccgccgcgtcgcggccagccggttcgccagcttctcttgagcccgtgctttagaatactagaata

SEQ ID NO: 33650 - DNA, 297 bp, Setaria italica
  misc_feature (227)..(227): n is a, c, g, or t
  Peptide Sequence Number=SeqID_99624
caaacgtttatataatccctccggaacctaatttagttagggcataaatcatccatataacaaaatatcgatgggaacaaagatttctgaggattagtggggactggttggttcccacaagtgtactaagccctgcttggaagttggaactggatgcaaaattgtttgattgtttctctccactaatcctacagcagtaaactaactaggttcagttttgcctaacntataaccttttgctgtttacatatttcaggtcttcggcaagtcaagcagcaccaaccagtctccctttga

SEQ ID NO: 33651 - DNA, 264 bp, Setaria italica
  Peptide Sequence Number=SeqID_99625
attccccttatacttgggatctggggtggaaagggtcaagggaaaacattccaaactgaactcatatttagagcaatgggtgttgagcctgttattatgtctgctggagaattagaatctgaaaaagcaggagaacctgggaggctaatacgtgaccgatacaggactgcctcccaagtaattcaaaaccaagggaaattgagttgcttgatgatcaatgatctagatgctggtgttggaagatttgggaaaaccacacaggat

SEQ ID NO: 33652 - DNA, 274 bp, Setaria italica
  Peptide Sequence Number=SeqID_99626
cgccgcctccggctcgacgggcttgcgccgccggtcgtggtcacggtagcgcgtccgcggcctgaggaggccggcgtgacggtggagcaggcgaggaaggtggcgcgggcggcggagatggaggtggcgagggcgaggctgaggtccaacgcccagagcgtggtgtccgggtcggagttcgcggcgctctgcgccgacattgccggcggcgtggagggcgggcgcaggctcgcccgtgcgctcgacgagtccggcgtcgtcatcgtcctcggcg

SEQ ID NO: 33653 - DNA, 396 bp, Setaria italica
  Peptide Sequence Number=SeqID_99627
ccactgccaggcctgcggcgaagccgccgtctctaccgtccggtcgaagcaagccttgcatccgttgtggcttgcatgatgcccttcatgctgggggtctgcttcctgtgcccttcgatggactgcctctggcacaagtaccattactgccccagctgcggggaaaaggtgggcgagttcaggaagtccgacccgtgccttgttgtcgatgcgactcggtggtccgagccaagcttcgccgtgcctgcatagcgcacatacaccaatttctaccagaccaagaccattacctctaaatgagccagtgcattgccgttgttcttgtgtagtctgtacatacaccaatttctaccagaccaagaccattacctctaaatgagccagtgcattgccgtt

SEQ ID NO: 33654 - DNA, 383 bp, Setaria italica
  Peptide Sequence Number=SeqID_99628
tgcacttcaaagtaggggcaagataaaaaaaaaactttacatcgaacgcagaatggaaaggtcaacaatggacgattttggggtgaaaaaaaaagggctgccgtgacgtggccacaaacatgccaaatccgcactcattgatcatctgttagaatccggtaccgaatctcagaaaatgtcttcagatcagcaccccacagccagcactcaagtcctataccatttgcacctgccttgtctgcagtttcatcatctcctacatgcactgccttgctggcgtccacaccaatttgatctaatgctatcttgaagatctctggagcaggtttctcgtacccaacctctgatgataccacaatggcatcaaacatatcagagacatt

SEQ ID NO: 33655 - DNA, 746 bp, Setaria italica
  misc_feature (212)..(212): n is a, c, g, or t
  Peptide Sequence Number=SeqID_99629
tgggggtaaaaatacaattgcacttcaaagtaggggcaagataaaaaaaacttcatcgaacgcagaatggaaaggtcaacaatggacgattttggggtgaaaaaaaagggctgccgtgacgtggccacaaacatgccaaatccgcactcattgatcatctgttagaatccggtaccgaatctcagaaaaatgtcttcagatcagcaccccanagcgaactaatcagtcaatcacacaaatgacacattcaccatggttgaaatatgatatctgcattgccaagggaatcacgaaggagaagagactgcataccagcactcaagtcctataccatttgcacctgccttgtctgcagtttcatcatctcctacatgcactgccttgctggcgtccacaccaatttgatctaatgctatcttgaagatctctggagcaggtttctcgtacccaacctctgatgataccacaatggcatcaaacatatcagagacattgaggtccttaagcaatttccttagccttgtatcaaaagttagatacaacagctagcttaactccagcatccttcagctcacgaagtattgtgtctgctccatcaggcaaacaccaagcatctccatgggcatagtactgatacacttcttcgaaataatcatcatcagtgcaattggttgcttctgctacgacaattctccagaatggcctcccatctccctgagcgttctttcggtcctattggcgtccgt

SEQ ID NO: 33656 - DNA, 299 bp, Setaria italica
  misc_feature (33)..(33): n is a, c, g, or t
  Peptide Sequence Number=SeqID_99630
gtatagccaaaggcaacgaaattttattaaatntaccatttttatgtaaacatagctataaagctaaaatgttgaagagcatgtcaatgtcccgaattattcatacaataagacaaaacagtacaaattttgcttaggggccattgccccacagctgctgaattgtacgcacactcagcagccagcacatgattatcgcagtgccttgaaaaacatatactataccatcttacatttctgtaaattgaagctgacacgagaacctcaattaatgcatcaattaatgcatggtgtcaaca

SEQ ID NO: 33657 - DNA, 315 bp, Setaria italica
  Peptide Sequence Number=SeqID_99631
agcgacgccagggcggagagagaggaacagggagagaccacaggccgtacgccgggagcgcaggcggcgcttacatgggagtagaggcgggcgggtgcgggcggagggcggtcgtcaccgggttctacgtctggggctgggagttcctcaccgccctcctgctcttctcggccgccgccgcttcctgctgctagagccagccgctccggccggccatcagcaaccttactagcttcttttattagatagccaaaccgtgcacacaaacacacaaagtgatcagttactagttagtaggcagcagagaaagagggg

SEQ ID NO: 33658 - DNA, 284 bp, Setaria italica
  misc_feature (13)..(13): n is a, c, g, or t
  Peptide Sequence Number=SeqID_99632
tggctctccaggntccccgagtggaccacatggatcatgctcgtcgcgctcgccctgtacgacctcgtcgccgtgctcgcgccgcggggaccactcaggatgcttgtggagctggcatcctccagggacgacgagctcccagcgctcgtctacgagtcccggcctacagtcggcccggcgacaagctcttcctcttatgcttcagccatgggatcggtggagatgcaaaccatgacagattctggtcgggccggtggcagccggtatgacagggtggagcagga

SEQ ID NO: 33659 - DNA, 317 bp, Setaria italica
  Peptide Sequence Number=SeqID_99633
gtcaaaatgatcactaggattgatgtagctgaagtcagagagatttgatttacccaaaagctagaaccaaatacatgagcagatcaggcagataatgctaatatatcagtacagtcaatcagtcattgggcaagctggtcgggagatataatgaaccatatgcctgccataagcactgacctcagcatataaatctgtgtgcatctttttcaaacttgcatagctcagaaaatttcagtttgggccgggaaagttcttaactaaaactggcaggtatatagtgaaccatatacctggcaggctggcataagcagtga

SEQ ID NO: 33660 - DNA, 320 bp, Setaria italica
  Peptide Sequence Number=SeqID_99634
gcagatagtgaccttcaatgactaccatacatgcccccctacgaagagataataggcttgttactgcaagaaggatagctgagaagtatgagaagtttataatggcaaatccaacttggaaatttgtaagcatgaagcagactgtccaagaggagatgtttgcagatgtttctatctctaaattgaagaaagcaaaggccatggtcatgcagaaagccttcgatgctacaaaaggtcagtacgagttgttgtatgattaccagttagagcttctgagaagtaacccagggagtacagtcatagtgacgaaagagccaggt

SEQ ID NO: 33661 - DNA, 321 bp, Setaria italica
  Peptide Sequence Number=SeqID_99635
gccccagctgcttgccgttgtcgttgctgctacagtcgcctctgctaggctaccagtagcagtgtttcttagcattgctccagccttcgtaattgtaccttggtgttcagcaggctcctcgctccaaaacggggtacgcttgcatcagatgcccaaacaaatacatgtgcagagagaacccactcaagcacgccatgggaacatggaaccggacaccattgcactcttcacataacggacagacgcacaggcccctcttttattcttgacagacagtgagaactgcatgaaaacagaagatcagacaagtcaaatcatccg

SEQ ID NO: 33662 - DNA, 746 bp, Setaria italica
  Peptide Sequence Number=SeqID_99636
atgtcgcgccgttcatccacggcgcgtccggagcacggcaagatgtgcttcacgtggttcggcccgatgcccagggtgaccatcagcgacccggacctggcaagggacgtgatgtccaacaagttcggccacttcgaaaagcccaagttcccggcgctgtccaagctgttcgccgaaggagtggccaactacgagggcgagaaatgggtgaagcacaggaggatcctcaaccctgcgttccatcttgagaagctcaagctcatgctgccggcattttctgcgtgctgtgaagaacttgtcagccgatgggcgcagtcgcttggtcctgacggctcgtttgagctggatgttgacccagaacttcagaccctcaccggagatgtcatctctcgcaccgcgttcggcagcagctaccttgaaggaaggaagattttccagctgcaggctgagcaagcagagcgcctcatgtccatcatgcagaagtttgccattccgggatacatgtccttgcctacccaaaacaaccgaaggatgcgccaaatcaagaacgagatcgaaacaattctccgaggcctgattggtaaaaggaatgcaagccatgaaagaaggtgaagccaccaaagatgacttgctgggcttactgctggagtcaaacacgagagacacatacgagaatggccagtccagccttggaatgacgatggaggacgtcatggaggagtgcaagttgttctacttcgcaggga

SEQ ID NO: 33663 - DNA, 813 bp, Setaria italica
  misc_feature (791)..(813): n is a, c, g, or t
  Peptide Sequence Number=SeqID_99637
tttaatttctctccccacgcctcctcgacctgcccctccccgatgcacgttctctctggttctacctcctccttcatccatcctttcactttctctctcctttctctcacgcggtcatgaggtgatgccagaggaggaagccgaggggacgagctgcgcggccggcgatggtggcgcccgggggatgccggcgtgcgacgcatgagaccccaccatctcctactccagctctcttcccatggtacaacgcaaggccggatctggtccatgccacttccccaaccctcccggcgggatccatggtggagggtgcccttccaggtgacgataagctcggacccggcgaggagcggccggtgcgggcaaggtttgaggtaagttgcttccccagtctctctctcccctctcccaccatgcagatctggaggtgaatctgcccgacatcatcgtgtccttgtcggattcgtggaaaaggctttggatccagggaggaagatgaagaaagcggcggcacttgcttcttgttttttgatttaggttgcagcttgtgtgccttggcatctgcatttcccttgtgatgagcatccaacgagaagaaatgtaatttttcatttttttattttttattaggtctacatgatatctgaagttttcctttcaatcttttgtacaatctgaagcttttctttttaatttttttgtatgttcgtgtttgtatttgtataacttttacacttgcctgtaaatttatttggtgaaatgctcattgctgcaagaaaaaaaaaaaaaannnnnnnnnnnnnnnnnnnnnnn

SEQ ID NO: 33664 - DNA, 729 bp, Setaria italica
  Peptide Sequence Number=SeqID_99638
cgcgcatggccgcggaggccgaggcggcggccgcggtcgccgcggaggaggcggggggagggcggccggctctaccgggcagagggtttaccgacacacaaagccaccatgttgcggcccggaaggagaagcagcttgaggctatgagggctgctcttggactgaacgctgaggatgtaaagaagggggatgtggaaagtgatgtggaatccggggagcttgtacctggtaagtatgctgaggaactggatactgctggtcagaaggatagcaaagatatgaaggatgcaaagacgagcaaaaaagaaaaaggggagtgataaaaggagtcagagcaaaagttcaaggaagagcaagtatgactcagattcagaacaggaacatgacatgaaaacaaagaagaagaagagttcacaccgtgattctgaagatgattcggggactgattatgatgagaagaaggaaaagaaacacagcaagaaaactcatcttggttcagatgatgattctgaaactgatcggaagaaggcaagacgtgggaagaactctcatcatgattccgattctgatacatatggtgactatggcaaaaagaaaacagaacatgcaaagaacaatcgtgatgagagaaagaagatagcagtgaagagctctcgtcatgattctgagtctgatactgataatgagtatgggaaaaagaaaacagaacatgacaaaagaacaattgtg

SEQ ID NO: 33665 - DNA, 1275 bp, Setaria italica
  Peptide Sequence Number=SeqID_99639
gcaaagaacaatcgtgatgagagaaagaagataccagtgaagggctctcgccatgattctgactctgatacagatagtgattatgggaagaagaagaaaacagaacatgcaaagaacaatcgtgatgagagaaagaagataccagtgaagagctctcaccatgattctgactctgatacagatggtgattatgggaagaagaaaacagaagttgagaagaacaatcgcaatgagaaaaagaagataccagtgaagagctcttgtcagggctttgaggatgagaagccaggagagagcaggtacaaggatagctctcaccattactccgaggatgggaagcccataaagaacaaggaaagctctcgccatgactctgaggatgagaaacccagaaagtacgaggaaagctctcgtcgtgaccttgagggtgagaaacccagactgagcaagtacaagggtggttcacacagcgactatgatcagaaaaggcaaaaatctgttaaaaagagcaattattctagtgaatctgagagtgattctgatagtgaccaaggtgagagatcaaaacgtggaaagatttctcagcaaaaatctgaacatgatagactgaagagtggctctaggaatgttgactacagaactaacaagtctgtcaagaatttgagccatgactcagatggtgagaagctacgcagcaaggtcctcaggaaagacaagtacagtggtgattcagagactgattcagatgctcgtgttgaagcaaagaagaaacttgaaaagtcatatcatcacgaccccaagaaggataagcaagcacaaaaattcaaagaaaaaaaggatgactatgggaagaacattgataagcacaagcgccacgattctgattcagaatctgacggttattcccgtgataggaaaaggcaactgaatgctgcagtgacaaaaaaggatgtgccagagaaaagaagagtggctagctcaagcgagagttcagattacagcagcagcagcctcagcagcagtgagtctgacttgagtgcagatagctataaggaacggaaaaggggtcaaggtgagaggagaggagatgagctgaatagacaaagacagaaagaggagagaaaggagcttgagaaacaaaagcagagagaggaagagaggaaagagctggagaagcaaaagcagagggatgaagagaggatggagatggagaagaaaaggcagcaagagagggaggaagagagaccgagggacagagagcaacaagaagaagca

SEQ ID NO: 33666 - DNA, 366 bp, Setaria italica
  misc_feature (5)..(5): n is a, c, g, or t
  Peptide Sequence Number=SeqID_99640
aaccnccaaaagatgcttggacaagaaagtgttcaagagatgcaacaacagtgaccagagctggatcaagcccaatctcctccttttgactcccttaatgctgttgctacgtcatctgcatcaccctcctctgccttccctcctggcagtgaaacttcaccggaatgggtggagagtgacgacgagcgcttggtgagtatgacgcggagctcgccggcggcagcccggaagaggcagacgagcacggcggccctccgcggccggaacagctgctcgccgccgtcgatcgctacgtaattaccggtgcggggtcgtaaggggatggccccgcctggtggagcctcagccgccggatgagcgcgccca

SEQ ID NO: 33667 - DNA, 481 bp, Setaria italica
  misc_feature (453)..(453): n is a, c, g, or t
  Peptide Sequence Number=SeqID_99641
gtcgcactagtcaatttatgggatataccgatatgacttagggaaatagggcttgcttacattggtttgagctggaggaggaacatcagaagcaagagggtcggccgtgatgttgccctccattgcagccacgccgccatggccaccggcttgcccgtcgtcgatggcgcaatggcagtgcaagattccagcagttcgcaggcagcgggagaccgggcggtgggtgaggttttagcagcatcggcgtgtcgtgagattggaatgaaacgttgcctgaccacctgtgtgcgtgtgtgcgttgttgggcactaggcaacagttgacagaatgccaattgggcttggcccctgcggtttggcttgctgagtgctgatatggtctacgggctgacaattgacaaggggtagatttttttcttgttggggagccatggcccccgccacgccccccctnagttccgccactggatatgccatgctag

SEQ ID NO: 33668 - DNA, 393 bp, Setaria italica
  Peptide Sequence Number=SeqID_99642
gctggtaggtcaacacatgctctcatgggggcacaatccaatatcaacaaattgctttgacaatcatacactgacaggtgtttctaccttaatgcctagcaaatctggtacacgagatgagattaaggattagtggactatgtgttagatcacctgcttctatcgtggatattactagttgcctggatgtactggaagcgtagaacaaaaacgaaatctatataattgaaatatttatcccattaaatgttataagctttgtggaataaatggacactgatctcattctccaccatgggctgacccgcatcaaacaaatagaacatgaagagtcaacatcaaagacagcacacagaaccacgacgaagaactaatggccatgtggcttatctc

SEQ ID NO: 33669 - DNA, 265 bp, Setaria italica
  Peptide Sequence Number=SeqID_99643
gcagtgcgaggacacggggcggccgcagaggcccgagttcccggagaaggcgtccttgctgaagttggcgcccagctgcggcgggatctggccgtcgagcctgttccccgagaggtcgagcgacttgaggcggtcgaggcgcgcgagggaggcggggatctggccggagagctggttcccggcgagcttgagcgagttgaggaatcggcagttcgcgagctcggcggggagcgggccggtgagcttgttggaggagaggtcgagg

SEQ ID NO: 33670 - DNA, 489 bp, Setaria italica
  Peptide Sequence Number=SeqID_99644
gtcgtatgtgtcaatttcgaaaactggtgttttcatatgagtatgatccaaaattttatgatgatttcatgtatttggttggtaatatagttctccatcatgtgtaggtggacagaggtgtgcctctaggtgaagccttactcatgcatgataagtggctagaggacaagggcattaagaacacaaactttgctattgttacctggtctaactgggactgccgtacaatgctggagtcagaatgcagatttaagagaatcaggaagcccccttattttaacaggtggatcaacttgaaggtaccattccatgaagtgtatggtgatgttcgctgcaacttaaaggaggcagtccagttggctggccttacatgggagggtcgtgctcactgtgggcttgacgacgcccgcaacactgctcgcctcctggcactttattgtattgtctaccggggtcttttcttaagttttctttctttatttaacctta

SEQ ID NO: 33671 - DNA, 907 bp, Setaria italica
  Peptide Sequence Number=SeqID_99645
cgcgtggtgaccgcgccgctctgttcctccgtcccctccctccccccccccccctcccggctctcgcagtcacatgttgtgtggcgcggggggaggctctgatccggatggtgcagcgcagcgggattgcccacggccatgattgatcgcgaacgagcagaggaaatgcaagttaataatgaggcaccactagggtgcctcaagccaaatattgagcagagaggtggaattgaagggtttcctgagaacaatgaaaaacggaatgatgtggttgctgtggaaaaagtctgggaggcatctcctattccaacccaagtccttagcagacccttctatcgacaagaattttatgcttggccatatatttattcggattaccaaatggtgcgtcagccactaccttatggctttgacagccaattttatcaagtaaatagggatcatggctttcctattgagaacagagttcagtatcttccattcaagatgctcccccaaggtcacccccatgatgcacaacttcaggaatttcaatattttgtggttattgactttgaagcaacctgtgacaaggtgaacaatccatttccacaagagatcattgagtttccatctgtcttggttaacagtgcaactgggaaactggaagaatgctttcaaacatatgttcggccgacatatcatcaatttttgactgacttctgcaaggagcttactggtatacaacagattcaggtcagtggatactccaatgtagtaataattattaggtcattgatacgaaataagttgagcatgaggtggcaaggagtcaatcaatttttatgctagtgccaattatataagatacaaacacaaattatcgagcttagtacattttaataattttaagttaagttttcaaatg

SEQ ID NO: 33672 - DNA, 1560 bp, Setaria italica
  misc_feature (1550)..(1560): n is a, c, g, or t
  Peptide Sequence Number=SeqID_99646
tctcctattccaacccaagtccttagcagacccttctatcgacaagaattttatgcttggccatatatttattcggattaccaaatggtgcgtcagccactaccttatggctttgacagccaattttatcaagtaaatagggatcatggctttcctattgagaacagagttcagtatcttccattcaagatgctcccccaaggtcacccccatgatgcacaacttcaggaatttcaatattttgtggttattgactttgaagcaacctgtgacaaggtgaacaatccatttccacaagagatcattgagtttccatctgtcttggttaacagtgcaactgggaaactggaagaatgctttcaaacatatgttcggccgacatatcatcaatttttgactgacttctgcaaggagcttactggtatacaacagattcaggtggacagaggtgtgcctctaggtgaagccttactcatgcatgataagtggctagaggacaagggcattaagaacacaaactttgctattgttacctggtctaactgggactgccgtacaatgctggagtcagaatgcagatttaagagaatcaggaagcccccttattttaacaggtggatcaacttgaaggtaccattccatgaagtgtatggtgatgttcgctgcaacttaaaggaggcagtccagttggctggccttacatgggagggtcgtgctcactgtgggcttgacgacgcccgcaacactgctcgcctcctggcacttatgatgcaccggggcttcaagttctctataaccaactcgcttgtgtggcaaccgcaacctgccccacagtcaacaacctgccagctatcccctgaccgctctccagaccccgtccaaccacagcataagccgaatgagatgctgggatctcctgtgcaggttaatccatatgctgcctctgcagggaaagacagagcaatgtactgctactgcggagtgctgagcaggtggagcgttgtgcgcaagccaggacccatgcagggacgtttcttctatggatgcggcaactggaccgccacgaggcgggcgatatgcccatactttgcatgggcgtcgtaaaggaataatatgatgacgtccaagcagatctcaagggcaaaggacctggtgctttaactaagggaggcgctatgttgcggtggcctgctgctcctccgctgcgcctcccgatccgtatatattatgatataactttgctcataagacaatggaagttcactaggtagtgtctaacctgtcatgctgacttctgttgatacaagagaatggggctcagatgctgcttaggtgtgatttatccatgaataatctaagtttgtggacactgtttttaacttaatggaactcttgtaggtgtggcttgtgcaacttgaacttgaaagcttggtttgcagatgttgagtggtaaacagcttgaacatttactaaggcctactatgtactcatgcaacagaaagaattatcataccacgtatcagaactttttgaagagataaaaaaaaaannnnnnnnnnn

SEQ ID NO: 33673 - DNA, 328 bp, Setaria italica
  misc_feature (314)..(314): n is a, c, g, or t
  Peptide Sequence Number=SeqID_99647
ggcggcgtggagtcgatggggaagaacggctggtggagcgaccgccggggagaccgccgccatcggcccccgcctccgccgacaacagcgacgccccagctaccaccaccacagcgagcagcgcgctcacagccacctctcttcctcgcaccatcgaataagctctgatagaaccccaaaaattctcccaaaaacacctgaattctcctccgaattttttcaaaattccggtgtcgttgcgtcagtttctcttttggggcgtggcctccgggaggagaagtgggaaggggccgcgtcaccgaagtggcaaaggngtgtgtgcgctgta

SEQ ID NO: 33674 - DNA, 145 bp, Setaria italica
  Peptide Sequence Number=SeqID_99648
ctgcatgcaatcagagttgacattaatatagttccaaagttcacaagaaaggggcattcactggtgcacctgttttggctatccggcatagctatcagccttcctactatgctttctcaataatgtgtttcttgtgaccgaaaat

SEQ ID NO: 33675 - DNA, 3109 bp, Setaria italica
  Peptide Sequence Number=SeqID_99649
aagaaaaagaacaaggtttaacaaagtttacaaactagacagctaaatgaagaacaactcgtagaagagaagaatgtaagaaacctgctaggaacacgccacagaattactggttgatcctgtaacgtttatatacaggggcacggtacatgagcgaccaatagccatcatttatgttcgcggcctggtcgctgcgctttacagggtctgaatctgaacctgccgcggcggaggtacaggcgtcggcggcgtcggcaagtatttctccgacaggaacaccatgaaacggtgcaggccgaccgcagcagatgtgaccaagatgacgaacatgttccagctcaccctgaccatcaggacgggctcctctcgtaactctctcacgaacttggagaatatgacctgcatcctgcggtctcttaccacagcctggagcgccaccatggttgatgattcttcggacagcaccagatggccatcgttctctgcaactcgtttcaagcctgtgacattcaacatccactggcacaccacatccgcaataaccttactaaggagcacccggaacatcagtgcgtctctggagatcagatcacgggcaagagattttgcattcgctgtcataataagtcttctaatcacagcgctgtcctttgataataaaagcctcacacacaggtttgcagtatgcaatgccctctctggtgtagctgtagcacgatcaagtgaaaatgaaccactgatctctacaagcctatccacattcacatcctttgtgtcaggcacaggcaaagctccaccgatatatttgaagttgctccttgctgaagccgattttagaaatgcggaaatcttctgccattggaactctttctttttgttgaaaattgcctggttcaagagtctcctcgtcgcaagtgaattattggaaagaagcttccgaacaacatacgggtatgctgcttgaaatgttttgaaagtctcatccgctgccacggccagtccttccaaagaagcaagtgaccggagaaccagtgtgtagtaaggcggcatacggaagtgatatttaaatgccacagaccagatttttccaagcaccttactaaacttgatttctggaattccttcttcaaaggttacctcacccaatgcgtcctccaactccattgtcacacgacgcagaatggtgtttggtggaactacatccatttcagtcaaatcatagacaagggaagaccaatctccatttactatgtgtatgatgcttgcaagcatagcacgctgatgtttcctctccatcatgcaaagcaaaccaaaatcaagaaacccaacacgaccttcaggagtataacgcaagttgccaggatgaggatcagcatgcaataagcctgtctcaagaagctgcactagtgatgcctcgacacctttattgaccaggtcaagaaggcgagattttgcttccaacttctgcttttctgaagcttcaggaactttttcagaaactcctttagtcaaagaaagcaactccttggggttctcaccagccacccactccattgttaaaaccctctttctagtaagttgtttaagaaccttaggaactagcataaaaggatacctagaatgaacctccagaaatttggtagcgttagcagcttcaatattgtagtccaactcgccaacgaaacctctacccaactcatcagcatagagagaaatattacttcttcggttggctaccttccgtatgaaagcaagcccaagacgtagaatatagatgtctctcagcacagaaggtagaaggtttggccgctgaacctttatggccactagagcaccatcaactgtccgaccctggtaaacctgtccaaaggaagcagcagctacaggctcatccgaaatgtaactgaaaatatgtgacacagggcactcaaattctccctcaataatcttcatcgcatcctctcttgggaaaggaggaactctttcatgcaattcagcgagggcctcacaaaactctgaacctatgatatccggtcttgtagaaagggattgtccaactttaacaaaagtaggtccaaggtcaagaaacatctccttgagaagttggccgaccatgtattgagaagcatcgaagccattgctgctgttgccactgctataggtagcttctgcggttaactgagatcttttagaaatttgcatctttaccacagctgagacaaatgcgaagagtatctgaatggtgcgaaatgcgaggacgtgcggacgcgaagcgaagtactgagcaaggaggtcgggatcgtaatgctggggaagcggggtggtgagaatggtggaatagtagttgatgtacgtcttgagggcttcaagatcggccatcatcaactccatacaggataaacctggagggtaggacggtggagggaaggccgggggttgaagtatctgctgctgctctttctgctgttcctgaggtttgggtttaggttgttgttgagattttgactgttccttgcttcggaggaatcgctgcgcgagagagtgtctagcgctgccggcgtacaccttgagggcttggaagtccgccgccattagctccacgcacgacaaccctggcgggtacgcgggaggcgggaaggctggagcttcacgaggcagttcctccacctccacctcctcctcctgcagcatctgctgttgctgcgcaggcttgggcacaggtttcggctgcttctgcttcttctcgaggaagcggagccagaagacgtcgcggagcggggcgccggcggtggcctggaagaactcgccgtcgcggcggagcacgcccagcacctggtccagcgcgccgcccccgcccccgcctcctctccccccattgccgcccgactgccgcggctggcgcggcaagctgggcttgttcccgccccaccacgaccgctgcggctgcggcgcccacttctccttcccgccgccggcgccactcacggcgcagatgtgcagcgcgggcggccgcagcagcgtcgccatcgcatcgagcttctagttctaggtgagaagccgaggaggacagcgagggctcggacaagaccactggcccaacgccgcgcac

SEQ ID NO: 33676 - DNA, 407 bp, Setaria italica
  Peptide Sequence Number=SeqID_99650
tggcgtagactcctttgttcatcatgctgttgcctcccatctgaagaatacggagctcgtgcaagctttcggcaaatggcaaaggtgtcctcaatttgcctcgcttcccaagcctcatcagattcctcaggctccttgcattcgtccgcgccattttgacgattttccattgctatctcacgcatgatctgatcaaacttaaacaaactgtggtggatatttttccatcatgaaggtaatacatctgatggcagaggcacacacggctcagcaaggagtaaatttgctccgtgccatcacaaatatcaatataattgtcatcctcacatgtgatgatattctcccatataggcaatgacacccatttacttcaggtatgagattctattcaaagtcacagatttttt

SEQ ID NO: 33677 - DNA, 793 bp, Setaria italica
  misc_feature (22)..(22): n is a, c, g, or t
  misc_feature (51)..(51): n is a, c, g, or t
  Peptide Sequence Number=SeqID_99651
caccatatcaatatccaaatcncaaactgcaggtatccatcctcgaggttnagggtctagtcccttcgtaggtattgatcgtttagttactcctttgttcatcatgctgttgcctcccatctgaagaatacggagctcgtgcaagctttcggcaaatggcaaaggtgtcctcaatttgcctcgcttcccaagcctcatcagattcctcaggctccttgcattcgtccgcgccatttttgacgattttccattgctatctcacgcatgatctgatcaaacttaaacaaactgcatatggattcttaaacacttcagctgcggtcacaacatggctaaaatatctgaaaagttctgctggcatgttatgatgtgagcactcgatttcctctagaagtggacatttaaaaacaaacgatgctttgcaatgtctaaaaacggaattccaaagaaagtgttattgatgcactaatattctatatatgtataaattttcaagcaaaaatcaattctagttaaatggtgacatcacaaacagaaacagacactgtatttgtgttcggttaaagtgagtatcaactttccttttgggagctgaattttaaaggaatgctcaaatcatcctttgcaattaacttttcagtaccagtgaccagtctcaaatcacaagtttagattaatccaaagcgaggttgagcatgtcagttccagtagactatgatagaacattgaccaaggtcaggactcaagagtacatccaattggtcagaaatttaacaggagcaaacaaaacaca

SEQ ID NO: 33678 - DNA, 187 bp, Setaria italica
  Peptide Sequence Number=SeqID_99652
cgcagctcgcgggcacgtgcggcgccgcgctcgccgccgacttgtacctggtgcagtgctccgtgaggtactgggcgaacagcaactactaccgatcgtcgcaagataattcgggagatgactttgggaggaccttggcaataataatcggtatcatggccgggctagcactcctcgtggtgttcat

SEQ ID NO: 33679 - DNA, 218 bp, Setaria italica
  Peptide Sequence Number=SeqID_99653
gccgatcagccaatctcacagcacagctactcactcccggtcttccctcccctagttagtcgtgccactactactaaacaaacgagccatttctttgttccatcgcgtcgccacccatttcttccggcgcccaaacaactccctctccctctgctcctgttccatccatcggcctctcgccccagcgtccctgctagccctgcaccgtaccggccctg

SEQ ID NO: 33680 - DNA, 256 bp, Setaria italica
  Peptide Sequence Number=SeqID_99654
ccggaattgcagatggcgtaagttttgtgacggcccacgtctacacccacgagccaccttggtgtagacgatggagacatggatggagcacgtcgcaccatgcgatgtccggcggcatccacatccggggtgccgagtctgtgcactatgcaggacgctctaagggatctatcttctggggaatcgaagatgatggctctgtcttctctggaggagagggcactggagtgctctcgcacttccatctacctgagaa

SEQ ID NO: 33681 - DNA, 358 bp, Setaria italica
  Peptide Sequence Number=SeqID_99655
ttgccatactgattcctcatctcagccagcctccgaattcgagcttctacttgactgatccgggttggtaatttctgccatgcagcaaaattcctgacctgaatggaactttctcttgaagaagctgcctgtattagcagcttgcacaagtaaggtaagcatactcatcaataatgtcttccaactcatgggcaacatctctaacttggtccaaccacgcatcaaatgccctgtcagcggctttctgcgctctaacctgcccaatgaaggccagcataaccgagagctcgccctcgatttgtttcacgctatgctcaaaatccgtcaaaatcggcgctgcttctaccacctcactggc

SEQ ID NO: 33682 - DNA, 651 bp, Setaria italica
  Peptide Sequence Number=SeqID_99656
aactaaccaacaaggaagacggattttcagttgcttctagaacttttggtgcaaagaggaggacaaggtggaagctctaaatcatgtcacatatcaggtgcactcgcagcagtccaattattcagttcacgccgaacatccagagcatacaattcatgtccgggaggcacataatgaatctcttaatcatgcagtttgcaaatttgtggggcatgttgggctgattaaggaaacaactgctgtaaggcacaccaaccgaggtaaacggtaccgctattgaccctgaatctgtgactgtggagaagaggcaggctccagcatcgaatcagaccacacaggacgtacaaaagtattcttcccgtagcattatatgtgcagagtatgctacagtcccgtatcaggatcaggtgatttatttgcaagagtctcaaatagatcctgtcaatcatggggacaatgtgcatatgcagccgagtgataggatcagcgcaagggatggcaattgcataactggacactcagttagccatgaagctattaggtcaaaggaagacagatagacgtagtgaacaaggccacacatctgatgccaaagcagcatgttgataatagggctcatgcagaacacactgtagcagatcattcagatac

SEQ ID NO: 33683 - DNA, 472 bp, Setaria italica
  misc_feature (383)..(383): n is a, c, g, or t
  Peptide Sequence Number=SeqID_99657
gtgctgcgaggctgcagctatccatgcaaaacgggagcaaatcaatgcacgctcatccactgaccaccagcaatccttgctgtcagtactggagcagacacctcatgagtcatgacctcatgcagtgtagcactgaagtagcagtgtactcacaatctgtagtggcaagttggcaacagatcagcacctcaccgtagatagcaataagataggcttcaccaccataacaaaactaaaaacgatcgtgccgccgaggaaaacggtgacgaagggttccaaatctggacaaatcctactggttgggtgcgatgcgagtgcgacaaggcagagcggaatctggacagcaccctcctttcccgaaccttttcattttaaaaaaaaanaatcctgcaacttttcattttaagaatatcataacttcataactttataatataattttttatgagataattttttagcacaatttcaa

SEQ ID NO: 33684 - DNA, 422 bp, Setaria italica
  Peptide Sequence Number=SeqID_99658
gattaaagcatctaattgttgcagccctgatacagtctcagaaaaatggtgagaactggagcctttttaatgccaaccaaccttgctagctctctcgctgaactgatgtaataactctacataaatttaacaattaattcattatgcattttatatgtgttaaatcagaaaaatgtctttcacaatatgtgaagatgtacctgatagcaagtggacaaggaaattattattatgaataaaaagaatatgggccaagcgatttgggacatgatgaaaatgatactgaggagctgaattagtgcgaatatcagccctgctaccctgtaaggaatgtctatgtcaactgtgctttgatctgttgaaaccctgtttaggattcgacttgatggagtagaatcaaagaaattcattggtgctctgaa

SEQ ID NO: 33685 - DNA, 1225 bp, Setaria italica
  Peptide Sequence Number=SeqID_99659
tacgtaccaacttaccccgtacgggaagaccgcctgctcgcgcgcctctcggtgcggggggctcaacctcacggcggccgccaacgcgatggtcgccacgctcgaggtgatccacctccactcggtgttcctcaccgacgccgcgctgcgacgggtcgtcgccgcctgcccccgcctccgggagctcgacctccgctactgccgccgcctccgccgcatcgacttcagcgccgtgggggtgcccaacctcaggaccttcaccctcgtcgactgctcccgcaccacggaggtgcgggtccccatggcgccgcgcctccggtcgttccggttgagcggcgccttcctctccagcaacatcctcacgggcgctgggggctcacttgagcatctctacctctgctccggcgggccggagaacggcttgccgcccaccaacttgcccatctcggttccccacctatcgaacctcagtgtcctcaccctctgcagcattgcactccagtacatttctgctttcacagctaaggccgtagtggagagcaagctgcagagcttgagagagctcaatttcctcatgttcggcatggccaactccaaccttgctgacatctacagcttcctcaagacatgttcctgtcctcagttggagcggctctttgtgcagctcccgacgaacgttcgtgattcattcacggagaatttcttggaggtagcggaggaagagccacctaaaggtggattagaaaacctttggttagccaagatgacaaacttcaaggggcaccgtaatgagatgcaactagtagaatttctgcttagaaagtctagttgtctgaagaaactatttctgattgctcctacagaggatcaccctcaaggactccgcaagattcagtcggatgtgctgcccagttttctgaaaacagaaataatgcatttggaaagagcttcagcaaatacccagataattttcagtgagcctgatggtcctcagatccaaccattgcattcggaggtctttgtcaggttttagattgaaatgagcaaaatattgttgtagttcagtttctgctcataaattttagatttctagctgttagataacagacatggggaaaagaaatctgcaaggaatacagagtttgatatatgtctgttatctaacagctagaaatctaaaatttatgagcagaaactgaaatgggaggaattctgacctgccaaa

SEQ ID NO: 33686 - DNA, 247 bp, Setaria italica
  Peptide Sequence Number=SeqID_99660
ccacccctcctcggcgacgagcacgctcaccacaccctccagctccatgttgtggtccatcccactgttgaaccacttagcctccactactccatcgggccggcttctacgaaacaggggcttcttgcagcaggtgaagtcgcccgaggcactgctgcagcgcttcacctccttgcccgtagacagtcccgtgaacatgctgacgccgccaatgtcgtcgaccttggggcagaaggtggcgcagccg

SEQ ID NO: 33687 - DNA, 249 bp, Setaria italica
  Peptide Sequence Number=SeqID_99661
gtcttctttttcttctcgccaacttgtgatcttggatcctcgcctccattttgatcaccactgttcatcttgggtgcttcaatgtcagcagtacccacagcagctgccagatgtagaccctcctcatctgaatccctctcatctcctccatgatcgttcagctcaaactcaggggcatcagccatgatcacaggatcaggtcggagcacgcaatcctcatctgaatccctctcatctcctccatgatcg

SEQ ID NO: 33688 - DNA, 372 bp, Setaria italica
  misc_feature (48)..(48): n is a, c, g, or t
  Peptide Sequence Number=SeqID_99662
atattttacaaatatgtacaattacgactaattgttatttacaaatanggtttttcacaaaatgaaataacccctacagtgatggagagggagtacatttctgatgccccaaccccatcaaaaacttgccatcgaagcagcacggcgccctaaatcctagcctggactgcaagggctagactccccattccagcatacagatcacgcaatatagcatagcagataggaaatgttaacctccacataaccgatgtatcgaccacaacattaacagaaaggaaaatgaatcctaaagacatacccctctttaccctccaactaggtatactgtttacaaaagcaggaaaagagaccaaagaagtatactccaag

SEQ ID NO: 33689 - DNA, 152 bp, Setaria italica
  Peptide Sequence Number=SeqID_99663
ggccgccttctctttccaacctgagatggacacatacaagatatgatcatgtttccaagtttgatccagttaaagatagggttttggccaattctttccgatgcagtgctcagtaagtttatgtttacactccctgagctctccaacctcat

SEQ ID NO: 33690 - DNA, 1249 bp, Setaria italica
  Peptide Sequence Number=SeqID_99664
ttttttttttttttttgttcttgaaatactgtgctttgcatttcaattcagaaaatcccatccaggtctactagtactgcaagaccagtacccatcaccattcaaatttccaatacaacatcgcgcgatgcgaactggttacatgttcgtggcttcatgccactcttgctagcatcagatctcggatctctcacaatcaatcaacataaaaccaggcgtcttaaacaagagtacaagcatctaaaacagccatgcaacaaactccaggttgtggtgaacatgaccagcaatcacaatatcctcttgatcaatctgaaccccaagcctcatcacgcatggcttgtcgagcagcaatcctgttctttctctcttcctcctgcttcttcagctcatctgacccgaagtttgtaaactgcttcagccccataccatgagcaattagcctttgtgctgttcttgcagatgtctttggtcttggcttgggtggttctaggtctctaccatctatttttgtcaataaatcatcattctccttcattgaccgcactttgtatcttggaggtatgcaagattgagcctcagtagcagctgatggagtccggaaaacagcaagtgcagaagtatcattaacccagcgaatggcaactccatgatccccaaacttctcaaaaatcctttccagatctattgtgcgcgtgcttggtgaaaagtcatataggacaaggacatgccttgttccaagctgtgcagcagctgtcacagcactgttctcctgctcatttacatggtcttttgatccactctgaggactagactctttgtcatccaaatcccgttctgaaccacactggtcactgtacagaacactcttatcatagagaaatgaacccctccctctcctttttggtcctgaagacgtgctgctacttttctctgaagagctacaagaaggcaccctagcttcttgctccagggagtgcactagtgtgccatcaagtgcgccgctatctgcaatagcctcccaatcatcctcttcggcttcattgttctgttcagtattagcagagacttcagagtcctttgaacccatggcaccctcttgtgatgaacatttctctgttggctcctgatcccctagggccccaggggctgcggcgcgggatcggagggcgatggcgcgggcgcggagctcgtcggcgcggagggtgtcgccgcgggaggcgtgcaggcccgcgaggtcgccgagcgc

SEQ ID NO: 33691 - DNA, 254 bp, Setaria italica
  Peptide Sequence Number=SeqID_99665
gtcgccgccgacctcttcaccaaggcgcgggactggcatattgattctgccaagtccgcgggcaatacgtcacttactgaagatggtggctcagtaaatatttaccctgtaatgctaagagtctcggtcacccgagataatgcacttacagtgaagattggcaaaaaggacaattcggctgagaactttaaaagagcaaacaagattctgactgcagactctgagccggttcacatatgggatttttctgggcg

SEQ ID NO: 33692 - DNA, 490 bp, Setaria italica
  Peptide Sequence Number=SeqID_99666
caaggacgggtacaacacatcctgtggcgagcgagggtttcagctatcgggagggcagaagcagcgcgtagcgatcgctcgcgccatcctcaagaacccagccatcttgttgctggacgaggccacgagcgcgctggacagcgcatccgagaaggtggtgcagaaggcactggaccgggtgatggttggaaggacaagtgtagtggtggcacataggctcagcactgtccaaaactgtgacaagatcgccgtgctagagggaggaagagttgtggaggatggcacgcacgcatccctaatgggcaagggtcgttctgggatgtactttgggctggtcagtttgcagcagggtgcaaccggcactgagatattcgcttcacaagagtaacacatgcattcagaaattgcagaccattgagatgacttgcctcttttctctatttgctcacgagatgtattgccgtttgaatttaaacggcaactgaagata

SEQ ID NO: 33693 - DNA, 612 bp, Setaria italica
  Peptide Sequence Number=SeqID_99667
acttagaagcttaatttctgcagagcagaacccagaaatctacaactatcagcattcagagactggtgtaacacctttaatggtttttgctgctaagggtcagcttggggatgtttgtatgcttttatcttttggtgttgattgttcagcacaggatcatgatggaaaatctgcattagattgggcacagcaagaaaaacagcaagaggtttatgaagtaatcaagaaacatatggagtgcagtacagcaaaatcaactgaagataatgagctgcttaataagtacttggcaactattaacccagagcacattgatactgtgctaatagaacggttgcttggaaaaatttgtgtggattccaatgaaggagctatcttggtatttcttcctgggtgggaagatatcaatcaaactcgggaaaggttacttgcttctccattcttacgggattcatcaagatttcttgtattgtcacttcattccatgattccgtctttagaacagaaaaaggtcttcaaacgtccacctgcagggttcgtaaaattattctctcaaccaacattgcagagactgctgtgacaattgatgatgttgtgtttgtcatagatagt

SEQ ID NO: 33694 - DNA, 1002 bp, Setaria italica
  misc_feature (952)..(1002): n is a, c, g, or t
  Peptide Sequence Number=SeqID_99668
accagatgtacatatacatccatggcgacaggcttgcctcccagcagaagcaaagcttcttgggcttatctgcttgctggtgagcggcagattacagaggaagaggagattgcccttgttgatccgcagggaggtctggagattctgaatagaggcaagagacagcctcacaattaagcaaaagggatcagcatgaaccttcaccaagacatggagagggagcagatgaggatggccatcctgaaacaagagcaaatcttcagacagcaggttcatgagctgcatcggttgtaccatgttcagaagcagctgatgcagcagatgccaactaccgcgttgccgaatcgagctccggtgatcgccgacgtcaagccgaaaccgcagctggacatttggcacagcgagaaggctacaaatcctcagcaattcatcagcttctcgagctacaaggcgcatgccccttcacctgcccctgctcctgctccttcagaggaatgcaaccttgagctgacactagcaaccggccctagcagcagcaacagctgcaacgctgagaggcagcaggggaagcggctcaagtcgtcgtccaactcggattccggcacgacggcggtgtcgtcgacgtcgacggactccgagctggcgcagttcagggaggtcgacgtgacggcggcgaggtttcccggcgagagtaggaggatggatcagatggggcaaggtccatggatgtaccagtgcttgagcctgaagacggcatgatggtgtgatgactttggtatgtaggactgggtttgtagatttcagagggagacagagcacatgtttggtacatgcacaattgtacatcacagaggtgatttgttgcagcaaactggtaatgatcgacttgataatttctatgaacatactaactgaaaaatgcaaagccatactgaataattagactctagtnnnnnnnnnnnnnnnnnnnnnnnnnnnnnnnnnnnnnnnnnnnnnnnnnnn

SEQ ID NO: 33695 - DNA, 140 bp, Setaria italica
  Peptide Sequence Number=SeqID_99669
gcggccggaggagggtcgccgccgcttggctgggccctcgcttgctgcggcctgcggtttcggctacgagctgtgtgccgcggccgcgcagatcctcctcccagcgagaggcgattcaggcgaaccatgtgccgccgtcg

SEQ ID NO: 33696 - DNA, 287 bp, Setaria italica
  Peptide Sequence Number=SeqID_99670
gtgcgtcttgaggaagaaaccttgatgagagggaggcggcggcttggattccggcggcagcagcggcagggccgagtccttggcggcgctgtagagcgagaggaagtcgtgcgtcgccttatccccttgcagccccataaccacgcattacacctcggctccgcgcgccttcgtctagctcgagcccgcttggacgcgtaggagagggaggtgggagaaggcgcgcgcgcaagagagggagatctctgctgcagctgcgatgcgaggctcctccggccttccttgcc

SEQ ID NO: 33697 - DNA, 215 bp, Setaria italica
  Peptide Sequence Number=SeqID_99671
tattgttttggttgactttcaatgacttgaagtcccttctgtatgcttgcagcaaggtttaacttgcatttgccatctccaacatcagcaccagtgctaaatttattagcatcacagcaggatctttttgtggatatcaaattcttatccccatcaagagcttcaacatgtgaagtgccagcacttgcatccctcgaagctcgtagaccattaga

SEQ ID NO: 33698 - DNA, 454 bp, Setaria italica
  Peptide Sequence Number=SeqID_99672
aatagaagaagaaataatgcaatagaaacctacaacaaccaagtaacaaggaagaaaggcttcagagattaaagcatcgcatgaaggtttactttgatccatctagacgagatcaccaggaagccctgaaagctctttggcatgcgacataccctgatcaagaacttcaaggtttgatatctgaacagtggaaggacatgggttggcaaggaagggatccatcaactgactttagaggcgcaggattcatatctctggagaaccttctattctttgccaagacattctctgcctcatttcagaggctgctaaagaaacagtgtggtaacagagccacatgggagtacccatttgcagttgctggtgtaaatattacattcatgatcatgcagatgcttgaatactaccaagtacaaaacaaaaagaaccaaaagaaaacaaatttaagtaacca

SEQ ID NO: 33699 - DNA, 482 bp, Setaria italica
  Peptide Sequence Number=SeqID_99673
ttaaaaaaactaaaaacttaaaaaacaaaatttaaacgaaataacaaataaacttaacgaaagaaactacaattaatttaagacaagttaaattaagtcgtgttaaatcatgcataacaaaatagtaactagcaagtatcattgtttttgcagaactgtttaccgctgtgatactgagtttggcatctttacctgtatagttatgtttctatttattctactctcgcagtctactgaatcctgacaagtagaaatactaactgttacaggaagccctgaaagctctttggcatgcgacataccctgatcaagaacttcaaggtttgatatctgaacagtggaaggacatgggttggcaagggagggatccatcaactgactttagaggcgcaggattcatatctctggagaaccttctattctttgccaagacattctctgcctcatttcagaggctgctaaagaacagtgtggtaacagag

SEQ ID NO: 33700 - DNA, 911 bp, Setaria italica
  Peptide Sequence Number=SeqID_99674
atgtggatcaccaagatggatagggagaagcttatcttgtgtgtgcatcaagcgaaaaggggcatatgagagaatatgcatgaacctcacaccagtacaggaagaaaggcttcagagattaaagcatcgcatgaaggtttactttgatccatctagacgagatcaccaggaagccctgaaagctctttggcatgcgacataccctgatcaagaacttcaaggtttgatatctgaacagtggaaggacatgggttggcaaggaagggatccatcaactgactttagaggcgcaggattcatatctctggagaaccttctattctttgccaagacattctctgcctcatttcagaggctgctaaagaaacagtgtggtaacagagccacatgggagtacccatttgcagttgctggtgtaaatattacattcatgatcatgcagatgcttgatctccagtcaacaaagccaagaacatttgtccgagccatttttattcaaatgctttcagaggatgagtgggcattcgatctgctctactgcgtcgcatttgttgtgatggacaagcagtggcttgataagaatgcctcttacatggacttcaatgaggtactgaagtcaacgcgaacccagctggagagggagctcatgctggacgatgtgatgcggattgaagatatgccatcatacagcctgctttgctagtgaccaaaataccaaatgcgcaggagaagataactgagtttgtggttcaactgtatagcacctccttcctcttgatttctgggaagaattttttagcaactaagtagattgatggtgcactggtgtcatgctgaattggacctctgtagataagtcattagtgtattaccatgcagatgaattagtattgaaaccaaaaaaaaaaaaa

SEQ ID NO: 33701 - DNA, 714 bp, Setaria italica
  Peptide Sequence Number=SeqID_99675
cggaaggtgggaaggttcatgaaggttgacacatcctgataggtcaaagtattgcagcttttggaggcaaccaacgtttgtgggcagtgccttcagagaagtgtttgaaagtatcaaggtttgcaagtttaggagacggttcaaggatttaggaaagtttgggataggaaggttggaagcatcaagataccttaatagctttagtttacaaacagaacccggtagctctgacacatggcatccactcaaatccaaaactctcagaaataatgcgtgtgagaatgcttgcttaggaagatgaagtttattgcattccctgaaatgcatggccctaacctttggtggcaaagacttagaggatggagactcgttactattcatcaatagctgatagtgacaaatcaatttgccccccttagtagtgctgtttgccacaccatttgtgcaagataattcatcaccagcaacatgccttgcgagatcgtgtaccatatcatgcatacgaagtctaagtgtgggttcaaaactccttgaagccggcactgtaggagtcaaatttgttaggaaggacatccccaagaattcattaacatattccctaccaatcttctgaagtggttgttgcccattagtatcttgaataaaccccaaagcaatccattgctggatcaaaacaatcatgatctatatcatggttcttagggaagatagagc

SEQ ID NO: 33702 - DNA, 610 bp, Setaria italica
  Peptide Sequence Number=SeqID_99676
ataagtttagcaagagccttttctgtatgaagaagatttccattagtaaggacaacaaggccaaattggctttctgtacccaaaacaaagctcctgtcaacttttccgggatcaaacattattctatatccggttttcagatttccagatccaatttgtattataccttgtttctgtaaaccattgggaaagaaaacactaggttttcgttgctgatgcagattgattaaaaattttgcagcagcatccatgtcattatatttgaaatgcaggctcaatagactgtcataaaaatgctggtagtactgaagaaatggcaaagatgttaaagagtcgatgcttcttttcatttgtatcaactcatctcgttgcccaaccatctcaaagacacggctagcaatcaccactgtatttacatcggccacaactccgaccaatgacatcagttccattattttctgggccttgataatgcatttaaaattcacacatgactccaaaaccatattgaacaaggtggcattgttctttattggatcaagtttttcatttcccgtctatctgtaactggtccaagaactctcacaggtctcatcataacatcagtgac

SEQ ID NO: 33703 - DNA, 424 bp, Setaria italica
  Peptide Sequence Number=SeqID_99677
gccctctgatgtactttattatgtcaatgttttattctaagcttattgtaggatcatccctgacacacctggcacttgtgattgagtggttgactgggtttctacttttctatttacaccaactgcgccagacattatttgagaagcaagatgcatatatatactgttgaaactaaaagctaccattcaactagctgtctctagatatggtcatcctatgtagtcagttatggtgatggatcagaaatctgatgccatttatagtaaaaatgcaatagatgtgtcattgggttcataaaaattatcaagtgcagtatctcaagctaacttttcatttccacagatggagttacggactactctgttactggcagcaagtcaaaaggaatactggcggctcagacgtgtaaatctacagatatgc

SEQ ID NO: 33704 - DNA, 706 bp, Setaria italica
  Peptide Sequence Number=SeqID_99678
ttttttttaagtacaaaagaactagcacaaactggcaaaccattgattgatgaatatgctggcaagctatatctgccagcgcaaggttaggcatccacttacaggttacaacaagaacaggcagttgaggacacaggatggtgaaggaatacaacagttgagaaactctctcctaatgaacaacaagacatctcaaggtattaagcagcagcaggacacaattgttaactggaatctatacccacaggtattcagcaagaagcagcagacaactgttaacggagcggagcctatacccacatcttctttgtggcttccatcctctcgaggaggccctggatttcggtctgcatccgcagcttcatcttgtggtagtcgtagtgcgagttctcgagcatcttgagctcctccatcttcttcctccgcttctcctctgtctcctggaatcccagcttcgccagcttcgtggcatactcctcctccagcttctgggtcttggcgcgtacgatgtggcggtagctgtccacttccttcctggcatcgtcagcgagtttctggaacagttttgcctgatgaatatgctggcaagctatatctgccagcgcaaggttaggcatccacttacaggttacaacaagaacaggcagttgaggacacaggatggtgaaggaatacaacagttgagaaactctctcctaatgaacaa

SEQ ID NO: 33705 - DNA, 2313 bp, Setaria italica
  Peptide Sequence Number=SeqID_99679
ctccgacgacatgtcgtcggagttgccgctgccgcgccgccgcccaggcggacctacagcgccaacacggggcgcacgcgcagcatcaactccgacgacatgtcctactcctactcggtgttctcgcacaaccccagctgctccctcacgcacaactccaccgacatctacgccgccggggagggcaccaacggctccgtccacagccgcttcaacttccgccccatgggggacggcagcgtcgccttcgccactgcgccgctcaaggagggcacctcgtccttcttccccaccgagctccccgcgaggatggtagcgccggcagcggcgctcagcgcgggaggcagcttcgacggcagccgtggcgggatgcactcgtcgcggcctgataggatcctgagggagatcgtgtccgactctgtggcttccatggcgcaggtgctgcaggattttccgagtgaaacgctggaggtgctgcgggagacagtgcggaacatgattgatgctccagagaggagggatgaattgtcaagcctccagcggaagctggagcgtcgatcggacctgactgccgagacactggggcgggcgaacaagacgcagctggagatcctggtggccatcaagactggcatggccgtgtttgtgaccggcaagggacgagtatctagcagcgagcttgtggagatgttcctattgacgcgatgccgcaacctgaattgcaagagcgcactccctgtggacgactgtgagtgcaagatttgctccaccaagaaagggttctgcagtgcatgtatgtgcccagtgtgccagaagtttgattgtgctgcaaatacttgcagctgggttgggtgtgatgtctgctcccattggtgccatgctgcatgcgcactagagaggaacttgatcaggcctggcccaacattgaaggggactatgggtacaactgagatgcagttccagtgcctcggctgcaaccatgcttctgagatgtttggatttgttaaggaggtgttcaactgctgcgcagagaactggagtcctgagacgcagatgaaagagctggacttcgttaggaagatatttgcagctagtgaggattttgaggggaaggggctccatgccaaggcagaagaggtcctcagcatgcttgcaaagaaacttattaccccttctgatgcaacaagcagcatgctacaattctttaaatatggagttacggactactctgttactggcagcaagtcaaaaggaatactggcggctcagacgtgtaaatctacagatatgcttcatcttcaaaccccaaccatcaccccaccaaaatcatccttcaacttcaagcccagcacctccattcttgatacacagcttgaagcacttaaggccagtccaaagtcactccctattgagaaccatttcagctctgcctcaaaggatgatgatgcctccagcctggagaccatcgtgaagtgcaaggaagctgaggcaaaactgttccagaaactcgctgacgatgccaggaaggaagtggacagctaccgccacatcgtacgcgccaagacccagaagctggaggaggagtatgccacgaagctggcgaagctgggattccaggagacagaggagaagcggaggaagaagatggaggagctcaagatgctcgagaactcgcactacgactaccacaggtatcagcaagaagcagcagacaactgttaacggagcggagcctatacccacatcttctttgtggcttccatcctctcgaggaggccctggatttcggtctgcatccgcagcttcatcttgtggtagtcgtagtgcgagttctcgagcatcttgagctcctccatcttcttcctccgcttctcctctgtctcctggaatcccagcttcgccagcttcgtggcatactcctcctccagcttctgggtcttggcgcgtacgatgtggcggtagctgtccacttccttcctggcatcgtcagcgagtttctggaacagttttgcctcagcttccttgcacttcacgatggtctccaggctggaggcatcatcatcctttgaggcagagctgaaatggttctcaatagggagtgactttggactggccttaagtgcttcaagctgtgtatcaagaatggaggtgctgggcttgaagttgaaggatgattttggtggggtgatggttgggttgagatgaagcatatctgtagatttacaacattgaagggggactatgggtacaactgagatgcagttccagtgcctcggctgcaaccatgcttctgagattgtttggtattttagg

SEQ ID NO: 33706 - DNA, 243 bp, Setaria italica
  Peptide Sequence Number=SeqID_99680
ccgcgcgaacttctccatccgctggccgatctcccgcatcacgcgctgcacggcggccgtcggcgcggacggcgcggcggacaccacggtggtgatggacaggtgcggcgtgtcgtcggcggaccgcgtggcgagcgcctcgagcagcgtcggccactgcgtgcaaaacgtgttgctgaggtcgaggatgtggaaccgctgcggctccggcgacgccgcggcggcctcgaggaaggactccag

SEQ ID NO: 33707 - DNA, 462 bp, Setaria italica
  Peptide Sequence Number=SeqID_99681
acgggagctactcggcgagctccccgacgtcgccgggcagctgcattgccgtcgccgtcgccaccttcctcctgcccgtgagcacctggagcacgatgaccccgaacgcgtagacgtcgctcttctccgagagccggcccacggtggtgtactccggcgctaggtaccccatggcggcgctggccttgagcgtggagaagacgaggtcgtcgacgaggagcttgtgcaggccgcacccggagatgagcggccggtaggtgtagtccagaaggaccttgtccgccgagatgctctggtggacgagcgcgggcttgcccggtctcgtgctgtgcagatactcaatccctgcaaatgcaaaagtcggcaaattttagatggttgcgaatttgaaaattcaccgtttcttttctcacgctgctgatagcagtgagtacagtgagatgattgctgacctacaactat

SEQ ID NO: 33708 - DNA, 855 bp, Setaria italica
  Peptide Sequence Number=SeqID_99682
actagcaggttctaaaagagtatgagttcactgcaacatacttgctgttacaatgctccacaataactatagcatatcatatagcaagtcaaccttcagcagttaactactgatgtcagttgtaacataggttcattatatatataaggcaaggcctgaaacagagtcaaattgttctttcctgctcatgggctaacagaagcaagattggctaccgcctgccaggtcaagatatcaggatggtgtagaacaaaaaccagacccacacaatttagtgcctagcaccggccatgtgagcccaccatacgaggagagtgggagaactgcaggttcaaattgcgtgaatgatgatcctgttcgtcaaacttataaccttgaagagttctcatagcgagaaaagcatgtgcaggagtggcaaaatcaacaaagcatattaaatgtctactagaccctttgttgaccagtctcacttcgcggtaccccatatattggcgaaagatatgtgcaacttcccgtctagtagtgtttgtagggagaccgtcaacataaatggtgcttgttgcatctttaggaagagagggcatagacgcaccacgcgaccaaaaatagtcaatgggcccaatcacctcaataataaaggatgaaacgcagaaaaaaaggacagatggattgacagcatatgaatatatagtatagttgaccagtggaaaaggaatgacaagtcagaaaaatatcagaaagagaaatcatcaacacacaaggatacgtgtctaactttcccgttctagtagtgtttgtagggagaccgtcaacataaatggtgcttgttgcatctttaggaagaagaagggacaa

SEQ ID NO: 33709 - DNA, 121 bp, Setaria italica
  Peptide Sequence Number=SeqID_99683
attttgcaaaaggtccaggaacttggccatatggggtatgtcgaccgtagtactcccccacggtcggatcttaaactatggtgattttctacttcaaccttaaatatcttgaatttatcca

SEQ ID NO: 33710 - DNA, 266 bp, Setaria italica
  Peptide Sequence Number=SeqID_99684
tttttttttttttctttgatcacatctttcaattagtttagagcaaccagtttggggaagaacaccatgtatgatagcagaaagtggagctctttatttcaagttgctttggcaagccaaactagagatatctacacattgctcaccattgaacggccttcttcaccccaatggacatagaattacaaagaacaaatcaacatgcaagagattctagcatggtgaatggaccaggccataccagaagttgtacttttacacggcag

SEQ ID NO: 33711 - DNA, 434 bp, Setaria italica
  Peptide Sequence Number=SeqID_99685
tgttgcatggcaagacgcatggcccaaacatgcagctttgggtggcaatgaatgcaggaaggaaagaaaatggtctcaataatgaaatagattgtcatgttttctgtatgttttgtagcttcggggaaattatgtagtgggttaatttatttgcacaacaaaacagaactcaagtattcttaaatgctagtatattgcccatgacacacctttctggaaagtagagtatagcactcttttatcattgtctctccacttccctttcctaccttggagacctatctgcatcttacaggattctttggttcagtagatttaacctgcaaatagttagtctcttgtgggaatattgcaaatgggatatgaatgctcgacctaaaatacttacaactaatttgtgtgaacttcggatgagtctaaatgaagtttattcc

SEQ ID NO: 33712 - DNA, 228 bp, Setaria italica
  Peptide Sequence Number=SeqID_99686
atgtaaaggcttggactacatgtccaggcatagaaggaattattgcatctgtggcagcttcctcagggaatgtctgaactagagttgtctggtgagtcttgtaaaattccataactttctcattcttcaatactgcatcccagacatttctatctgatgcaagggaggcgacaacactctgagcctcagggacgccatagagagggcgtatttcaatgagtcgccagt

SEQ ID NO: 33713 - DNA, 235 bp, Setaria italica
  Peptide Sequence Number=SeqID_99687
ttatcgaccacgtccatcatcgtcttcttcgccttgtccacaaagtctgcgaaaggtgagccggtgggtgcattttcagaggtggcatcttcaaacttctcaggcgattctactgtggcagcttcctcagggaatgtctgaactagagctgtgtcacagaagataacaagtcatacgtgtagctatcgatgatgattcatatataactctggctaaagaattatgaggtacatta

SEQ ID NO: 33714 - DNA, 283 bp, Setaria italica
  Peptide Sequence Number=SeqID_99688
ttgaaatacgccctctctatggcgtccctgagctcggtggtggcctcctcggcctcctccctcgacggcggcgcgaagaccagcctgggcttcgcggcggccgccgccgcctccctctccgccaccacgacggacgccgcgtcgtccctccagtccgcgaactcccagtcgtccagctcccaggacgccgcccactgcgctgccgcggggggcacctcggcgcccgaggcggaggagaccagcggcgcggcctcggcacccgaggccgcggcgggggccgtgg

SEQ ID NO: 33715 - DNA, 162 bp, Setaria italica
  Peptide Sequence Number=SeqID_99689
ctttggcagagatgggcccttctcagctgaggagcctgctccagcctgggcttcccctgggggatgcaacaagtcctggaagaagacgatgatggacgtggtcgataatataacccacttcttccagcctgggcttcccctgggggatgcaacaagtcctgg

SEQ ID NO: 33716 - DNA, 625 bp, Setaria italica
  Peptide Sequence Number=SeqID_99690
tacaggctatcttgcttattgaaactctgtaactgcaaaccaaatactacacatagaacttgcctaatgcagaccacacaacaataaacaaacatacatacatcaaccgatttcttccaagtctataacaaaagcagacacagcaagacaacaaataaatagcaatgtattatattattatcctagcaaattcagtggcattttattgatggcaagtgactttgtttgaagtgatacctataaaggtgtcaaatgattgattttccaatctgtttacaggggtcattgcaacaactgaaaaaaagatcaagcatagcatcaagaaaataatacagctacaaacctgagcctctgggcttgatttcagcaatgtaaaggcttggactacatgtccaggcatagaaggaattattgcatctgttgccagcttattcagttctttatcttgttccttaacaacctcaactggcgactcattgaaatacgccctggaaaaatatattttatgaggactgggttaatacatccaaaccaaatgtcaataaaaaggtgtcactggagattcaacagattcacaagtcatcgacatatttaagacatcaagacagaactacgaaaaagtaaa

SEQ ID NO: 33717 - DNA, 269 bp, Setaria italica
  Peptide Sequence Number=SeqID_99691
cagccatggagagggagtcggcgccggcgacggcggagctcgagatcccgggggagtgccagtactccggcgagccggcggtggtgcggccgtgccagcccacgccgcggcacacgctgtacctgtccaacctcgacgaccagcggttcctccgcttctccatcaagtacctctacgtgttcgccgcccccgccgccgtgcccaccgacgccctgcgcgcggcgctcgccagggtgctcgtcgactactacccgctcgccggccgcccg

SEQ ID NO: 33718 - DNA, 275 bp, Setaria italica
  Peptide Sequence Number=SeqID_99692
gacgacccggtcggcctgcaccgtcatgttcatccgcacggtggccgcgccccggctcggcacggtccccgcggggacctcgccgtagcccacggccgcgccgcggtagtagagcgacgtggtggcggggccgtggcggaacgcggccgggttcgggttccgcacgcggaccacgaggaggaaggtgacgttgagctgcacggagacggtggggagcgggacgacgccggggaggacgcccgtggcgttgaccgagaggagctccgtgacggggt

SEQ ID NO: 33719 - DNA, 325 bp, Setaria italica
  Peptide Sequence Number=SeqID_99693
taactgacccatccaacatccatcgtcctccccctcccggcgcggcggcgcggcaacgccaccgtccgtccgacgccgccttcctacttcctccgccgccctcgcggtgaccgtatcgaaggaagtgtcgcgccgtccactgtcggcctctctccgccggacgcgcctccttccaccgaagcgaagcactccatccacttcggaggaattcgtcctctctactcgttcctcatcctgctgtcttcttctggaccagcgtggagcggagatcttcctgtgccaggccaccgctcgctcgcccgtcgctcggccacaagccgcatcg

SEQ ID NO: 33720 - DNA, 472 bp, Setaria italica
  Peptide Sequence Number=SeqID_99694
ctgatgctgatgatgtccgcagttgtgctgcaaaagtgttagcgctgcaattagatctcgtggatgtgatcttctcaaagatctgctgcaggctgatgctgatgatgtccgcagttgtgctgcaaaagtgattggcacattgtctctggtaattataattttcattgttttcatctgttagatccctttcatgttttattccctctttactagtccattattgatgtgtcataaaggttgacggtatcacaaataatgtttcatatttgtctaactagtgtttgagctgtaccaaaaaaaactacaatctgctgactctaaaagaaaaggccaattattttcaacacgtaactcaatatactgccatgtgactgtttttagcaaaaagattgtcaagtgagaagttccattacaatgaggcaatgtttttcttaagttagaaggttaaagtaaaattagtttaaagtaagta

SEQ ID NO: 33721 - DNA, 475 bp, Setaria italica
  Peptide Sequence Number=SeqID_99695
gtggatcctatacctgaagtcagggcagtggcttctcgagctcttgggtctcttataagtggaatgggtgaagaaatcttcccagatcttgtgccatggttattagatactctaaaatcagatagtagtaatgttgaacgatctggtgctgcccaggggctgagtgaggttttagctgctcttggccaagattatttcgatcgtattcttcctgacatcatccggaactgttcccaccagaaggcttctgttcgtgatggacatcttacacttttccggtatttgccgaggtccttgggtggtgtattccagaactacctgcaggccgttcttcctgctatattagatgggcttgctgatgagaatgaatctgttcgtgatgctgcactttctgctggtcatgtctttgtggagcactatgccgcattcgttcctttaccttcttgtttgtctttccttgttcttatttgtaggt

SEQ ID NO: 33722 - DNA, 5688 bp, Setaria italica
  Peptide Sequence Number=SeqID_99696
cttggccctggtgttgaatttggagatacgcactggcttggaaggcagggtatagcattagcactccactctattgctgatgttttggcctctaaagatcttcctgttgtcatgacgtttctcatatcacgtgccctggctgatccaaatgttgatgttcgtggtagaatgattaatgctggcatccttattattgataggcatggaaaggaaaatgtgcctttgcttatttccttatttttgagagctacttgaataagaaggcatcggatgaggaaacgtatgatcttgtgagggaaggtgttgttattttcactggtgctctggcgaaacatctatcaaaggatgatcctaaagttcacagtgttattgagaagttgttagatgtccttaacaccccatcagaggcagttcaacgtgctgtctcagattgtttgtctccacttatggtctccaaacaggaagagggtcaagctcttgtttctagactcttggatcggatgatgaaatgtgaaaagtatggcgagcgacgtggtgcagcctttggccttgctggggtagttaaaggatttggaatttcttccttgaaaaaatacggtattgctacaacattgcgacaaagtttggaagacagaatgtctgcaaaatctcgtgaaggagctttacttggatttgagtgcctgtgtgagaagctcggcagactatttgagccgtatgtcattcaaatgctacccttgctacttgtggctttctctgatcaagtcctggcagtgcgtgaagctgctgagtgtgctgctcgggcaatgatgtctcagctcactggtcctggtgtgaagctcgtccttccttcacttcttaagggtctagaagataaagcatggcgtactaagcaaagcagtgttcaacttcttggtgccatggcatattgtgctcctcagcaactgtctcagtgtcttccgaagattgttccaaagttaacagaggtactaacagacacacatcccaaagtgcaagcggcgggacagacagctctccaggaggttggaagtgtcataaagaatccagaaatatctgcacttgttcctattcttctgtcagctctgatggatccaaatgaccacactaaacattctcttgacatccttcttcagactacttttattaattcgatagatgcaccatcgcttgcattgcttgtgcctattgtgcatagaggactgagggagaggggtgttgagactaaaaagaaagctgctcaaatagttggaaacatgtcttctttagttacagaaccaaaggatatgatcccatacattggtttgctcctaccagaagtgaagaaggttctagtggatcctatacctgaagtcagggcagtggcttctcgagctcttgggtctcttataagtggaatgggtgaagaaatcttcccagatcttgtgccatggttattagatactctaaaatcagatagtagtaatgttgaacgatctggtgctgcccaggggctgagtgaggttttagctgctcttggccaagattatttcgatcgtattcttcctgacatcatccggaactgttcccaccagaaggcttctgttcgtgatggacatcttacacttttccggtatttgccgaggtccttgggtggtgtattccagaactacctgcaggccgttcttcctgctatattagatgggcttgctgatgagaatgaatctgttcgtgatgctgcactttctgctggtcatgtctttgtggagcactatgccgcatcgtccttacctctgttgcttcctgctattgaggacgggatcttcagtgataattggcgtatccgacaaagttctgttgaacttcttggagatctcttgtttaaggttgctggaacttctgggaaggcaatccttgagggtggaagcgatgatgaaggtgctagtacagaggctcaggggcgtgcaattattgaagtactcggaagggagaaacgcaatgaagttcttgctgccatttatatggtccgttctgatgtcagtttgactgtccggcaggctgcactacacgtctggaagacaattgtagcaaatactccaagaactctaaaagaaataatgccagtacttatggacacactaatttcatctcttgcatcatcttcctcagaaaggcgtcaggttgctgggagatcacttggtgagcttgtaaggaagcttggtgagagagttttgccctctattattccaatcctgtcacagggactcaaagatccaaatgctagcagaagacaaggagtctgcattggtttgagtgaggttatgggcagcgctggaaaacatcagctattaagttttatggatgaacttatccctactattcgtactgctctatgtgacagcacccaagaggtccgtgaatctgctgggttagcgtttagtactctgtataagagtgctggattgcaagccattgatgagattgtccccacattgctacgggctttggaagatgatgatacatctgcaacagcccttgatggtctaaagcagattttaagcgtcagaactgcagctgttttgccccatatactgcccaaattagtccagccccccctctcttcattcaatgcacatgcattgggtgctctagcagaggttgctggaccaggtttgaattcacatattggaactgtcctcccagcattgattcttgctatggatgatgaagatgcggatgtacaaaactcagccaggaaagctgctgaaactgttttgttggtcattgatgaggaaggagttgaaactttgatacctgagcttctaagaggaatcaatgacagtcaggcatcaatgaggcggggctcagcctatctaattggtttcctctttaaaaatactaaattatatctggctgatgaggcttctgatatgatgtcaaccctaattattttgctgagtgataccgacaaagctactgtatcggctgctttggaagcattttcaagagttgttggctctattccaaaggaacagctcccgacacatataaaattagtgcgtgatgctgtctctactgccagagataaagagcgtagaaggcgaaagggtgcgcctgttctcgtgcctggtttatgtcttcccaaagcactgcagcctttccttcctatatttcaacagggtttaattagtgggacggccgaaacaaaggaacaggcagctgaaggtcttggagagttaattgacgtgacaagcgagaaaactcttaaggaggttgttgtgccaattacaggacctcttattcgcatccttggcgatcggtttccatggcaagttaagtcagctatcctatcaacccttacaatcatcatcacgaaaggaggaattgcactcaagcccttccttccacaacttcagactacatttgtaaaatgtctacatgataccaataggtctgtccgtacgagggctgcagctgcccttggaaagcttagtgcacttagcacacgggtggatcctttagttagcgatcttctgtccatgttgcagtcaggagatgaatctgtcaaagaaagtgtgctttctgcgcttaaaggtgttatcaaacatgctggcaaaagtgttagcgctgcaattagatctcgtggatgtgatcttctcaaagatctgctgcaggctgatgctgatgatgtccgcagttgtgctgcaaaagtgattggcacattgtctctgtacatggaggagactgagatttcagatttggtgcaaatcctgttgaacatgagcacctcaccagactggtgtaccaggcatggtgctttgttaggattctcatctatatcaatgcattctccatcaaaattgtgtcatttggcatcctttccatctcttgttgatcttctgaaagattctcttaaagacgacaagttccctgttcgtgaagttgccacaagaactctgggtaggatactctgtttccagttacagttggaagccggtaccttgcaactggttcagttgcttgtcttagctttgcgtgatgattcaagcgaagttaggaggagatctttgtcgtgtatcaaagctgctgcaaagataaaccattcagctctcgctacacaccactcaatattgggctcggcaattgctgatgctttgaaggactctagcatgcctgtacgtctagcagcggaacgctgtgcccttcatgttttccaattgactaaagggccagataatgttacagctgcgcaaaaataccttggcatgactggcttggaagtaaagaaaattgcaaagcttaacgaggagagtgatggaagtgagagcagtgatgatgacaagagggcataaaccctattctcagtttcagtcatatatatgacctttacatatagttgctacattgatagtggaagatggggtcgtttttctgtctgacccttgttgtggacatcttttttgacaacagagtagcagaggaaaacacatcggcattgttcatatttcttgcgacaaaccaacaatgtttatggtacgtcactattatagtgttgaaggtattcaatctacaattctggctaccaagtgtttcttggaacattctgagtcggaacttgttcatttcaattggacgggcaaattttgtgcactcaacatttttattgcaaacaatctgattctttagctctagcacaatcatctcagttctacaataatgcacgccaatgtaaacacacgtaaatcctcgggctttccttgttcctaccatctctcgtccccctcccagttattcttctccttgggcccggttggcccttcctccctggacagctcgttgggcatcttgttcagcatcttctccgctcggcacttgagccggagaggtagcttcccggtcatccactccatccgcttcctcgacttgtacaccaccgtcgggccccactcccgcatgaagtgcagccactgcggctcggcgacggcgccctcgcccaggtactccgccgccacgatgcggtacttggcgctggagtccacgaacaacctgctccgggcggcgtcgttgcggatgccgatcccgagcgccgccgagccctgcaggtacacgccggggtacgcgtagctcgcgtgcccgttcctggacgaatacaccacggggcggttgccgtcggtgtactcgagcgccgacgcgtccacccagtgcccgccactgtgctgcgagtagtacacgcccatgagctcgccagtgaggttgctgacgcggagcgtgaagtgctcccagtccccgacgtgccgcccggtcttgcccagcgggaggctgaccgggccgagcttgagccgcgccgggccgttgaacgggcagaacacccacatggccacgtcggtgcacgcgccgcccatggccggcttcacgtgcgcgtagagctccgcgctgtcgatgtcgccgcggcacacggcgcggccccgctcgccgctggggacgtcgatccagcactccccgtcgttgcacccgccgcccgggaggttggacccctcgccgtcgatctcctcccccacggcgtccccgccgcgcttgtacagcgcggcgccgttcttgaagaaccagcagacggacgacggcaggtacacctccttggggtggaagaacagcgtggggccgtagtgccggatcaccgcgtgcgcctgctccagc

SEQ ID NO: 33723 - DNA, 641 bp, Setaria italica
  Peptide Sequence Number=SeqID_99697
gaggtcggccgtcgccctgctcccgtcgtactccttggtcatgagcagtcggatgtgaaacgcgcccacgccgtgcgcgtccacggccgccgcctgctgctggctcgtgacattccgcttgatctccaggacgtcctcgccggtggtcacctcgatgtcgctagccgacagccccggcacctggagccacagcgtgacgcggtcatcctcctccttgatgtcccaccgctccttcccgtccggcggtggcacggggcacagcagagcggtgggcgggatgctgaacgccggcggccgttctttgtccgggagcgcacaggtcaccgtaagtggccgccggcacttgacggctgcggaaggtcggaatgccgccaccgctggcctccatgaaccacgggctagcacgagaggggaggccggcagaaccggtgaccggctggctgcggccgtataagatgatcccataatcgtcgacatctagctacaccagtgagtaatggagaggaaggtctagttggagggagttttatttatactgctcatatatggtagtatcaaagaagcgtttatatttatagactgctgatagggagggcagcgagtgagaaacgctcatccatgctggcttgggcacctttgct

SEQ ID NO: 33724 - DNA, 342 bp, Setaria italica
  Peptide Sequence Number=SeqID_99698
tctgaattgaacgctgccaactcattttattcattcccccagaggacaaagcaaaacgcatttttagcagtattatatatcacaccatccttacacagattactaaaacgactagcatcatatcatagagcaaatccaacagcacaacacacgcaacccgctgcccacgatctcacctcgcggggtgcacggcggggcagttcagaaatcggagcagcggccgccgcgctcccagtcgccgtaccgcgtcggctcgggcccgcgcgggccgccgatctcgccggtagccttgttcacgtgcatgccgctatcgttatcctcctcctctgccgccgccgccgc

SEQ ID NO: 33725 - DNA, 519 bp, Setaria italica
  Peptide Sequence Number=SeqID_99699
tttaagtaaaaaacttgatgtcatttcttaaacataatcgattaattatttcatctattgtatcggtgacaattgacccaatgctcgtagaagggaaatcagcaatttattatgaaattttctaatcattcagatatgaggactgggcgatgatgtcttggatgccaaagaggctatataatctgcagcttcataaagctccttcctcctctgagcaatcgttgcttccatgaactctttatgctcagcgatggattcaagaagttgcagcaactcggtagcagctgcctgagtttcttcatcattttttagtattgcatcttgaagcctcttctctgaattcttcaaaaattcgtctgcctccatttccaccgacctcatcgcattgtactttttctccaactcatctttcatgcgtctagcctcagctgtgcatcttgagtcatcatttgtgatttcaccatccagcaaattcaaacgagcaaccatccagtcgtgtttagcctggagagtggaaat

SEQ ID NO: 33726 - DNA, 769 bp, Setaria italica
  Peptide Sequence Number=SeqID_99700
ggataaaggcataagggcagttataccttatgttgtagtaaggtagcatgggatatgttgttcggcaatacctaagacacaataataagatcaaagcttctctcaagtacacctcaatggtgactaaagcgatatatacagtcacagcaacaaccaaataataataaccactcagcattcaacataattagctccttcaggtgaaacgaactaacataggccatagcgatgatcttatgacctcaaggaagcgcagctggtcagaagggaaatcagcaatttattatgaaattttctaatcattcagatgtgaggactgggcgatgatgtcttggatgccaaagaggctatataatctgcagcttcataaagctccttcctcctctgagcaattgttgcttccatgaactctttatgctcagcaatggattcaagaagttgcagcaactcggtagcagctgcctgagtttcttcatcattttttagtattgcatcttgaagcctcttctctgaatcctcgcggggtgcacgcggggcagttcagaaatcggagcagcggccgccgcgctcccagtcgccgtaccgcgtcggctcgggcccgcgcgggccgccgatctcgccggtagccttgttcacgtgcatgccgctatcgttatcctcctcctctgccgccgccgccgccttcccctcgccagcgtcggcagcgcccttgtctcccgcggcttcctctccctccgccttcctggcggcctccggcggcggcggatcc

SEQ ID NO: 33727 - DNA, 1695 bp, Setaria italica
  Peptide Sequence Number=SeqID_99701
aactaactttaaataagaactaacaagacaaattagaatacaagacaagttagacaagcagctctgtagcagctgcctgagtttcttcatcattttttagtattgcatcttgaagcctcttctctgaattcttcaaaaattcgtctgcctccttctccaccgaccttatcgcattgtactttttctccaactcatctttcatgcgtctagcctcagctgtgcatcttgagtcatcatttgtgatttcaccatccagcaaattcaaacgagcaaccatcttgtcatgtttagtctggagactggaaatattactcttttcctcctctaggattttagcacttccttgcaactgcttttgtagatcaactgactctgcaagatttgagacaatgatccttttgttctcctcggcatgagccataagtgcaggtttcagtactgttttgtaaccagggcctagcatctcagcaggtgaggatccttttgaatttatcatgtactgaaaatcaataacaggtttcaaccttttgagggcttggttgcattgctcggcgagtccctcaagctcctcgagcttggtaaccagcttggcttctagctcccaggccttatcctccagtgccgctttcccattttcagcattggcaatgtcacgttcaatcaccagcatctccctgtgcatcctctccatatccctcacattcaccgcctgaccatccaccttcttcagcagctcctcgttttcagcagcagtgcgtcgagcatccaacacttttgcctccaactccttttccagatccaccaacgcctcgtccctttcgtcgatcttagttttccaggtcttcaccaccgcctcaaacttgtgaacgtctgcagttaaggcctccttctgtgcctccagtgcctcccgccgcaagggaccagaggtgagcttattcacctcggcctccaattcctgcgcatccttctccagagcacggaactttgcaacggcagcctcaccgtccatccgggctttggagaggtactcctcgtcgagggcttcgacagcgtcgtcgtcccccgacaagaagtggcagtagccctgggtggtgtagagcagcaggtcgttgggtggggcttcggcggcggaagaggcatccgcatcggagtactgggcgaagagggtgagccagtggagtacggcgaggagcggcggccacgagtgcggggtgccgggggccttgagcgcggagcgggtgatcttgtgggggcatccgagcaagcggagggcctggatgaggtcgtcctcgaaggtcgcctcgttgggagggaagtcgatgcgctcgaggaggaggcggagcgcggcctggatgtcacgcgcggcggggagcggcccgcggagcgtgacggcgggggagaggtagccgttgacgatgcggagcgcggcggcctgcgtggcccggtcagagaagttggggccggcgccgacgcccacgccgacggaggaagcggggcggctgctgcagaggctggcggcgtcggagtcgcggcgggagaaggcggagtcgaggttgcggatagggatggcgctggagtccagcgccggggtggcatcgatcgcggagggcgccagggaggacttggggagccgccgcccgccgccgccgccgccgccaccacggcgcatggtcgccgcggatcttgagattttgg

SEQ ID NO: 33728 - DNA, 690 bp, Setaria italica
  Peptide Sequence Number=SeqID_99702
cgccacctcttttcctctttctcatcatggggatgccaccctcacatggccagaggaagaagagccaaaaaacaatcccctctgtattccactcaccaccttgaagaaacaaacatacacccctaccatcaaaatgccataccatgccccaatgcctttgtccagacgctcctaccatgctttcccatcagtaatcatccttcttcttgaccaggctccgggcgaaaagcaagcagatgaccaggaaacccacgcctacggctccccccagcacaatggctacagtctttgctgtctgctgccctcccatgcctccgccatggggcacgccgtgcgggtagtaactgtagctaatgtagcacttgtcgaggtacacctggccggagggggcgccgccgcactcgacctcgacgtgctgcacggcctgggtgacgcactggccgcagtccgccgtggagagatcgccctcgcactgcgccatggcgtagactgcctggtagctggtggcgatgaagccgccgttgctggtggcgacgccgccctcgagcgcggcgaaggcggtgtcccggcgcatctcgaagtcgccaccgccgccgctgcccgtgccgcaggtcttgaagagcatctggacgccggagacctgggggaagccggagacctcgtagagtgcgaggcagccggtgagctgga

SEQ ID NO: 33729 - DNA, 353 bp, Setaria italica
  Peptide Sequence Number=SeqID_99703
gggagggggagccgcgcgccgcccccgacggaggctgcccgcggcatcgaccatgctgcggcagcccggttccgcgccccgaccgtctcgccggcgttggcggcccctcctcggtgcccgttctcccggtcggccgagatgccaagctccgccccagccggtgaaatggtggcctatggcgctgacgccggcaggccggcccggacagcaggcggtggccgagcgacgccccaggcgccatcctccccctcgccggcggcagctcccgcccgccccgactcaccagccgatggcccatggcgacgatatcctggcaatcgaggcagggagagaggagagggaagagaacggca

SEQ ID NO: 33730 - DNA, 240 bp, Setaria italica
  Peptide Sequence Number=SeqID_99704
ggatggggccagtgagcgcgttgccgctgatgtcaagaacggcgaggcggcggcaccgccacaggtcgtcggggacgccgccggtcagattggcatcggaaaccacgaacgagacgagcccgggcagcgcggcgcagaggcccgccgggaccgggaccgcgaggtgcacggactggaaggacacggatgttacgacgccgccgccgccgtcgcaggagacgtgggaccagttgcacgggg

SEQ ID NO: 33731 - DNA, 223 bp, Setaria italica
  Peptide Sequence Number=SeqID_99705
aacatgtgcaatagggcatggcatttcgacagctaaataaaagaaataacatatgcatattttgtagaagaaaaggaagcagcatgagacaagcatatgacaatgtgaataccatattgaggatttttgtggctctgttgtgcttccatttgacagtcctgcagctgctgctcctgctccaactgtggaatttgacaaacggtgtactcagtgtaatcatcga

SEQ ID NO: 33732 - DNA, 1495 bp, Setaria italica
  Peptide Sequence Number=SeqID_99706
cttaaaatttgctcttcgtgtaatataaatccaatacgacagatgatcgatgctaccttgtgctatccatgtagctaggacaaagaaagttggggcaaaaacaaaatccctgtcctacagccttgaaccagcgaacaaggaaaaagaaattcctgtggtcaacatgtgtctttgatttagtatagtacaagtatactgaattctagcacttcaaacgtcttcaggttgccaatggtagtcaacggtagccacctggcaaaacacgccggtttcaagactcgcacatcacaaatctaatgtcactggatgatgtgctccttgaccatcactcatgctttacttatgatgtcagcatattgaggatttttgtggctctgttgtgcttccatttgacagtcctgcagctgctgctcctgctccaactgtggaatttgacaaacggtgtactcagtgtaatcatcgacagtcaacggagcctccacttgaccattctgttgttctcccatctgaaagtcctgctctgatggaagaatgtcttctatttcgcaaccaagaagcatatcatcccagtcagatagagcagaggtgttagtaaaaaggtgcccagatgaagccagaagatctacactgttagaagttgtttctgcatccatgggcacagcactttcagggcttgaaactggttgtgcagtagctgaagaaaaagttccatttactctgagattacgcaacaggggtttcaggaatgggaggattgtactgtataatttgtgcgcttgcaccagaagtctcctgatcagccacaggaccctgttccagagcacggaatctcctttttctgctcccatcatcattccaccaattactcctgcgctgttgctgcaccagctgattgaggaaatttggattctggacaactattgccaaaagtgccatcatctgctgctggttctgttccatcacacgaagacgttgaattaaattctgcacttcaaggctagacgattgctggtactgcctgagatctactagctgctgcattagaagggctttatctctcttaagggtttcaacctccttttcaagacctccatattttcctatttcaatattttcagtgccaggcgcagttttgacaggtgccggctgcagatcactaggcgcatcctgagcggatttcttctttctcttgatggtctttagaagatgtttttggcccttaacaaaaccttcattagcccattcccatctatcaggatcgactttatgaaatccataggtgttgagctggcgtatgaagctggtgaagtggttgtgcttgaagtgccgcggcagcaggtcgcgctcgaaggcgtgcgagtcccagatcacgaagctgccgccgccagcggcccaggagatgaccgcgtcggtcgccgggtcggagaccatgtcgtagaccttggtcaggaacggcgccacgtccggaggcctcggcaccacccccaccggcgcc

SEQ ID NO: 33733 - DNA, 671 bp, Setaria italica
  Peptide Sequence Number=SeqID_99707
ctcttcgtgtatataaatccaatacgacagatgatcgatgctaccttgtgctatccatgtagctaggacaaagaaagttggggcaaaaacaaaatccctgtcctacagccttgaaccagcgaacaaggaaaagaaattcctgtggtcaacatgtgtctttgatttagtatagtacaagtatactgaattctagcacttcaaacgtcttcaggttgccaatggtagtcaacggtagccacctggcaaaacacgccggtttcaagactcgcacatcacaaatctgcagaaattgaaaccagtaataagaaccacattacaacaatggcaaaaaaaaccactaagttcaacaagacaaccagaacattttcagaaaagaaaagaagaaaaaataataaaaatgaatgagaagactgaagatgaacttggtgtactaaatgcacagtttccaggacagttttcatagggtttctatgtagttacaataaatgcaaagatgcttttttgtgcaatagaaattagtgaagcttattttagtcagcatccaagaaatgcctatgttcctggcaaatgctaaatgagtggatctgtgtagcattagatacaaaaagtgaagacacccatatcaacatgggtttgatgccacagagggttacttagagatagggcagcat

SEQ ID NO: 33734 - DNA, 342 bp, Setaria italica
  misc_feature (255)..(255): n is a, c, g, or t
  Peptide Sequence Number=SeqID_99708
ttaaatccaaagggttgtttaccggagaatggggatttaagaatagctttgcctactgttggtgcgtcaatagtcgtgtcattgtttggaatagcccatctactggcaaggaactcattgatagatattgcattttggctatacatcataggagatgcccagtaaccccagatccaccatggtttgatgtcatttctacggatgacaaatcctccaaagatgaaaatcataagcagcacgaacatcccaaaagtnttggccacgaccattgttttcaaaattgctccaaggaatcggaacaaagccattgccatttgatgtgtggcaaagaaagctataaac

SEQ ID NO: 33735 - DNA, 511 bp, Setaria italica
  Peptide Sequence Number=SeqID_99709
gaacctaaaacagaaaacatttgagtaaaagaacaagaagaaactaaacaatactatggaaatatcataaaaataagtgcattataacttcttactgtttgtaataccaacacctttaaactcttctccccaaggatcaataactgatagcagggcaataataacagctctctttattagtccaaaatgaaagaggccgcgtaagaatgcgcagacctgggaaaataatgtgtttacatctcaactatacaacatgaacatgtataccaaatatacaacattattagatatacatacctgcctagtttttacccagacccatgtcatcagcgagtattaccccactgtccttgcagtgcatggaccataaccatctgattccttctcgttgatgcagaaaaagatcatcgtgtacaaggtaaggaagatggaagtcttccattctactgttatatatagcccttcagagtaatatccggaaggctgtgatcatgatgaagaacaacagata

SEQ ID NO: 33736 - DNA, 335 bp, Setaria italica
  misc_feature (99)..(99): n is a, c, g, or t
  Peptide Sequence Number=SeqID_99710
taatgaataaacaaaatgaatttaaaacaatacgagggcacactctgctatccaaatgaaccaatacaccatctaagcagaaatactagcattaaaacncaagcagaactgtaccataaaaatccaagacataattactctaaattatctaacgaactggaaatcatagctgattggaatgcaagctgattggaatccaagacatagttacccacatgagcatagctgattggaatgcaagctgaagagtatatgcagcagaaagttgaactggtccacactcaaacaggtataaagtagaaacaatagggagactgtacagatcatggaaacat

SEQ ID NO: 33737 - DNA, 260 bp, Setaria italica
  misc_feature (16)..(16): n is a, c, g, or t
  Peptide Sequence Number=SeqID_99711
gtcaaattgggccggngaaacggcagcaggttgatggaatggagctcgctcgatcaggggaggggaagggggggagtgtgggtggcctgtgggtgtgggggaggggaagggggaatcggagcgggagtgatgagattttccgcgcacgcttttctcttttggggagagtggctttgatgagggagcgcgacgcgagtgcctttgcgacgcccaggcctcggcaactcggcaaggcgccgcgcccctgttcttgtagcgag

SEQ ID NO: 33738 - DNA, 373 bp, Setaria italica
  Peptide Sequence Number=SeqID_99712
tgccaaaggcgccctcagtgtttgagggctttgattacaatatgtatagtttaattgaaatctttctcttcaaataatcgagacagattcaattgtcaatagttagagggacggaagctagcactgtgtgaggcttgtagcctgccattaattacctcctcccatgctccatatccctgcaggaagtcatgacttgctgaaaagcagaagaggttaaatataagagcgagcaaggatgaactctggcaggaagtttggcggtgggcgcccaccaacaggaactccttcccttgcattgtcttcagttgtgattgctctctcactcctcgctggtgccttccattagctgctgatttcatccttctcactggtt

SEQ ID NO: 33739 - DNA, 777 bp, Setaria italica
  misc_feature (709)..(777): n is a, c, g, or t
  Peptide Sequence Number=SeqID_99713
acagccgcggccccaactcgcccctggatgctgaatcattggttcgagtcgccgccccctctaccggcctccacctcctccggtcgcatctccgacagcctagacgtcgcttctcctccgcctccgccggcttccaaccgccatacgccaagtcgggtttcgccccgaacgttagcaaccgccgccactcctgctcagctgggtcgccgccacatccggaagcaagctctctgcaatccgaggaagtcatgacttgctgaaaagcagaagaggttaaatataagagcgagcaaggatgaactctggcaggaagtttggcggtgggcgcccaccaacaggaactccttcccttgcattgtcttcagttgtgattgctctctcactcctcgctggtgcctccattagctgctgatttctatccttctcactggttgtcatgcacaccagctgttcgatgagaacccgctaattttttttccttcttaatttctgcttctgtagactattcaacccatggagagtgtgaatagtggcagtgacaacaaccagaagagctgagtacaaacatcacgtgctggaagctgaacatgggaaccctggtttcagaggttgattctttttgtcttttagtatgtattgttgagagatgatactgaaattacatactttgttcagacagaaagatagcatgagtctgaattactagttnnnnnnnnnnnnnnnnnnnnnnnnnnnnnnnnnnnnnnnnnnnnnnnnnnnnnnnnnnnnnnnnnnnnn

SEQ ID NO: 33740 - DNA, 324 bp, Setaria italica
  Peptide Sequence Number=SeqID_99714
ctgaatctcccttctggcatccgctatggacatggagccgccactctgatgaacgaggatagaaacgatgttcaccttgccctccttgtactccctctcgtaagtctgagcatcgttcaaaagacggctacatgtgctcattagcctgaacaactcgttgtactctgggtctttgacaacagattctgggatctttggcccaaaaaaatacaatgctggaagcacaatggggcctagtgcaaatgtcaaagccgcatttgtaatgtattcttctgctgttggaacatagctgctcgtccgccactctacctcggtcatcatgga

SEQ ID NO: 33741 - DNA, 217 bp, Setaria italica
  Peptide Sequence Number=SeqID_99715
cccggaccctcctttctctcctcccccctcctcacccaagaactgcaactgcacacggctcgccacaaggaacgtacgggcgacgccgcatccggacggcaggctatgaagacgaggcgcggcgcgtgctactcctgccacgcggcggccggcgacggcccggaggcgctgcaccgccggaagaggcgccgaaccgcggcggccgaggggtcgccgg

SEQ ID NO: 33742 - DNA, 445 bp, Setaria italica
  Peptide Sequence Number=SeqID_99716
cgtctcggcagcggagagcggcgcagtcgcggaagggacccgtgtcctcgtcaatgcgcaaggaacggcggcggcggcgcctattgggaagcccaccgttggagctgcagcgacgcagatgcggaagcccgctgggggacctgcggcagcaccggagctggggagtatgggcctcgccgcacctcggccggagcagaacggcgcgggtggatctggatgcgcttcaccgacctccttcgccgacagagctgcttcttcaatagctctggcaacttcttcgccggcgccggtcaaagctccatgcctcaaccgtggagctttcctcaatcttcagatccagcgactattgggtattaaaatccaacacctcctggtggcttcacaaactttatccagcctcatttgtctcagaattttcattttgttggggtcatgctcagtttcg

SEQ ID NO: 33743 - DNA, 377 bp, Setaria italica
  Peptide Sequence Number=SeqID_99717
caacatgacttgctaaaataacttgcatactgtatttagataacgaaacaccagttccagacatatgaagaccaaaacaatgttcttggcataaagggaattccatggttgtatgattcagtcacattgatacatcggcaaatagatcaagctatccaaaaggtactttacagtggattctcaaactgtgttaagttgccatagtgagtagcacccgacatgcagcacacatgaatctaaaattacatgttccttcctctacttgatgaaaagcaacaaaacaatcataaaagcgttcattcgcagaaacagtacaccacatttaaattactagagagcagaaatgggataatcttacttgatgccaagattcaatg

SEQ ID NO: 33744 - DNA, 345 bp, Setaria italica
  Peptide Sequence Number=SeqID_99718
accgcgtcgcctggtcgtctgttcatcacccatcatcactctcctcccagatcccaccgcgcgtctcccgctgcgacacgcgcacgcgcctcacctcgtcgcgtccgtcaacggtcaacccaccatcgcccatgggaagagggcacgagcaggaggccgacgccggcaaggccgggggctactcctcctccggcctcccgccgtcggagccgccgcacctgcagggccagcccccgcagcagtacgggtacggcacgttccagggctcccgcgccggctcgggcgagttccggcagccgcccgtcgggttcccgcagcccgccccgccgcccggattcggcggcg

SEQ ID NO: 33745 - DNA, 513 bp, Setaria italica
  Peptide Sequence Number=SeqID_99719
gctaagctgacgcaatggcttgtaggtgatttggagtctaggaaggagcaggaaaatcgccacagtttgggggatgggtggaacagggaaaactaccttggttgatcatgtctataagattgtcaaggtagattttgatactgctgcttgggtaacagtgtcaaagagttacaaagtccaagacttgctgaccaagattgctagagagttcggtgtctcgattgatgctaggaacatggaaatgagaagcctagttgaggtcatacgtttctatcttgaaggtaaaaggtatatcttgattctagatgatgtttgggaaaaggatgtgtggatcaatatcatggatgtctttccgagtaacggtaccagtcgaattgttctcacatcaagaaaacatgaggttgcatcattggcaactagtgattgtgcaattaagttggagccgctaggagaagatcactcttggaacctgttttgcaagctagcttttcggaataatgatgacaagaggat

SEQ ID NO: 33746 - DNA, 701 bp, Setaria italica
  Peptide Sequence Number=SeqID_99720
cgccctcacagcagccagccgccatggcgccgccggccagcagcgacgagccctcgcgccacaagaaagccaagaaatccaagcccgacaaggaagagaagaagcacaagaagagaagccaggagcgtcccgccacggaggacgctcctgtccccgacgccaccgagcgcaagaagcggaagcacaaggaggggcgcgaggggaagcgggatgggaagaagtcgaagaaggaggggaagcacgagggcaaggctgtgggagcggaggcggacgaggcggggagggacgagaaggtgaggcgggcgatggaggacgagcggttcgcggcggcgcgaacggacccgcggttccggccgatgcggaggaaggaggccaaggtggcgctggactcgaggttcagcagcatgatgacggacccgaggttcgcctcgtcggccgcgcccgtggacaagcgcgggaggagccgcaagaagcgcgagaaccccttgctgaattactatctcaaccaagaagaagaggaggaggaggaggggaaagagaaggtgaagaaggagaaagcgaagcttgtcaaagaagatgatgaaggagacaaatctgatgaggagcaaactgatggccaggatatggagatcacatttaatacggagcttgaggatctcagtaaacgtgttctagagagaaagagcaatgaggagaagacc

SEQ ID NO: 33747 - DNA, 2483 bp, Setaria italica
  Peptide Sequence Number=SeqID_99721
cgatttccatgcacttcagtccaaattctgatggatagattgaaactgcaaaaactcgcccactaaagaaggcacagggcaaggctgggagcggaggcggacgaggcggggagggacgagaaggtgaggcgggcgatggaggacgagcggttcgcggcggcgcgaacggacccgcggttccggccgatgcggaggaaggaggccaaggtggcgctggactcgaggttcagcagcatgatgacggacccgaggttcgcctcgtcggccgcgcccgtggacaagcgcgggaggagccgcaagaagcgcgagaaccccttgctgaattactatctcaaccaagaagaagaggaggaggaggaggggaaagagaaggtgaagaaggagaaagcgaagcttgtcaaagaagatgatgaagaagaagaagaagacgaggagcaggacgaagacgaaagctcaagcagcgatgatgacgaggatgaagacgtggatgacgacgacgagaactctgttggcagtgacattgctcattacttattgggaaggcatgatgatacagctacgattgacaaggaaactcacaggcttgctgttgttaatatggactgggatcatatcaaggcagttgacctgtatatggtgatgaattcttgcctcccaaagggtgggcgagttttgtcagtttcaatctatccatcagaatttggactgaagtgcatggaaatcgagtcaactcaaggcccagctgctcttgtcaatgcaaatgttgatggtaaaaatagtgacgctgatgaagatgacaagaatgatgatgaagacaacattgatgctgacgacgatgatgatgaagatgacaagaatgatgacgaagacaacactgatgctgatgatgatgaagacatcaccgatgatgacaatgatgaggaggaacttgactccgacaaagagaacaacaagctgcgtgcttatgagcttaagagactgaagtattactatgcagttgtggtgtgcgattctagtacaacagcaaatcacctgtacatgactcttgatggtactgagctcttgaaaacagcaaatgtgtttgatctgcagtttattcctgactccagggaattcaaacatcctgctcgagacgtcgctacagaggtacctccgagttacaaggaacctgatttcgagactcgtgctttgcaacatagcagagttaagctcacctgggatgaggatgaaccagaacgtaagaaagtcttgaggcgaaagttcaccgatgatcagctagatgagcttgacatgtatttagcaagtgatgacagtgcatcagaagatgatagtgtggacaattctgatgacgagtctctaccaaatgggggttccaaacggaagctaacaaaagaggagaggttggctcttctactgggaggagacaaatctgatgaggagcaaactgatggccaggatatggagatcacatttaatacggagcttgaggatctcagtaaacgtgttctagagagaaagagcaatgaggagaagaccgtctgggagaagcaccaagagaaaatgaaagagaaaaagaaagctaagaagaggggactaaaggatgaagacgataatgaccactacagcagcgaagatgagcccactgaggatgatgatttcttcgcagctgaactgtctgatgaagaacccaagctgagcaaaagcaaaaaacacaaggcaaaagccaaagataaaggaaagagaaaaggaaaggatgattccacagaggagcattatgagccagaagcgaccaaagaagagttggagctcttggttgctggtgatcaggatactgctagtggtgcaaagggttataacctgaagcgcaaaaaaggtaaaaagggcaagaagggcaaagaggaatctattgaggacaaacttcctgatattgatcttagcaaagatgacaggttctcagcaatgttcacgtctcatttgttcgcgttggatcctactgatccccagtacaagaggagtgcgcctttcatgcggaagcaaactgggaagccaggggcgcacgcaagcaaagcagagggatcatctctgggaggcgcattgccacctgatgatgcagctgctaagaataatgatgatcagaaacctgatggcgcatccaaagagaagctgcaaattttgtctgctgtcaagtctctcaaaaggaaccttggtgctttcaaaagcaagaacaggtgaccgatagaaaaagagcaccgttttactctggtcatcactcttgaatagtgaaaatcctttgcgacaaaatgattttgatctgtaggctttaaaatagtttcatggtttatgctttgtacttctacagacgcgtccaatttttggattttcagtttggacactattatccagttggacgattgtgttcatttctggtgatatataatccatttgaaagtttgttgagtgccgtcctaaaaaaaaaaaaaaaa

SEQ ID NO: 33748 - DNA, 1108 bp, Setaria italica
  Peptide Sequence Number=SeqID_99722
ggggggagggcagtggaaggaagcggctgtggcggggtagggcgatcgtggttcctattatggcaaggttccaatcatagttggccctcagcataagccgaagaaaaagagcgcgctggaaaagcaatgcttcgttatttgcagcaacgtcatgaagaagctgttgccgcgggtcaggaacctaccttttggtggtcgttatgctccaccctcagtcccgggtgattcacgtccacttagtactaccgtttcaggcggcacaaataaacctaaggatgaggttgggtcagcggaaccttcgtcttcaccgtccaaggatgcttaaagtcctccttgataataaccagtggatggcttgttgtattgtatcatgttgtttgggactttaatttaaatatgtgtatttggatcttcatgttgttgtattgtaccatgttgtttggatctttaatcgattttcacgcgtaatccattgtcaagtgtaatccatttcatgcgtaatacaatgcagatggaccggcaatggatgtataatgcagacaggcggagcaaggtgtttattgatggcttgcattattttcttgaagtggccaaagcgaacaagccagagaatgggttcgtatgttgtccatgcttccaatgcaataacaagaaggagtattcaaaggattcctgggggactattcacagccacttgtttaaatacggtttcatgcctaactatttggtttggaccaagcacggtgaactaggggtcgtaatggaagatggcgaggaggaggaagatgacaccatttcggactggggggcaggccaagcttttgcaggtactacaatgggcgaggctgatgaagatgggtttgcagaaaatggccctactgatgaccttggtcaggtgatacgagatgcatacagagattgcgaaactgagaaggaagcagcaaagttgcagcgcatgatagatgatcaccaaaaattgttgtacccaggttgccagcagggccatagaaactaggtacgacactagaatttgtgcaatggaaggcaaaaaatggtgtgtccgataaggcatttcaggagatgttgaacattgtcaagaagattctcc

SEQ ID NO: 33749 - DNA, 1756 bp, Setaria italica
  Peptide Sequence Number=SeqID_99723
ttttttttaaaaacttaaaacctaacgtacgaccaaagaaataatacgaacaagggttcaacgtttttttctaccaatataaataaaggcagattcaacgtttttttctaccaatatagatctttacccagttcaggcacggtcgacatgctaccaggatcaagtggcgcagcgttgaagtgaactggccggcgccttttgctgtcactgcagctgcgcagcatcatgattcatggtacacccaacaaatggactagcagtttccaacgtctgatatatgcaaccttcagcctgacttctatattttttttggatgtggatcgtcaaaagtccaccaatcactgtccacggcactggtgctatgcacacccaaaatcggcagattccacatggtctccacacgaattcctggaaatacggcagatccacaaggttgccacacgatccgtggagttgtttcaactgaagcattcttcctaacaaaagatgatacaccatgcacacatcacagtcgtcgtttcgttatctgaacagagaacaccagctcatcaccatccgcctccttagtaagcttgcagagatccccagtctgaaggttgtttcccgcaacaaaatgcttccagcccgcggtgaggcccacgaagaccgggttctcatggtaaagaaccgtccacaatctattcgtaggatccttcagcattataacattccggtcatgccttttctgtttaacagtgtcgaaaagcgacttcggtagctcaagccatttccgagtggtatcaggaacgcagagttgcaaactgaactttagtagagaatgaccatccaactccagaattttgtctttcataggcaacaaagactctgtcatcgcacagtttgcagactttctaccttcctgtctggagaaataatgttctggctcatgtacaaccacatggttggcatgcatagcaacgttgctactttggctgcatacactgctccccactagctccacttgatccatatttgtttcaagttgaacaatagttccttttccattgacattatgatcgatctctgtcctgctgcttccacatttggatattccatcaggactcaagggtttctcaacaggcactgttagcattgattcgacaaaggcacaagttccttcaggtccagcagggtttcgtcctagtgcaccgtactcgcccagaactgcagtgtttgcagacagagggatattattgctttggctaattacaatgcttcccacaggttccaattgttccccttgtgtttgaatttgaacagcagctcctccacctttctcattaatactatggtcagtatctgttccaacatgtctgaattttgatactctgtcagcacttaagggttctttgacaggcatggtgaataccggtaggacaagtgtatgatggtcctcagaacagaagtactcattgccggcgtttagcccaattgaaccataaccatcaaccaatatgctgccagtttttcttgtgttttcaggttcaatcggtacagtgccatcaagagtggctggactgttcacaatagccttcgtccacttctccaagcatcgaaaacctccaggagctgcatattttctgtaaatgttttgactgacaatcgtcttgctatgattctgatgtttccccacagctgtgatagaatctgaaggaatagaatttattccttgtttcctcattaaatcttcatccaaatcatgtttttctaattcatg

SEQ ID NO: 33750 - DNA, 199 bp, Setaria italica
  Peptide Sequence Number=SeqID_99724
gggaattccgatcaggcggcgaggaagggaggcgccgggaagcaggagagccggctgctcgatccgaagcggctgcagaacgtcgcgatcatgctcaaggcgctcaatgtgacgtcggatgatgtgattggagcactcatgcacggaagcggagatttggggtctgagttctatgagacactagctaagatggcaccga

SEQ ID NO: 33751 - DNA, 277 bp, Setaria italica
  Peptide Sequence Number=SeqID_99725
gtcgaggtagccgtcggttagctgggcctcgtcccggagcgggacgaggccgcggtcgacgagatggcggtagtggtagtaggtgatgaagccgcaggcgctggcggtccagagcgtggcgcagcggagccccagctcccgcgcggcgcggagcgcgaacgtcatggtgctgtcggcgacgacgcaggtgacggcggggcggccgtcgcgctcggcctcgtcgttgagcctggcgacgaggtccttgaaccgcgggaagcaggtggtcatggtggag

SEQ ID NO: 33752 - DNA, 237 bp, Setaria italica
  Peptide Sequence Number=SeqID_99726
tgatgtgctcgccgccggggaaagccgggcggagggtctcaccgtcggcatcgcggccgccctacctcgtactattggtgggtccgccactggaatcaaccacgccatcgccgcccccggccgggatccggatcaccggttcaccaccaccggccaacgccgcgtgactctacagtacgactactccacactcccctcctcccactccaccctcccggaaacccgtacgatctccgg

SEQ ID NO: 33753 - DNA, 468 bp, Setaria italica
  Peptide Sequence Number=SeqID_99727
tcaacattctgctgatttgagcaaaaagcttgaagtgacagagaaatgtctggaccacacaagcaacctactctctacaacaaaagaagatctgaaacaagcacaatataatctgagggagaaagacttcataatttcagagcagaaaaaagcagaaaatgctttaacacatcaagcttgtgttctgagatcagatctggaaaaattgtcgtgataatgcttcactctattcaaaaattgctaggggggacaagctaagtgccacaaacaggtcagttgtgaatacattccaaactgaccttgcttcgaagttggatgttctatccagtacgcttaatgcatccatagaccaacaaaacaagcacctaaagtccgtggaggacttgtgtcaatcttgtgttgattcccatgacaaggccaacttctgagctgaaaaagagattttggcttcaaaatcattatacttgt

SEQ ID NO: 33754 - DNA, 255 bp, Setaria italica
  Peptide Sequence Number=SeqID_99728
ccgacgggagaggctttcctacggcacctcggcatatgtaacccaagagaatacgttgatgaccacgctgacggtgaaagaagccatccactacgccgcacagctccagctgccgggatccatgccgccggcaaagaagctagcgcgcgtcgaccgcatcattcgggagatggggctgggcgctgtggcctgctcgcggatcggcggccgggtatgcaagggcatcagtggcggggagcggaagcgggtgagcat

SEQ ID NO: 33755 - DNA, 345 bp, Setaria italica
  Peptide Sequence Number=SeqID_99729
agaaaggaagacttagtagtacgacaagacaataaaataacggattcaacatcagcattttcaagcttcgctttgctcagaagcatggatatgagcttgatcatcataagcttgggtatccggaccttgcatcactgttgcagattatgcctggtgcaaggataaaattcccaagggttctacctgcggaaaatgggaatggcctgcctggcagcaagggaagtggaaacaaaaacatggcgatgacttgacctgggaggagcttgggtcctgtatctgccactactgaaactgctgctgcggaggtcgataaggaaatgtgctaccgtcctcccactccttcag

SEQ ID NO: 33756 - DNA, 782 bp, Setaria italica
  Peptide Sequence Number=SeqID_99730
ctgggaagtgcgcaatgcagcttgccttgcatacactgcactggtcccgtcgcatggttggatttttgaatgtgcagaaaaattctagagcacgacggtcattaactggccttgaattcttccacaggtacccagcacttcatcctttcctttctagtgaactgagaattgcaactgagctgctagctggtggagtttctagcgatttggagtcacatattgtgaaagccatacaccctagcttgtgtcctattcttattcttctatcaaggctgaagccatcgcctataagctgtggaactgatgattctttagatccttttttgcttttgcctttcatccaaagatgcgctacccagagtaactacagggttcgtgtccttgcatcaagggcgttaattggtttggtatctaatgagagactgcagcaagttgttagtgatatactgggtaatttgcctaatgtaaatcatgaagtttccccaagtgttcagctttctgaccctcccatatcagctaatatggaaaatggaaatttacttcggttttcaaagtccttttcattcaattctatccatggccttttgctgcagctgtcttctcttctggataacaactttagaggcctgacagatagtagcaagaaagatcagattattggccaactaattgaggttctgtcaagatgttcttggcttggcagcaccaaattatgctcatgccctgtcgtaagtacatcttacttgcgggtgttggatctcgtgcttgatgttgcaaggacg

SEQ ID NO: 33757 - DNA, 360 bp, Setaria italica
  Peptide Sequence Number=SeqID_99731
ccgttcttggcgcgtgtccgtttccccccggtgagatattttcacggtgaagattccttgctgccgccgaaagcggcgaaaacagcagcgccagctcgtgaatggtgaccgaaagctgcgagatggcttgatgtgctagcagcagaaggcagaaggcagaagctgctgaaaatggtgacggaatggggtccagaattccaggtatgtgctgctgaggtggaggtgtgactaaaactgataccactcaaaaaaaaatagttgctaaaactgtttaacacggagcaacttcgagaggctaaaaaaaatcttcctcaaaactatctattggaggtcccaataaaatcatgtcattccacagca

SEQ ID NO: 33758 - DNA, 308 bp, Setaria italica
  Peptide Sequence Number=SeqID_99732
cggtggcgcgggcgacgacgggccgcgacgggtcgttccagatggaggcggacgccgtggccggcgcgctgggggcgctggtgggcgcctgccagctggtggtggacacgccgctggccaagtgcaacgcgacgctgccggcggccggggcgctggtgtccagcctgcagggcccgctgcccgggatgctcggcagcgtcttccgactcgcccctgctggattctccttccgcatgaactgatgatatgatggatgatctctctgaaacttgatgatgggtgcatctaaaacaaatgagagcgagtaa

SEQ ID NO: 33759 - DNA, 1199 bp, Setaria italica
  Peptide Sequence Number=SeqID_99733
gtggagatggacggcggcagcaacgtcgaggcgtggcgcggggccgtgtcgccggcggcgcgctacgcggagtccggcggcgccagcctcacgtgggagaacctcacggcggtgctgccgggcggcggcggccgggccaccaagaagctggtgcaggggctgtacggctacgccgtgcccggccgcgtcgtcgccatcatggggccctccggctccggcaagtccacgctcctcgactcgctctccgggaggctggccaggaacgtggtcctcaccgggaaggtgctgctcaacggcaagaagaggcggctggactacggcgtcgtggcgtatgtgacccaagagaacatactactgggcacgctgacggtacgggagacgctgacctactcggcgctgctgcggctgccgtcgagcatgcgcaagtcggaggtgcgccgcatcgtggacgacacgctggacgagatggggctccgggagtgcgccgaccgccacatcggaacctggcacctccgcggcatcagtggcggcgagaagaagcgcctgagcatcgcgctggagatcctcacccgcccgcgcctcctcttcctggacgagcccaccagcggcctcgacagcgctgccgccttctctgtcgtgcagacgctgcggcagctcgccgtcgatggcggccgcaccatcgtctcctctgtgcaccagcccagcagtgaggtcttcgcgctcttcgacgacctctgcctcctctccagtggcgagtgcgtctacttcggagatgcaaagttggcaacgcagttctttgcggaaacagggttcgcctgccccagccggaggaatccgtctgaccatttcctccggtgtgtcaactctgacttcgacgacgtcgctgccaccatgaaaggatccatgaagctgcgagcagaggcagagcttgatcccctgttgaactactccacgacagagatcagagaacggctagtggagaagtacaggatctccgattatgccatgatggttaggaacacaatacacgagataaccaagattgagggtgtggtggaggaggtgatccgcggcagcgaggcgagctggttcaagcagctgcgcacgctgacgagtcgatccttcaccaacatgtcccgggacttgaactactactggctgcgcatcatcatctacatcgtcatggccttctgcctggg

SEQ ID NO: 33760 - DNA, 1641 bp, Setaria italica
  Peptide Sequence Number=SeqID_99734
ttcttaactttctttgttacttttcgttacgtacgttcgtcttgtcctacctattgtaaaggtattcctattgtcatgaagctgcgagcagaggcagagcttgatcccctgttgaactactccacgacagagatcagagaacggctagtggagaagtacaggatctccgattatgccatgatggttaggaacacaatacacgagataaccaagattgagggtgtggtggaggaggtgatccgcggcagcgaggcgagctggttcaagcagctgcgcacgctgacgagtcgatccttcaccaacatgtcccgggacttgaactactactggctgcgcatcatcatctacatcgtcatggccttctgcctgggcaccatctactacgacgtgggcaccagctacacggccatccaggcgcgtgcctcgtgcggcggcttcgtgtccggcttcatgaccttcatgtccatcggcggcttcccgtccttcatcgaggagatgaaggtgttcacactggagcgccagaatggccactacggcgtcgctgcctacatcatctccaatttcttgtcctccatgccgttcctgctcaccgtgtcctgggccagcgcctccatcacctactggatggtcaagttccggccgggcttcagctacttcgccttcttcgctctcaacctctacggtggcgtctccgtcatcgagagcctcatgatgatcatctctgccctcgtgccaaacttcctcatgggcctcatcctcggtgccggcgtcattgggatcatgatgttgacgtcaggattcttccggctgcttccggaacttccgaagatcttctggcggtacccagtgtcctacattgtctatggctcatggggattgaagggagggtacaagaacgacctgatcggtctggagttcgagcccatgatgccggggcagccgaagctgaagggcgagtacatcatcaccgagatgatggggctgagcctgaaccactccaagtggctggacctcgccatgatcttcgtcctcctcttcgcctaccgcgtcaccttcttcgtcgtgctcaaggtcaaggaggccgccgcgccgtacatccgcgtggcctacacgcgcttcaccgtcaagcgcctggagcggcgcgcctcgttcaggaagacgctggccatgacgtcactgtcgaagcggcacagccagccgcaccccatggccatccaggaggggctcaactcgcccatgccgtactgagcagaggaagacgaagagcagctggaatggagctggtagctaatggtagcggtttgatatcaccgattacttgtggatgtgcttacagatatgtttgttcgattgtttaggtgttggagcgtttcacaaagatacccacgatacagtattgaaagcattcgtttcactgtaataactcttctgaacacgatacacatacaagatagcgttgtgcctacctgttttttgttttacctttggttttgtaaacattaaattcatgcaatgatctccacaaaaatcatgcagtgaaaataatactctaggatttttaaagttttgttttgtaacgtatggggtaataattgtttttcttgtagtcttagttttaggtaataaattaaaaaaaaaaaa

SEQ ID NO: 33761 - DNA, 911 bp, Setaria italica
  Peptide Sequence Number=SeqID_99735
caaagggctccttcgtgttctagctcgtctacaactctacagcactgcagagtaagctcgatcgatggctgagaggaacaacgcgatgcggccgctcctgcgccggatgctctcgttcagggagccgctcctgatcatcccgtacctgctcaccttcctcgccgccgcggcctcggcgttcgtccggagccactcctcgctgctgcacgcgctagcgagggcgctcgtcccggcggcggcggccaagtgcgcgcacagcgcctcgcccgtcagcgccgacctgcccgcaccgcgctgcgacggagacgaagcggatgcggaggcggaggactacgccgcgctgagcaaggaggaggtggaggcgatcatgggcgcgatcggcctcgcggcggccgggcgcggcgagggcctggcggccgtcatgggccgggacgaggtgtccgggctgttcgaagccgaggagccgagcttcgcggaggtgcggggcgccttcgcggtgttcgacgccgacgccgacgggttcatcggcgcggccgacctgcagggcgccctggcgaggctcggcgtgcgggaggacgccgcgtcgtgccgcgccatgatcgacgcggccggcggcgacagggacggcaggatgagcctgttccagttcgtcggcttcctcgagaacggcttgtgatgagagccggatgaggaactgactatttacttcattttcccccccttttaattcctttcgtcgcctcagctcgtggcaggagatgtgagagtagtggtgtatcctcggagacggtgtgcgtgtgttttttttcctcctgccatgcgtgagttgggggtggatgatggactgtgcagcgattaacgcactaattcccaagttaaggaaacaaatcaatggagctgatcaatttgca

SEQ ID NO: 33762 - DNA, 278 bp, Setaria italica
  Peptide Sequence Number=SeqID_99736
ctggggtttaagccaggtgaagggaggagcgggtggcctcgagggtttttcatccgccgatccaggaaccggagacaaagaatcctgctcaggtgctcattctttggatgattcattttggatgctccgtggaggtaaagatgataaatgtggtattagcagtcctttgctgtcagtgaatgcttgctgtgtaggtgacatcaaaatatggtgtcacagaagaggttgggctatggatcccgtggccgccaaattccagctatgccacgtgttccaaa

SEQ ID NO: 33763 - DNA, 265 bp, Setaria italica
  Peptide Sequence Number=SeqID_99737
ccaaagcccggtttccagcggatcgacgccgtcatgggcgttcacgcccccctccttccaagggaatgtgagggcaaggcaccagccaatttcattcagcggtaagattgtttactgcaggacaccttcagaggtggagaaggctgcaatcgacatcttaggcaaaatcgagagcatcaaggcccctggtccagtttctcttggttttgatctggaatggaagccctttccaagaagaggagaaccatgtaaagttgctgtaatg

SEQ ID NO: 33764 - DNA, 238 bp, Setaria italica
  Peptide Sequence Number=SeqID_99738
caacttcgtgctccgggtacgtacgcgcgccggccgccgcgtcgccgtgcacctagctgctgtttctttgccgtttctgcgtaagcatttgctctcgtgctcaggtggtgattgagcctctgtagtgtaacttggaacatttggccatctacatggtggatgatgctgttcagtctcaatagttgttttgaattggttttgggctgagatctgtcaagggataaggtggatcttgctg

SEQ ID NO: 33765 - DNA, 285 bp, Setaria italica
  Peptide Sequence Number=SeqID_99739
cttaatatttctcatagttgactgtaatctcgtcttggtttatttaagttagaaagaaacacgggaagagcaacagcgcgttaattggtttctgctccaagtctaaaagtcttccaagtttgttgtaccagaatgctgatgattgctattcagccaagcaaacgaaacacggttgcagagtgatgatacatcaagttcatgacatttatactagaccacacgcccaagaaaatgcaatgtaaaaacacggagaggcggaggcggtcggcggccgcggcgtgaggg

SEQ ID NO: 33766 - DNA, 383 bp, Setaria italica
  Peptide Sequence Number=SeqID_99740
atcaccatcctcagccaatctgtcaatttgttcttgttcatcacctttaagttcatattcttcatattttttcttgaaatgggtaacagacattgcttccaagtaagtatcagcaactaatcctgcacgcatcgctctgaatccatagtatggcatgggaagaaaaatgcctgacatctcaaccacatctccaggtgcaacctttctagtcagctctcctcttagatgaacagtaagagaacgagggatatgacgctttggtacgtgctctgctaactcttgaagtttcacctcctgaaatttcaaaaattttgatgctcgcagttgaagaattagattcccctttgctctgttcagcttgcatctttgtgatgggcactcaa

SEQ ID NO: 33767 - DNA, 795 bp, Setaria italica
  Peptide Sequence Number=SeqID_99741
cctgaggtggatacggaggtgcaagatggtgatatcgggaagcttggggaccctgcgagtggctgcttcggtgtgtccagttcattgctgaggtccagtaaggggcggttccgcgatgacgaagacccactatttggtgagtcactgaagagtcttgggttttcggatgcttgtctagccactctttcctctgaagtcacggataatggtgaaaacctaaaggagctttacaaagatcctgaaagtgctgatgagggtaaaaagatcatgaaggaagctgaacttatagctccccaaagtaaaagagataatcaaggtaattctttcaaagaaatgataagggcatcaaaggaggagtatgagcaacttcctccttacatgaagagtctagcatcatgggaggaattgcaggagggaatagtaaaactaaattcatacttcggtagtgacgaagccaagggaagcgtttcgttgaatcaagatgatgttggagcaatagggttggggcgcaaaggaagagcctgcttgcttatgctgctccggctgaatcaattaactatggaggcagttgatggatctaccttttacaccctacgcaagaacaactcgtagtctatttttggaactctgggaggtgcatcgaatttgaatagttgatacttgatagcctgatactaatataagagtgttgtgtattaagttctggttcaaatcttgtgtgttgttaatgcatactcaaactcagttgaaaaaggtgaatttgattgcacgagcagaagctctttgctcgtagtt

SEQ ID NO: 33768 - DNA, 290 bp, Setaria italica
  Peptide Sequence Number=SeqID_99742
ctcgccagccgcgtcgggcggcgacggcaccatgttgacgcgcgcgtcgacggcgacgcgggaggcggcgagttggtccccggcccggtgcggcaggtgctgggtggcggccttccaggacgacgaggaggagggcgcgaaccccgtgaagaagcccatgacgaagcagagcgagaagtggagcagcgccttcttccagaggtggccgccccggcgctgcttggcccggtccggcgccgccaccgccaccgccccggtccccatgcccccacgaacctctcagatcacgg

SEQ ID NO: 33769 - DNA, 795 bp, Setaria italica
  Peptide Sequence Number=SeqID_99743
gtgaacaagatatcggacaccgcgattgtgactcttgccctcgatgcgagttctataatcagcaggcaagggactccggttagttcagcggagccattcacatttctttatgatacacacagaccttcggttaaactctgcacatcaacttggaggactagttctcgcgacatccaggttttggtaaagtttgcagagcctatgttcaacttcagctcctcatcagtgcaggtttctgggggcaatgtactgagctttcatgaagccagtaagagcatgtacgcgcttcgggtgcaggcggtcgacaagctggtgtccgtccaggtcgctgaaaatgcagcccaggacgtggctggaaaccccagcctagcatcagaccgtcttgaagtgaggcactattctgtgcccgcgtcatcgtcatcgattgcggccatcaccactatcatcttcgtggcaactgctgttgttgccacgctcctcaccgtctcgacatcgtcgctcctcgcttcaggagctatcccaagaccctgctcctatatgatctcggagccatcaagaaatctgttgagaatggcatgccacatccaaatctttgctctgtcgagatggctgtcggttaatctgccaattgagtactacgagtttgcaaaggggatagaatggagcatcccgtacatgcgccttccatgggagggcccaggtgcagatccattcctgggctactccacaatgcctgccattgcattctcggagctgctcgacaggagcgccgtaggggctgctaacatctcctta

SEQ ID NO: 33770 - DNA, 469 bp, Setaria italica
  Peptide Sequence Number=SeqID_99744
cctggacagtaggagaaccacttgtcgaagtttccaaggagtttgatagcttactgagtacaataccagattctcctaaagatcatcaaaggcactttggactgaaccagaagttaatttgtcaggaacaatcctctgcatccttttcctctcaaactttgagcacaacttaacaaaccatcttgcaaattccctccgagtacaaaaatcactggggctaacatctttttcaattatctgtagcttcttcagtatagagaaagcctcctcatgtataggatcaataggagctctaaaagaaaaatgtctgcgaacagccgtaatattttgcattgaatcatcagtaactgcttcagccttctcatctggtgttgtgctgaaaacttcatcttcatcagattctctgtcacttgcattacgttcaagagaaatttgttctaactagtagttctaacttagttagttactt

SEQ ID NO: 33771 - DNA, 418 bp, Setaria italica
  Peptide Sequence Number=SeqID_99745
ttttttttttgtaagagcaacataacggcactgtttccagaccaaatacacaactttgacttgagaaagcattaccacagcaccgagtcaacaaaatatctacattagactgcggaaagataaaaagaaccaggcctacaggaatcggagtgccctcgaattacaccaccaagtcagtcgaaacagcaaacgaaataacgatatcagcagtatgtcagtaggaagcaccaatgaaagatgacgatcccagagaacaagaggtgtaaaccattctgcaccactgagaactattcagatctgacagcagatgtgcttaaaccagacgagctccaaaaaatttatgagcaaagtcttcaatgatacaatccccagttgcttgcaggggtcaatctactggaactacgccatcttcttacag

SEQ ID NO: 33772 - DNA, 2024 bp, Setaria italica
  Peptide Sequence Number=SeqID_99746
aacaagacaaccgaagtacaaacaaaaataatactaacaattaagaactagacggaaaagataaaaagaaccaggcctacaggaatcggagtgccctcgaattacaccaccaagtcagtcgaaacagcaaacgaaaataacgatatcagcagtatgtcagtaggaagcaccaatgaaagatgacgatcccagagaacaagaggtgtcaaccattctgcaccactgagaactattcagatctgacagcagatgtgcttaaaccagagagctccaaaaattatgagcaagtcttcaatgatacaatccccagtttgcttgcaggggtcaatctactggaactcgccatcttcttacagctttcttgagtgtctcagctcgttcatggactctggctgcttcctcctccacccaagtccttagcattgtaagagcttccttttcagcttcaagatacgatttagcttcattgacagcttgatgcttgctggtcatgtccgacaacaggttttccaaattctgctgatcagccatgacctctgcattctcggttgccagtctatcatacatgccatcaatttctgaccttaaatttatgagatcctgattctggatctctaaagctgacttttctttcaacaaatcttctagttctctttctctgtctgtcctctcatttgcaagctcatgcaacacatgttgaagatccttgtcaacttcaaaacctcgttgttgctccttcttcatcttgtcctcccattgttgttgtatatctcctctactgattaattcttccattatttcagctatagcagaaagatgggcttcattttcggcttctagtctgtttaactcatcacgaattgcttcctccattcgaccactggtcagtgcagcagctgcttgtgctttcgttacaggtttgtgtggttgaaggcgtcttgtatttccgaaaactctgctgatgatgttgttctcaccagccatcagctctatgagcatggatggagacacatctgggcaagcacacaaatccaaaatgcgaactttttgactcagcatcttttggtctgctcctaatgcacgcggatgttccacaagcactttccagttgacaagatcaaaacgagagagataactctcaggtaggaaaaaagaattttcctggacagtaggagaaccacttgtcgaagtttccaaggagtttgatagcttactgagtacaataccagattctcctaaagattggatatacaagaaatcagggtcatcaatatttacatcatcaaaggcactttggactgaaccagaagttaatttgtcaggaacaatcctctgcatccttttcctctcaaactttgagcacaacttaacaaaccatcttgcaaattccctccgagtacaaaaatcactggggctaacatctttttcaattatctgtagcttcttcagtatagagaaagcctcctcatgtataggatcaataggagctctaaaagaaaaatgtctgcgaacagccgtactattttgcattgaatcatcagtaactgcttcagccttctcatctggtgttgtgctgaaaacttcatcttcatcagattctctgtcacttgcattgtcattgggcgtctctgttgactctgttgacaatttctcttgaacgtaatgcaatggggcaacaatgagttgctgaaaacagttcctggacgacggggactgccacgccagcccggccaaggcgatcgccgcagaagctcccagcccgacggcgagagctctcccaaacccagtcttcctcctcccctgttccactggcttctcgcgctcggggagccaccagccgccgaccccgtcgctagattcgccggcggcgggagcccagctggtgccggaagcagctactttggcggacccgcggcggcgaagctgagcccggagctgggggaggagcggggcatcgagcggcggcggcgagaggcggagtgtggtagggggcgatggccatggtggggaggaatcgaggccgc

SEQ ID NO: 33773 - DNA, 284 bp, Setaria italica
  Peptide Sequence Number=SeqID_99747
gacttctgcgaggaggccggcatcggggccaagcagtacctgcccaaccacaaggggcagcacgagtgggcggagcacttcggcgccgcgaggtgggagcggttcgcgcggctaaaggccgagttcgaccccagggccatcctggccacggggcagggcatctttccgccgcccggctcgccggcgcccgtctccgactcgtaggcaggcaggctcatggcggtgatcgagctgctactgattgtttaggcgcgtgtaggtagttacagcagtaaccatacgag

SEQ ID NO: 33774 - DNA, 252 bp, Setaria italica
  Peptide Sequence Number=SeqID_99748
gaggatatcaaatcctgccgtatcatggcgttcatgaacctcgatcacacgatgaacaattggaataggacgtccgtcaacattgaaaacaactatttctcccgctcggacagggtccttgttcatgtgcaaaaacaggatgtcaccccttttgaatccaggctccatgctttcagatagaaccaccacaagcggtgactcactacccgtaacgaccatcagtcctttccagatgatcaatgccgacgccag

SEQ ID NO: 33775 - DNA, 404 bp, Setaria italica
  misc_feature (404)..(404): n is a, c, g, or t
  Peptide Sequence Number=SeqID_99749
tccgccgtgcgtgaggttgccaattcaggttaggcaaagcatgacagcacagggaagagaagctcttcagaaaaaggatagaattacgcatgcctggagtgattgctagtagagatcataaataaaacgaattaaacactgcagaaatgctatgctgcgatgcaggaaggaggaacagacccttttgaatccaggctccatgctttcagatagaaccaccacaagcggtgactcactacccgtaacgaccatcagtcctttccagatgatcaatgccgacgccagaatcatccctaggctgatggtttgggcgagcacggagcggatctgcgtcgctcgaatcggctccaccccgcgccgcaagaaatccatgtcctctcctctgccgccggtgtggtgtggtn

SEQ ID NO: 33776 - DNA, 493 bp, Setaria italica
  Peptide Sequence Number=SeqID_99750
gagctagcatttttgtttactggaatttccatagcttggggtcccggttcttggcagcactcgttgcatctcatctaggtttctctgggcctcatccctagaaagctctgtaaagattacctcgtcaaaaggctcctttgaatcaggcatgtcctttgagagtggcaagacaaaattggctgtcatttcgttaacagcttcagctggcacttcctttcccatctcattgaatcgctttgctgccctggatttcagttcacttggtgatgggaacacgaccacagcagtcttgcggtattggcaaatggcctcagcttgcgaatacgggcattcttatagacatttgtttgatcgaggatgaagttgcgaggggtgtttgcagccctggtcagcaatttgttgaaaatccatgtagcacactccatcaatcgatcgaaacgctcaccatagttattcttgcgcaacaatcctgcaccttcatttgctccattgc

SEQ ID NO: 33777 - DNA, 334 bp, Setaria italica
  Peptide Sequence Number=SeqID_99751
gtcgggctgggccgaaaaacggttcatttcgggctgaaaatttgtgaccacaaacatcccatgacagttgtcgggccgagttgtcaagctgggctccggccccccattttttagaaaataaataaaattaattatttgagcctaccgcctcatcgaagcttggccacaaaaaactgatggagccaggaaccctgtccagaaacgggaaattaaacattggaatgcgaatgcccccaagattccacaatcgatcgtggatggatgaacgacgacccttggccggagaaggaaaagaacatatccgggcagcgcatccaatataatgcatgcaatt

SEQ ID NO: 33778 - DNA, 182 bp, Setaria italica
  Peptide Sequence Number=SeqID_99752
ggcgccgccaaggcggagatggagatggagagcttcagctcggccgagttcccgcccatcgacgagagcttctggtcgtcgccggacgtggtagacatgggcctcggcgccatggacgaggagctgggcctcgcgggcccgccgtcgttgtccacgagggacgaggacatggagttctggct

SEQ ID NO: 33779 - DNA, 215 bp, Setaria italica
  Peptide Sequence Number=SeqID_99753
agccggaggagcccagatcaatcccaccgccacgccgcgctcgagctagccacgccgccgccgccgccgccgggtccgcgacgaagaggaggaggagatgaagcccaagagcctcccgttcatcgccttcgagcacaagcgggatgcatatggctttgctgtgtggccccaacacttgcagcgttacaaggagtacgcaggcatctacaaggagg

SEQ ID NO: 33780 - DNA, 408 bp, Setaria italica
  Peptide Sequence Number=SeqID_99754
tgtcgttgggcgacaacaagctctccggcgacataccggaggaccttttcgactgcggcaacctccggaagctaaacctggccgggaacagcttcaccggcggcctgagccctcgcgtcggcaggcttagcgagctcgggttgctgcagctgcaaaggaacgccctgtctggggcgatactggaggagatcggcaacctgacgaagctcatcggcctggagctcggggagaaccgcttcgccgggcgcgtcccggcgagcatctccaacttgtcgtcactccagcagctcgatctgcagcagaacctcctcagcggcgcgttgcccggcgggatcttcgagctgcggagcctcaccatcctcagcgccgcgtcgaacaggttcgccggcccgatccccgacgccgtct

SEQ ID NO: 33781 - DNA, 663 bp, Setaria italica
  Peptide Sequence Number=SeqID_99755
atgctgtcatttaacaccttaaggagccccaaacgcaagtatgtccatccataagaacaaacatggctctaaggagagatgagttgtcatggtggttttgatattcaacagtccaggaagacagaagtctgtcataacaggaggtagctctaagctcagggggtaactcaagtagatctgtgaagtcaagttgtctcgtgacaccaatgtccatcatgggattaacaaacttgaaagtcaacagttcccacaaagtatggcccttttttaccatgtttgtaatttcagactcagctttttcgtcatttagaatgagaggggcttcaatagagttcattttcctcttgtttcctagctgacccactacagcagccacaacaacaaagagtccaaatgtggtcgcagtacaaaatgagatgatctccataaaagatgccattgtctttagaactgtaagcttgtattgcaaatgaggtatctctagaagaatcttcaagatccagcaaaagcacatgattgggttgtagaggatttcaaaccaagccccagtgacacagacaatacttacagacatccatgcaataaattgtgagcacatgaaaaatagttcatggtcttcaacatccttccttcaaatttcttcttaactagcatagttagtcc

SEQ ID NO: 33782 - DNA, 1458 bp, Setaria italica
  Peptide Sequence Number=SeqID_99756
atatgcacttgggttgcatgcaccagggttctttgacaaggtgctgcatgttgagaaatgctttctacagagtgaatctgctgataaggttcttgcagttgttcaagaaacctggatggatccttccctaggcctcacgcctagggatggccccatccaggttgggtttctcaagcatcttatgataagaaccggaagaaacgtcaggactggaactcctgaagtgatggtcaattttgtgacagcatgttataaaccagatctattgatgcctcttgtggacaatatcacaaaaatacctgaagtggtcagcgtcataaataatgtgaacacatctgttggcaatacatctgtgggtgaacaagaatacaccttgtatgggaagccaaacattacagagatgttgagaggacttacattccagatatctgccaactcctttttccagactaatacaaaacaggcagatgttctttacgagcttattgaagattctgctgggcttaaaggagatggctctgaaattgttctggacttgttttgtggaactgggaccattggcttgacccttgccagaagggcaaagcatgtttatggatatgaagtggtccctgaagccattgcagatgctcgaaagaatgccaagttgaatggtattaataatgcaacatttgttcagggagacctcaataaaatcaatgaatcattcgggaaggaattcccaaagcctgacataatcatctcagatcctaatcggccagggatgcacatgaagttgatcaagtggctattagaagttaaagcccctcgaatagtgtatgtctcatgtaacccagctacttgtgcacgggatttggactacctatgtcatggcgtggaagagaaagatttgagtggatgctatgagctgaagagtgtaattcctgtggatatgtttccccatactcctcatattgagtgtgtctgcttattggagctgcgttgattttcacggttttgatcagaaatttttcatgagggaaatactcgtttgctatttgcggcatgaaggccatggcgagatacctgacctgatactttttcattaatgggtacactttccatgatttccaaatgactgaggaactctggtatcttctttttggaccggcaattaaggacttaagatacaaaccatgatgtgtgttacttaacactgggaagttactggacaactgatctgaagaccccagcttggactttgttgaaacacttttgatggggagaatatgcagtggaaaccacctggcaggtggaaacctgaaaactcgcaccatggaccgttagatcggagatgtgtggtgcatcgtggagcaaccagtcatgtgatgcattttgcattttaacgcccgcatgactaaacacttttttctattagaccctcctcacttccaaaatgtactgacttaagacccccta

SEQ ID NO: 33783 - DNA, 709 bp, Setaria italica
  Peptide Sequence Number=SeqID_99757
ctctgggtggctgctaagtgacagtcgcgaggataagattgatgattttgtccaggagatggagatgacccggttctggccactggacaggagggaagccattgctgaggtcctcctcaagaatgttgacctcaagaccaagttccactgccctgagaagtatgaaaacgaggagcgactggctgatcacaagcaacaatgtagcttcagacctgttacttgcccaaatgatggatgccgagccaaagtttctgtccgctgcatggaggatcatgatgcagcttgcccattcaaggtccttcagtgtgagcagaactgtgagaagcgcctcctgaggcgtgatatggataggcactgcgtcaccatctgttcaatgaggcccatgaagtgcccattcggctgtgattcctcattccctgagcgcgatcttgagaagcactgcttggagtttcttcaagaacatttgcttaaggttcttaaggtcattcacaagaaagggcattcagaagaactgaaggagcttgctcagaagctagaaaagtatgatgaacatggtaagctggctaaagctcgggatgcgagacctcttactaatgttgtgaaggaccttgaagcaaagatgaaaggtgaaccctctagttaaaggggtctattatccatcttgtgaggtttggatgtataaaagacccctttaactagagggttcacc

SEQ ID NO: 33784 - DNA, 215 bp, Setaria italica
  Peptide Sequence Number=SeqID_99758
gacgcgttcggtggcgggaagcacgccgcggcggcgtcgctgcgcaagggcgggcggctgccggtgtacgtggcgagcatcttcttcttcctctgcgtcatcgtcatgtacggcgaggacatccggtcgctcacgttcgagccgctcacaacgcgcgtgcccgcgccgacggtggtgccgggggtggcctcgggcggcgccggccggagggtcgt

SEQ ID NO: 33785 - DNA, 213 bp, Setaria italica
  Peptide Sequence Number=SeqID_99759
cagaccaaatggtggtatgccaagaggttcctgcaccccagcatcgtggcgccctacgactacatcttcctctgggacgaggaccttggcgtggaggccttcgatgccgaggagtacgtgaagatcgtgaggaagcaagggcttgagatatcgcagccgggcttggacagcaccagaggacccaagccgttcttcgacatcaccgttaggagg

SEQ ID NO: 33786 - DNA, 232 bp, Setaria italica
  Peptide Sequence Number=SeqID_99760
taacagataggcgaggccgccggccggcgagcagctcgcggtgagctctcgcacacccaccaccacgctgctgctttgctctgcgagctgtgcgcgaggagcatggaggccggcggtgtgaggtgtgagcgcgtggggaattgaggcgtcatggtccgagatatatacatgtctctcttttctaggtatcttagattattcttagctttattatcagcagttcagccacccc

SEQ ID NO: 33787 - DNA, 1915 bp, Setaria italica
  Peptide Sequence Number=SeqID_99761
ttacttccgcggcatcgccgggagcgccggcaacatcatgcagggcatggggaaattcgttttcggcaatgagggtcccgagtccaaggaagatagctacgtcgagaaatatcttgaccggataagcaatggcacgatacccgacgaccggaggtctgctatgactgagctgcagtcgctcgtggcagagagccgctctgcacagatgtcgtttggagcaatgggttttcctatcctcctcaatgttttgaaagagggccgggaggatgtggagcttgtgagaggtgccttggagacctttgtgagcgcgttgactcctattgagacgtcacaagggcccaagactgaggttcaacctgcgtctgtcaactccgatttgctttcccgagaaacagagaatatctctcttcttttgagcttactgtcagaggaagacttttatgtgagatactacacaatccagcttttaacagctctacttacaaactcgctgaaaaggaattacaggaggcaattctattgattcctcgtggtataacagttctaatggacatgcttatggatcgtgaggtcataaggaatgaagcactgttgctccttacttatctgacccgggatgcagaggaaattcaaaaaattgttgtatttgagggtgtgtttgagaagatatttagcattataagagaggagggctattctgatggtggtgtagttgttcaggattgccttgaattgcttaataatttaattcgacacagttcgtccaaccagatgcttttaaaagagacaatgggctttgacccattgatatcaatactaaagatcaggagaggcagtgcatttaattttactcaacaaaagacagtaaatcttcttggtgctttaaatactgttgaattgcttttgatggggggcccatccggcgaatcaggtaaagatgctaacaagaacgccaatcaagctgcattggctcagaaaaatattctggaccatcttctgttattgggcgttgagagtcagtgggcccctgttgctctccgctgtatggcactgcgatgtattggcaatttggtgttgagaaatcctcagaatcttgattcccttgcgaaaaagcaagttggagaagagcctcatgttcagcctgcactgaatgcaatcttgtctatagtcttgcggacctctatagcacaggaatttgttgctgctgattatgtattcaagtgtttctgtgagaaaaatcccaatggccaggcattattagcatcaactattgttccacacccgaatcaaggagatacgcatgggcctgctagtgacatgccttttggaagtatacttctgcaagctctggtttcaagtgatgctaatggagatatggaggcatgttgcagagcatctagcgttctttctcacattatcaaggaaaacttgcaaagcaaggatcgtgtactgcaaatccagcttgagacacctacaccatcattgggacgcacggagccgctactgcaccgcattgttacatgtttgtccattgcagcttctgcagatggagaaaacgaccaaagtagccacccagaagaatcatacattcaacctgttattcttcggctactcatcgtatggcttgttgattgttcaaatgctgtcaactgccttttggaatcagcagtgcatctgaactacgtattagagcttgcttcaagtaaacgttacactgcttgtgttcgtggactagctgctgttgttctaggtgcttgcatcctgtacaatgctagccgtgagaagggccgtgatgcctttgctgttgcagatgctataagtcaaaagattggcctcacaacatactttttgaggtttgatgaattgcgaaaaagcttggcacatccatcatcagagcagcagcaccgcaaggagc

SEQ ID NO: 33788 - DNA, 1450 bp, Setaria italica
  Peptide Sequence Number=SeqID_99762
ttaaaaataaaaacaaaaaataaaaagaaaactaaagtaacaaaactagacctttaggaatcagcagtgcatctgaactacgtattagagcttgcttcaagtaaacgttacactgcttgtgttcgtggactagctgctgttgttctaggtgcttgcatcctgtacaatgctagccgtgagaagggccgtgatgcctttgctgttgcagatgctataagtcaaaagattggcctcacaacatactttttgaggtttgatgaattgcgaaaaagcttggcacatccatcatcagagcagcagcaccgcaaggagctttctcgatcaagtttaaatagcatgtcagatttccaagagattgaggaggatgaaacaaataaagatgatcaacaccctgtcctctcagaaatatttgatccacagtttgttaatttccttagtaagcttgaggctgatattagagaaaacataatggacatatttagtcggacaaaaactgcaactgcagttctacctgctgagttggagcagaagaatggggaggttgatggagagtatatcaagcgattgaagtcatttgtagagaaacagtgcaatgagatgcaggagttactggctcgaaatgcaatgttagcagaggagttagtgaaaactggtggcggtaacactgcagatacagcccagaaacctagcagtggccgagaaagggtccagatcgaagccctcagacaagaacttgagggagcaaaacgacagatagaggcactcaaaattgaaaagtcccagattgaagctgaagctaacaaccaacgaaaccttgcagtaaaagtggagtctgacctcaagagcttatcagacgcgtacaacagcctagagcaggccaactaccgcttggatgccgaggtgaaaaccttgcggcagggaggcagtgtgccctatcctgacgtggaagcgatcaaagcacaagccaaggaagaggctgagaaagacagcgaggcggaactgaatgatcttctcgtctgccttggccaggaacaaactaaggtcgagaagctaagtgcaaggttggcagagctcggcgaagatgcggatacactgctgcaaggaataggcgatgacacagccataccagatgacgacgatgaagatgaagatgatgaatagatgcttgggtaactttgtggtctccaggtgtaattcgccctcatgttgggtcatgatgttgtgatggcaaatgtacagtggataatgtgtagacaaaggcatcatttcattctaagttatttgtggaggatgggattaaattgctgacttgccttctttctgaatgcatctaaaaaaaaagaaaaaaaaaaactttcccatttacttaatacttcaaaagtttgaagataagaaataatctcttgtgcatcgcaaataaaaaggaaatgaaagttacttttttgggggg

SEQ ID NO: 33789 - DNA, 214 bp, Setaria italica
  Peptide Sequence Number=SeqID_99763
ggtgacgttctcgaagcgccggagtgggctgttcaagaaggccaaggagctcgccatcctttgcgatgccgaggtcggcctcatcgtcttctccagcaccggtcgccagtatgacttcgccagcaccagccagcatgaaatctgtgatcgaaagatacagcgaggcaaaagaggaccaccatcagactctgagcgctagtgctgaggccaagtt

SEQ ID NO: 33790 - DNA, 326 bp, Setaria italica
  Peptide Sequence Number=SeqID_99764
gccttcatctctccccaggacccaataatcgctctgtgcatgtcatcatatagcgcacatcagtttcaatatctatttcgcaataacctccttgtgagccttaaatgacaaaatcacgttccatgcaagggctacaaaattagcagcaagcacctgaaacttctgaggaacaaagtaaaaattcagaaactgaaacggtatccataattgccaatttgccaacactgatgataaccactcctgcttaagctgtggcactacaagagagggctgatcaagtaaaaggcgagcaatggcacctgatgctccgctgattgtcactaatt

SEQ ID NO: 33791 - DNA, 487 bp, Setaria italica
  Peptide Sequence Number=SeqID_99765
cgaagcaggatgcttcatgcagtatcaagaaaactctgagatgtgctgtcagaacaacctggagatgtgcctttgaatatcgggctctgttcagtctattgctactgctctacctgctgtacaagtattcaccgggtttcttcgctttccttctctccaattctccagtcattggatgcacggccattctccttggtgtactgataagctatgggggtgcacatcttccggagatcgatgaagacaggaaggctcctgaaggtattgcagctccaaagtttgagatttcttccagaaatgtaaatattgaagcagaccagagattttcagtgcctgcaatgaaggagaacataatcagggaggcaagttttggcagaagagacggtaacaagtgtattgatctggatgagagcgttcctcttctgaagggacccgatctacaagatgagagagttgatgctgaagggacccgatctaccacctgcag

SEQ ID NO: 33792 - DNA, 1222 bp, Setaria italica
  Peptide Sequence Number=SeqID_99766
ggaaagtcaaagcaaagcacctgtaagtcctgtacccaaatcagttgaaccctcacttccacttgtcaagatacctgccccagaaccaagcaaagagaatagcggtgttatgtggatatcctcacctgatcggcttgaagatcctcgaagaccatttcattactctaacagttctggctctcccagtgtttcagaatcagggtctgatatctatagcaaaagagaggtcatacagaagctgagacagcacctcaagaaacgtgatgagatgatcatggagatgcaagcccagattgctgatcttaagaattctctgaacattcaggtgacacagtccaccaatctgcaatctcagctggatgctgccaatcgggatctgtttgaatctgagcgagagatccagcatctaaggaagattattgcagatcattgtgttgcagaggcactggcacatgaaaaacctttgcaagctggacattggcagtcagatgccacaaatgggcattctaatggctatgctgatggtagtattgatgatgctgatctgcattgtgttggcatggagaagaggaagggagaggtagagagggtggagatgctcaagaaagaggttgttgaactgaaggaagttattgagggaaaggattttgtgcttcagagctacaaggaacagaaggtggaactctgctcaaagatcagggagctgcaggaaaagctctcagcacaagtgccaaacatcttgtaggatctatgcatgatgctgtttagaagaatgatgctgccatgtcccatgagtggaagggagggtcccacttcgatgagtatttcaggagaagctcttggccatcgtcacacatgccaaacaccatgctaggatctttgcagaatgcttctctttttctttttgagaggaactttgcataatgttaggttgatttatttctttctttgctgtcataatgttaggtttgtttgctttcttcctttttcaatatctgccccttggttgctcagagtttacaagggattcttttttatcctcagttgctaggcctagggtaactcaagttgctgtacaggtttatcggttttccaagagacacaaaagtctggagtgtgcttctacctcctcttttcattgcagttcagttttgagtgacggtccttgaaatgtatggtcgatgacatttctacaatgagatttgctagacctatctgtaag

SEQ ID NO: 33793 - DNA, 776 bp, Setaria italica
  Peptide Sequence Number=SeqID_99767
ccaaacccaaaagcccctctccgcgaagctgcgagcgacgccatggctttcccagcagggactccggcgaggaagctgctcctacctggaatctccgccaaggcgggaagcgtcgccgtcggcttcgacctcgacggcgccgtcgacttcttctcgggcctgtggcagcttgtgaaggcgaaggccgcggagatcctcgcctacctcgccaccctcttctcggcgctcgccaagaaggtcgacgagctcctcccgccggatacccgctcggagacgctccggcagtggctgcacgtcgccgtcaccgtggtgctacccgccgccctgggcgccctcgtgctcctctgcgtcgcccgctgctgctggcgttgctgctgcgcccgcaacagggcccctagaggccgcctgatggtggcgccagggcgcggcggcgcgcgcatgccgcgggacgtgttcgaggacgacccccggcgctacttccgcgacctccgcgccaggaagcccctcgtgtactagcgcgtccgcacgtatacgtgcgttcgtgtatacgtacggtacgagagtccgagatagggcgtatgtatatgtgtatgtgtatgcacggcttgatgtgtccgtacgcgactgtgatgtcgtagtcttgtgcatcatattgtactgcgcgtgtagttggcattattggtaatgaacgagtcacctcgcgttatgtacattcatgtgccgttgcatagcaacacaagctgcacgatcgagttcgatccactacttgaaaaaaa

SEQ ID NO: 33794 - DNA, 498 bp, Setaria italica
  Peptide Sequence Number=SeqID_99768
cgggggcgtggtggccccgtcggcgacgcccccgccgccagcgacttcgggtccccgccgccgcctcccactcccactccccctcctccgccgctgcctcccgccgcggtgcggctgtccaggatcgcctccaggtacccattgatccactcattccccgccatcccctacttctcgctctctcctccgcctctacgccgctctctcagatcactacaggagcattaacccaaccgcccacgcctctctctccctcccacttttgcgtctcgcgtgaacccttcctggccgttgcttggtttcctcctttggtgcggcagggagaaagcgccccgcctggtgtggcgacacgagggaggggagagatggcaagtgttaaccggaagcgatcaagagagagaatgggggtagaggggaaaaggcgcgcacgtcccgcgcatcggaggacagagggagagagagacagaggaaaggctcgtgccgtccatgcggttgcag

SEQ ID NO: 33795 - DNA, 609 bp, Setaria italica
  Peptide Sequence Number=SeqID_99769
acgccgccgccgccgtgacgaggaggaggaggaggaggaggaggaggatgaggccctctcccactccgaccaggaggaggaggacgaggaagaagagggtgtctccacctctgccaccaccaggttcgagcaaggctgcagggcgttccgcgtagccttcctcaagatcatggccaaaaagctccctgacgatcccctgggtccaattctgtcagcgcacaagaagttggtcgccaccaagttggccgaagagttagaggagcacaagcccaagggggaggctagaaaggagaagcgaatggcagcagagaagggccatgtcatacctgaagatcacttggacagcaaagagaaggaactcatcaaggttgctacgaagggggttgtcaggctgttcaatgcggtgagcaaggcacagaagcctcggaaagatttgaacccatcaagaactaaagatgccaaagttttagcaaaagaaaggaaaaacaccttcctcgcggaattggagatgccatcacatcaagataaaaagagccaggcaccttcaaatttctctaagcgtactggcaaagatgaagatgagccagcatgggcacccttgcgtgacac

SEQ ID NO: 33796 - DNA, 350 bp, Setaria italica
  Peptide Sequence Number=SeqID_99770
cacctttttcgtcatctccctccacggtatgttcgacttctccgccgtcctatacacacatccacattcccagcgccatttctcccacccatgaacaagtgaagaacaacaacacgtccgccggcatgtttgcaactgttacctgatgatgacctcgcgcgaggcgagcttcatgagcgagtagagcggcttgaaggcgatgagcgcgccgacgagccgcgacagcggggtctcgccggaccacgccggacgctccagcgccccttcctgcggcaccgccggcccggtcccggtcgccgcggcgacgacgactgcattgcggcgccggcgacctgtggacctcgggaggc

SEQ ID NO: 33797 - DNA, 258 bp, Setaria italica
  Peptide Sequence Number=SeqID_99771
tgctgcagccagccatgacagattcccttcatcataagcgtgaaacgggctcaaataatagttagggtagactaagtttggatctcgtatcctctcgaccatctccgcggctccgccatgaagcacctcctcctcccctcccctctcccgttcctcctccaccgcccatccaagccgcttctcctccaccctcgccgccgcctcggcttcatctcccccgccgcatccggcggcagctccggcgaacccgcctcatcg

SEQ ID NO: 33798 - DNA, 460 bp, Setaria italica
  Peptide Sequence Number=SeqID_99772
tttaaacggtttaaacttaaaaggttaaattaaggtaaactaaaactaatttagaataaaagaccaaacttgtactcattgtctcctccagatccagcatgtagtactcgtccagaaacggctcggtgctcttcatcagagtgaacaacactggggatagttcctgaagtactttagattttggcgaattgtcggttaaggcgattgttcctcccgggcgaaggacccggaatgcttccttcaccaatccagttattgctcgtgctggacactcatggcacacataagcaagggagacaaggtcgaatgaatccgagggcaatcccatcgcctcatcttcttatcccccgcctcctcccgccgccgctgctcactcccgaggcccgagctccccgagcaagtccccatggcgtccaccaccctctcctccgccttcaccctcctctcccgcccctcctcc

SEQ ID NO: 33799 - DNA, 353 bp, Setaria italica
  Peptide Sequence Number=SeqID_99773
gaatttacattacagaatgactgataacatcgcaatgcaaataaaacagtagaaggtgtggtgggaatattgtgatgaagcttacctgaagtactttagattttggctgcaaaggatttggaagaagtggacgttaatcgatttttgaaaagtatgcactcatatgtagcaaaggtgaaacgaaatatattcttaccgaattgtcggttaaggcgattgttcctcccgggcgaaggacccggaatgcttccttcaccaatccagttattgctcgtgctggacactcatggcactgcagttttatcagaattataatcttctttgcatggatttaaatctataatgatggtgta

SEQ ID NO: 33800 - DNA, 1244 bp, Setaria italica
  Peptide Sequence Number=SeqID_99774
tttggtcttaatggtacgatccaatcagtaaggcactgttgcagtgactgttctatgcctggcgtcggtcaggatggaacaaacattgataaagccaacttgtctcattgtctcctccagatccagcatgtagtactcgtccagaaacggctcggtactcttcatcagagtgaacaacactggggatagttcctgaagtactttagattttggcgaattgtcggttaaggcgattgttcctcccgggcgaaggacccggaatgcttccttcaccaatccagttattgctcgtgctggacactcatggcactgcagttttcttagatgtggcattactgaattggtggtgaattatattcggtgcatgattattgcactgtaaagaatgaagataatctgggcactttattattggtctaaagctttagagtgctcgaagcttaatgaaatatttggctagatttacttcacaatttactttaattggtcctgtatattataataaaattctattatttttgtttctccacctacaaaaatttgtagggtgacatatatggtatcagctttacgttagaaattataattattcatcattttttcatgtgtatttgaaagtattaagtatgtaatagtaaatttgaactaagcacagcttaaagtattttctttaccacctcataaaatttgaactaagcacaacttgttcaggaaatgacagtggattgttgggtagtaagatggacattttccttaaaaatattgatattctagtgcattaattaattttttggtaaccatcattatagatttaaatccatgcaaagaagattataattctgataaaactttaccacataagcaagggagacaaggtcgaatgaatccgagggcaatcccgtcgcttcaccattcgcatgaacccaacgaatagggttttgtcgtgacaatttttcttccctttgtgccgccaccgcaagaaagtatggtgataggtcgagtccaacagcttgagctgaagggaacttctcagccaggtatctagtgcttactccaacagagcagccaatgtccaatatatcatttatctgacagttcccggagtacttgaggtgatgctcctcgattgcgttcagccagttccctcgaacaatttggtttgcttcttcgatcgatgtcgcctccggtatggccctctttgcaatggacattgtcgcaggttcagcctctgctgcagccgtcct

SEQ ID NO: 33801 - DNA, 1372 bp, Setaria italica
  misc_feature (1)..(44): n is a, c, g, or t
  Peptide Sequence Number=SeqID_99775
nnnnnnnnnnnnnnnnnnnnnnnnnnnnnnnnnnnnnnnnnnnnttgaaccgtagaaatccatctgtggatgtactttgatttgttgttcactgcgtacacagcacattactcaaattgtaaatgaacattactcaaattgtaaatgcacattattcaactctttacaagtacaaccatcccagttgagcatacaaaattttgcttggtgaagtgttgtagtttggtacttaatggtacgatccaatcagtaaggcactgttgcagtgactgttctatgcctggcgtcggtcaggatggaacaaacattgataaagccaacttgtctcattgtctcctccagatccagcatgtagtactcgtccagaaacggctcggtgctcttcatcagagtgaacaacactggggatagttcctgaagtactttagattttggcgaattgtcggttaaggcgattgttcctcccgggcgaaggacccggaatgcttccttcaccaatccagttattgctcgtgctggacactcatggcacacataagcaagggagacaaggtcgaatgaatccgagggcaatcccgtcgcttcaccattcgcatgaacccaacgaatagggttttgtcgtgacaatttttcttccctttgtgccgccaccgcaagaaagtatggtgataggtcgagtccaacagcttgagctgaagggaacttctcagccaggtatctagtgcttactccaacagagcagccaatgtccaatatatcatttatctgacagttcccggagtacttgaggtgatgctcctcgattgcgttcagccagttccctcgaacaatttggtttgcttcttcgatcgatgtcgcctccggtatggccctctttgcaatggacattgtcgcaggttcagcctctgctgcagccagccatgacagattcccttcatcataagcgtgaaacgggctcaaataatagttagggtagactaagtttggatctcgtatcctctcgaacacctcgtacacgtcggactccagcacctttttcgtcatctccctccacggtatgttcgacttctccgccgtcctgatgatgacctcgcgcgaggcgagcttcatgagcgagtagagcggcttgaaggcgatgagcgcgccgacgagccgcgacagcggggtctcgccggaccacgccggacgctccagcgccccttcctgcggcaccgccggcccggtcccggtcgccgcggcgacgacgactgcattgcggcgccggcgacctgtggacctcgggaggctgccgctggcggtggcggtggcgccggcgcgcggcggggatggccgccatgcttgttcggtcgttactttcttgggcaaccgtttt

SEQ ID NO: 33802 - DNA, 403 bp, Setaria italica
  Peptide Sequence Number=SeqID_99776
tagcccggctgcaccctgaccgaggcgccgaagtagccgctccggtacgcccgcgccgacttgaacccgctgccggagctgcggtccatccacagcgtcagggacctgccgtccggcgagagggtctggtgctgcgggccccacagggtgcggtaggcctcggagaaggccagcgacctgagcgtggcgctcgggtagtagccgggagagggaggctgctgggcggcgcagggctgcagcggcagcgtaagcagaggagcaagcgcgcatgccaggaggagagcagttgcctgccgcaccggcacatcaccaggccttgccatctgctgatcagttggtgatacactgacagtgttagatgtgtctagtgaatcgtgatcttgtctttggtagtaattagaca

SEQ ID NO: 33803 - DNA, 1442 bp, Setaria italica
  Peptide Sequence Number=SeqID_99777
aatccacaatcttaattagcacatgtagctttcacaagcatgctcctctttagataatggagtatagatctgcatctgaagatacaaacagtctagtcacttaacataattactagtaattgcacgcctcaagcactggtgaacaaatttcagaatggcagggcggcgcttcactcgcacacctccttttgccgctcagctctccttagacgaagggtatggacaaacccattcttgttcgtacccaaatctaaatataaattatccaatcctcaccctctccattctcacccatattcaatgaataattaattttgtactaggtactatgtatatccaatagataaattgtatcttccctataccctcccctccctgtttggacgcggatttgggtatgcattatggatatccagcggcaacaggcctaggctctcctgctgacttgctgtagtacgtgtggtaatcatgatgacggcagtcgctagcactcggggtatagcgcgcggtccttggtgtgatcctggcagtagtagtagaccatggacctgtgctgcgcccagcgcatggcgtcctgttgctgcgagctgaggccggtgcccgctggcgacgccggcatggggcggcaggtcgacggcgcggcaacctcgcagccggcggtcttgaacccctggaagcgggccacgaagggctggtacgcgtagtccgccctgtagcggccgccatcggttgcccagtcggaggcgtcccagatggagccgtacgcccacatctcccggtccgggaacgcgtccccggcgtagcggcgcacgggcacgtcgtcgacgaggaagacgatctcgtcggggttccagaggatggcgtagtggtggaagtcggcggcggggtcgaaccagaggtggaagcgcatctcccggccgacgaggcgggcgccgtcgccggtgccgcgcacgtacacgttggtctgcagcgtgtagggctcgccggggaccgtgcccagcagctccatgtcgatctcgtcgtgcttccccgggtaaagctcgttgttggacaggtagaaggcggtgttgacgccggcggtgtagcccggctgcaccttgatggacgcgccgaagtagccgttccggtacgaccgcttcgacttgaacccgctgcctgagctgcggtccatcagcagcgtgagcgccttctggtcctgggacagtgtctggtgctgcgggccccacaggttgacgtagccctccgagaaggccatggacctcaccatggagctcgggtagtagccgggggatggctgcgcctgcgccgccggtggatggaggagcacaatggcaggcagcagcagcaggcatggtgctactaggagattcttcttcttgtcaggcatcttgttgcttcaattcgagcgagagcagttgctttgcagggcaatatgttgcaag

SEQ ID NO: 33804 - DNA, 336 bp, Setaria italica
  Peptide Sequence Number=SeqID_99778
tgcatgggtagttgcttgcttggtgaagttgggaaagcgctggatttatttgacgaggctgtcagggatggtgtggcactgaccaatgtgacatatggggttctgatcaaaggttgtgatgcagaggggatgacagataaggcatatgagctatgccatcagatgatagagcagggattgctgtcaagcacgcatgggttcaatttggtgataaaaggtctattaagagacaagcggtgggaggatgccattggcttgcttgaggttgtggctgatactggggtgccggatgtcttcacatacaattgtctaattcattggctttgccagcgtcaa

SEQ ID NO: 33805 - DNA, 253 bp, Setaria italica
  misc_feature (239)..(239): n is a, c, g, or t
  Peptide Sequence Number=SeqID_99779
gagcaagtcctcgtacgtccccacccccaagatggaatacctgatcacctgtgcaaagtgcttttcaggcgaggtcaagcaccagacggcgctcttcagcatcctgccgaactggctgctgcatcggctgttgatatcctcagcgatgtctcttccttgatcctccttgtactgctggaacgtcgctctgagctgagacttgctacgggtgctgatgatccggacgacttcatttccgngcagttgcttctct

SEQ ID NO: 33806 - DNA, 2181 bp, Setaria italica
  misc_feature (2032)..(2109): n is a, c, g, or t
  Peptide Sequence Number=SeqID_99780
cgactcgaatcactcgcctccctctcttgtctctgccccctacggccctaccccatccatccggcgagatcgagctcctcttctctattggcgacggcctttcggtgtcgattcccactagctcgtggcgtcccccgaaccgatggaggccgcggcctccagcgacggggagtcggcgggtgagctgcttctccgcgcggcggcgctggtgccgtggacgcactacgcgctcgcggccctcgccctcgccaccgcgctcctgtacaggttcctggagcttcacttcatcggggacctcctacgcggcctccgcggcggccgcgtcgcgctcacttttcaccccgagtctcaagtgtaccaccgggtcgcctccaagtgccgctcgctccacggcaggtacctcgcgacgccgtggctggcgagtcctcatctgcagacgttgttcctgagcatctctggcagaccgccttcgttcacctatcggaggcagctgtacactgttcatgatggtggaaccattgccttggattggttactagcctctgatcttgaagctgcagatgttgattcttgtgacgaatccatttctaaggatgattcaacaccccttcttcttgtgatacctggattaactagtgattctagtgctgcttatgtcaagcatttagtcttttctatggcaagcaaaggatggaatgttgttgtcagcaatcataggggtctgggtggcatctccataacatctgattgcttctacaatgctggatggacggaagatatgcgtgaagttgttaattatcttcaccaaaagtatccagaggctccactattcactgttgggacaagcataggtgccaatattgtggtcaagtacctcggagaagaaggtgaaagcacccctgtagctggtgctgcatctatttgctcaccctgggatctgctggtgaccaacagatttatttcacgcaagcttgtgcagcggtgttatgacagagctcttgcaattggtctcaagggatatgcaaaactacaccaaccagtcttggcaagacttgcaaactgggaagctattacctcgtcaagctctatccgggaatttgaccggcatgccacttgtgtcgttgcaaaatacgagacagtggacacattctaccgcaaatgcagcagtgcgaactatattggcaatgtgtcagttcccttgctttgtatcagtgctttagatgaccccctctgcacaagggaggccattccctgggatgaatgcagggcaaacaaaaacattgtattggcaactactcctaatggtggacatcttgctttctttgaaggcctaactgctggaagactatggtgggtaaggcctgttactgagttcctctgtgctctacatgatagctgctatatgcatcggcagaaggcacaggagcatggtttgcactcttcactggaatccttaatcgacaagagcccgtatgttaatttcatggaagacggaatggtagctgcagtaactaatgatggtcctgacaacgatgactccttgcataaccagattgttgatgaaatcaaactcagtgatgatatggttgccatagaacagaatgaacagaccggagaaatacagaatgagagtgacagtggggtaggtgacaagaacaactcagaagggaatgtgacatctttccaaggccatgaaggaaatcatgaacagcgagaagagcccaatgcaaataatatccgtgacgccattgcccctgttaggagatccataaaccagatcaccaggtcccaggggaagtcagtctggttactcgcttacattgctgttgtaacgtcttggccgttgcttgggaccctaggttttttcctttttaggaaaagatttagtaattctctgttagctaagaagatgaagaaattgtaaacacaaacgtgtttcttctggaacaagtaaaataaaatccttgtaacaagcattaacacatttgttcatgcatcaatccatgataataaaagatccagctgaaacacnnnnnnnnnnnnnnnnnnnnnnnnnnnnnnnnnnnnnnnnnnnnnnnnnnnnnnnnnnnnnnnnnnnnnnnnnnnnnntgcttggtagtaattcacgtgtcagtcttttttgttaacatggtataacatgtcatagttgaatgcaggcac

SEQ ID NO: 33807 - DNA, 400 bp, Setaria italica
  misc_feature (381)..(381): n is a, c, g, or t
  Peptide Sequence Number=SeqID_99781
cgtctgcccgcgcagcaggttgccgaggcgcgcgctgatgccggcgatgcggcaggcgtcctcgatggcgccgccggcctcggcgtccgtgacgtgcacgacggccgcgacgcgcgtgttgtgcgtccacagctcggcgctctggacggcgcagcccatggcagcgagcaccgcgcacacctcggagagcaggccggggcggtcggtgccggtgagctcgatggaggtgtactcctccgacggcacgatgcccacgctgttgcgcgcctccgggtagtaccagtcgtcagactccagcgtcttctggatgtatgagatggttgaggcgtcaacaaccttgttgccgtcacggtcggtgacattgaacacgtccatgaaccngctgccgtcggaggagaag

SEQ ID NO: 33808 - DNA, 267 bp, Setaria italica
  Peptide Sequence Number=SeqID_99782
tttggcgcggcctgctgctgcagcgccgaggcctgggacttgtagatggcgacgttcttggcgatcaggtctttcctctccatcccgtctttcctcggccatccgccgatcagcacggcgaagttgacgccttggaacgcttcagcctcgtcgctcgtcgccacaacacctctgagaagaggcagggcggcatcgaccagctccatcctgacgccgttcagggcgtccgccatgcgcgggatgtccagcacgtggagcaccaccggc

SEQ ID NO: 33809 - DNA, 563 bp, Setaria italica
  Peptide Sequence Number=SeqID_99783
tccgaggtttccggggaagggaaacggtattggggggtgcttaaaactgcaggtagggagagattggagctctgtagtgggagggattggagagggtttgaaatgcgaggacacccctcacctttgcaaacaaaaggtgagggcttttgcttttggcaggatcaagaactcaaattaaagaaaagagcacagcatcaaacaaggagggggaaaagaaagctgagaaatacaaaagatttgactccactttttttctccctcttgagctgtggagcagctagaacaatgctcgaaccaccggtgaaacgaaatggggtgggatgtgctggaatagttcttgaaatctacagctacaaacaggagaagaacagagccaagctcgatttccagatgggggaagacgctcaagctcagatgcagagagcagccacaccctcgctcctctcaccaaacaccttgcaagtgttttcaatgccactaaatgcagtgcatcatgatgagggggagttgcattcattgccttgcaagagctactgctagcagctgcagcagccacacccccc

SEQ ID NO: 33810 - DNA, 236 bp, Setaria italica
  Peptide Sequence Number=SeqID_99784
aaaagctgcatccactggtcaagttgagaccaatcttcctgctgttggtcctgcttcatatcagcagcacctctcttcgacgagcatgccagggccatcaccagcaggtaagcagcatctgagcctttagaaacaatgaccagatttttgtcggtttgagtttgtagcttatggtaactggaaacactaatggctgtgtaaatacattgatacagaaattaatctgatatgaaatt

SEQ ID NO: 33811 - DNA, 256 bp, Setaria italica
  Peptide Sequence Number=SeqID_99785
ccgaccgcgacgccttcgtgttctgggacgccttccaccccaccgagcgcgccaaccgcctcatcgtgcagcagttcatgtccggatccgtcgactacatcgcgcccatgaacctcagcaccgtcctcgccatcgacctccaaaaggagcagctgcgcacatgattcattcatcgatcggccagtagcagtcgcgttcgttctcagcttgattatcattcgtgcttgcatggcaactgcagttgcatgcaagcacg

SEQ ID NO: 33812 - DNA, 381 bp, Setaria italica
  Peptide Sequence Number=SeqID_99786
aacaggattattaatccagaaacgaagcaggattaaacaagtttcttacaacataagatgttgtaaacgacatacgacgacagataacagttcaaaccgacacaccgacacacaacaagataagataggagccactcgggcagatcataggataaccgcggcacacaggcctgacacagcagcaggaagcatcgtctagtactcgtcaccctcgtcagattcagggtccatcatggacatcattccatggggcctggacccactagaatagcctattgagtaatctggaacttgctcttcataatcgtcatccatgggttggccattttcctcattatcttctgactgagatccagaactgttctcatcaccttcagtgta

SEQ ID NO: 33813 - DNA, 557 bp, Setaria italica
  Peptide Sequence Number=SeqID_99787
cgcgaacaatgctatatataataaccatagaaccgcaggtttcgatgtgcatgaggccacgaacgaacacttggcccactccaaggacccatcggccatcgcctcgctcgcttccgacgatgatgaggagcctcctggcggcggcgctcgcggtgctgggcttgctggcgaggccgtcggagtgcgcgcgcgccttcttcgtgttcggcgactcgctggtggacaacggcaacaacaactacctcatgacgacggcgcgagccgactcgccgccgtacgggatcgacttcccgacgcaccgcgccaccggccgcttctccaacggcaaaaacatccccgacatcatcagcgagcacctgggcgccgagaccacgctgccgtacctgagcccggagctccgcgggcagaagctgctggtcggcgccaacttcgcgtcggccggcgtcgggatcctcaacgacacgggcatccagttcgtggacatcctccggatgagccggcagctgcgctacttcggcgagtaccaggccaagctgcgcgcgctggtgggcgccgcc

SEQ ID NO: 33814 - DNA, 496 bp, Setaria italica
  Peptide Sequence Number=SeqID_99788
ttcggcgactccctcgtcgacaacggcaacaaccaactacctgctcacggcggcgcgggcggactcgccgccgtacggcatcgacacgccggaccaccgcgccacggggcgcttcagcaacggcaagaacgtgccagacatcatcagttaagtcggatagatatacctgcatatgcatgcatgctgtctctgaagtctatcatcagtagaattgctaacagtagtgcacattgcatgcatgctgtctctgaactcttgttgccggcaccgcatgtgcatgcaggtgagcacctcggcgccgagcccgtgctgccgtacctgagcccggagctggacggcgacaagatgctcgtcggcgccaacttcgcgtcggccggcgtcgggatcctcaacgacaccggaatccaattcgccaacatcatccacatctcgaagcagctgctctacttccagcagtaccagaagcgcctgagctccctgatcggcccggagcaga

SEQ ID NO: 33815 - DNA, 501 bp, Setaria italica
  Peptide Sequence Number=SeqID_99789
ttttgacacgaaacataacaggattattaattccagaaacgaagcaggattaaacaagtttcttacaacataagatgttgtaaacgacatacgacgacagataacagttcaaaccgacacaccgacacacaacaagataagataggagccactcgggcagatcataggataaccgcggcacacaggcctgacacagcagcaggaagcatcgtctagtactcgtcaccctcgtctccttcctcgccctcgtcgaactcagcaccatcctcgccatggaccgggaggggctctagatttttttcagcgtcatcagccggccggccacgagtttatatacgtacatgtcacgtgccgatcgaggacactatgtcctgcacggtggcagcataatttgattggtgtcgtgacacaattgagtttgacagtgttttcctgatctgtcatggatttaacgggattagtaattggttgggattggtactttcgagttatgcattgtgc

SEQ ID NO: 33816 - DNA, 536 bp, Setaria italica
  Peptide Sequence Number=SeqID_99790
aatccccacaccgaggaagcaggaagccacgagcagcatatgtcacagagggccagcgtcccacactcctccagaatagccttcgcgctccattcccatctcctggtctccagtgagatgtgccccagctcctattggcagtagtagctagctaatctcgcgtttttcttcttcttttcgtttcgggtgggtttgctcccccgagctttcttgagcttccgtttttagttttcggctttccttggtctcgaatccatccctctccgataaggaggctgctaaggggaagaaggaaggaaccaaccgcggcgaggagcaagaaatcaagcaatgggggtcaagggattcgtcgagggcggcatcgcgtccatcgtggccggctgctccacccacccgctcgacctcatcaaggtccgcatgcagctgcagggagaggcggccgccgcggtgccgccgcagccggcgctgcgcccggcgctcgcgttccacgcgggcggccacaccgtcgcactcccgcaccaccacgacatcccggc

SEQ ID NO: 33817 - DNA, 583 bp, Setaria italica
  Peptide Sequence Number=SeqID_99791
ttttttttttttaacctattgcgagcgttgccatagcagacgtactcccaaattgtaaacagacgaagacgaagcagacaatagtagatcgacaccaaacagacacgaaacataacaggattattaatccagaaacgaagcaggattaaacaagtttcttacaacataagatgttgtaaacgacatacgacgacagataacagttcaaaccgacacaccgacacacaacaagataagataggagccactcgggcagatcataggataaccgcggcacacaggcctgacacagcagcaggaagcatcgtctagtactcgtcaccctcgtctccttcctcgccctcgtcgaactcagcgccgacctcctcgtaatccttctcgagcgcagccaggtcctcacgggcctcagagaactcgccctcctccatgccctcaccccacgtaccagtgaacgaaggcacgcttggcgtacatgaggtcaaacttgtggtcgatgcgggagaacacctcgaccacgctggtggagttggagatcatgcacacggcacgctgcaccttggccaggtcaccgccaggcaccacg

SEQ ID NO: 33818 - DNA, 1689 bp, Setaria italica
  Peptide Sequence Number=SeqID_99792
cggcagcgcgccattgaggtgccctgcggccgcggccggctggcctctctccccgtctataagagggacaccgccacgccacctttccgtccccgtgcgccacgccccccccgccacttggcctctctcctccatcaattcgatcccaccctccgtcacactcactcccccgcgtctctctcactctcagtgcgagtgaagtgagttcccgagcacgcgatggacgctctgcccgtgaccttcctcctcgccgccgtggcggcggcgctcctcgggaccgcgtctgcggcgccgcgggccttcttcgtgttcggggactccctcgtcgacaatggcaacaacaactatctcatgacgacggcgcgcgccgacgcgccgccctacgggatcgacttcccgacgcacatgcccacggggaggttctccaacgggctcaacatcccggacatcatcagcgagcacctcggctccgagcccgcgctgccgtacctcagcccggacctccgcggcgacaggctgctcgtcggcgccaacttcgcctccgccggcgtcggcatcctcaacgacaccggcatacaattcgtgaacatcatcaggatcgggcagcagctggagaacttccaggagtaccagcagaagctggccgcgttcgtcggcgtggacgcggcggcgcaggtcgtgaacaacgcgctcgtgctcatcacgctcggcggcaacgacttcgtcaacaactactacctggtgcccttctccgtccgctctcgccagttcgccatccaggactacgtcccctacctcatctccgagtacaggaaaatcctcgtgcggctgtacgagctcggggcccggcgcgtggtggtgacgggcacggggatgatcgggtgcgtgccggcggagctggccatgcacagcatcgacggcgagtgcgcgcgcgaactcacggaggcggccgacctcttcaacccgcagctggcgcagatgctgggcgagctcaacgccgagatcggccgcgacgtcttcatctccgccaacaccaaccgggtcagcttcgacttcatgttcaacccccaggactacgggttcgtgacgtccaaggtggcgtgctgcgggcagggcccgtacaacgggatcgggctgtgcacgccggcgtccaacgtgtgccccaaccgggacgtgtaacgcctactgggacgcgttccaccccacggagcgcgccaaccggatcatcgtcggccagttcatgcacggctccaccgaccacatcagccccatgaacatcagcaccatcctcgccatggacaacagggactaggccaagccgcctggcgtcgacgaccgatgcccccctgcaccagcagctgctacgacacacgaatagccactactacgtttagcgatactagtatagtagtatatgctcgttattgatttgcacgaagagatttgcttgctgtatgttcatgaagctggtggatagctagaggttttggtgttcgttcgttctttttttgggtgtggctattaaggtgaagtgaaatcaatggtgaaagttgagcctagaatggattttaatttttacctatgttgttccagattatgtttggcaggcaggggtagctaggaaaacttcgtcaattacgagattaagttgtcactagccccatcgattaattcaagaatttgttgcac

SEQ ID NO: 33819 - DNA, 2241 bp, Setaria italica
  Peptide Sequence Number=SeqID_99793
ttcagactgtcacacaatcaggacaagcaaacatagttgttgcagttttataaatatagacttttgttgctgccaaaaatggttcttttgcttgctcgtttctgcaagcttggcacgttatttgatgtacgaataacagaataagtagtgacttatcacattccagttgtagtaaatagtctctctttctactttgcagtgttattgttgaagcattaaagatggatagtctacagaggctctgctcatcattggaaccaattcttcgtagagtagttagtgaagaagtggagcgcgcactggtcagacttggccctgcaacaatcagtggaaggtcttccccaaagcgaattgaaggtcctgatggaagaactctgcaactccagttccgtacaaggctgtcacttcccctttttaccggaggaaaagttgaaggggagcagggagctgcaattcatgttgttttgcttgatgctggctctggttgtgttgtatcctctggtccagagtcatccgccaaacttgatattgttgttctcgaaggtgatttcaacaatgaagatgaagagggctggacaggggaagagtttgacagtcatgttgtgaaggagcgtgagggaaagcggcctattttaactggtgatctacaagtcacactaaaagaaggcgtcggaacaattggggagcttacgttcacagataactctagctggataaggagtaggaaattcagacttggtttgaagattgcctcagggttttgtgagggtgttcgcgttcgtgaagcaaaaactgaagcttttatggttaaggaccatagaggagaattgtacaagaagcattatccacctacactgaaagatgaggtctggaggttggaaaaaatagggaaggatgggtcattccataagaggctgaacaaatctggaatatctacagttgaggatttccttaggcttgtggttcgggaaccacagaaattgcgcagtatacttggaagtggtatgtccaacaagatgtgggaaaccctcgtggaacatgcaaagacttgtgtcttaagtggaaaatattacatatactattctgatgagagcagaagtattggtgctattttcaacaatatctatgcattctgtgggttgatttctggcgagcagttctattcatctgagagtcttgatgatagccaaaagctctttgctgatgcattggtaaagaaagcatatgacaattggatgtatgtcattgaatatgatggcaaaggtctcttcaatcctaaaccaaagaaaaaagctgcatccactggtcaagttgagaccaatcttcctgctgttggtcctgcttcatatcagcagcacctctcttcgacgagcatgccagggccatcaccagcaggcagatctgattcggtagggtatgatggtgaccaatcagcaacgcatccagcacagctccagagttcatccagcaatgtccagtcaccattcgatgacacattttcgttcttaccacctaacatgctgacggggtctgcaaatgatgccatggggttggaactaggccagttgcagcaagtaatttcccaaagccagtcgattcaaccagcaaacgttggatacactgactggcccagaaaccgtgagagtcagtatggcgatgacttcacagaagacattcgcatcaagagccaccaaatgctcgagagtgaagacatgcagcagctgcttagggtcttcagcaaatgggtggtgcttctggcagtttgccagacgacacattcaacttccagtcctacatgccctctcccttacctaaccttggttttgaaggcgagcgcagccattcgtctggcaaagctgtcgtcgggtggctgaagatcaaggccgcaatgaggtgggggatcttcgtcaggaagaaagctgccgagagaagggcgcagctcgtcgagctggaggattaacgccgtggcttactttggtcgaagttatctttccgctgtaaattacacagtagctatgtggctctcataccgccctgattaccatcgaaacaagtttctgaagtgtacaacgaatagtcctgttatcttgtacagaattcgcctcatttgcttgtgtaacatagctctgctaagttcgacatatgactccacctatgcttgtgtatctttcttccccaagctcctctgtgcagaataccgtaacaatgccaattaattcaaagatttaggtgtgtatgtcg

SEQ ID NO: 33820 - DNA, 1563 bp, Setaria italica
  Peptide Sequence Number=SeqID_99794
caagcgcagcagcagcagctgagcctatcacatcacatcacatcacatcacatcagcatagcagcaggccactgacaagtgcagctgctgcaatggcctcctcgtggctggtcttggtcctgctccccttgctctgcctggggacgacgctgccgggctccgacgcggcccgcgccttcttcgtcttcggcgactccctcgtcgacaacggcaacaacaactacctgctcacggcggcgcgggcggactcgccgccgtacggcatcgacacgccggaccaccgcgccacggggcgcttcagcaacggcaagaacgtgccagacatcatcagtgagcacctcggcgccgagcccgtgctgccgtacctgagcccggagctggacggcgacaagatgctcgtcggcgccaacttcgcgtcggccggcgtcgggatcctcaacgacaccggaatccaattcgccaacatcatccacatctcgaagcagctgctctacttccagcagtaccagaagcgcctgagctccctgatcggcccggagcagactgcccgtctggtgagcggctcgctggtgctcatcaccctcggcggcaacgacttcgtcaacaactactacctggtgccctactcagcgcgctcccgcgagttctccctccccgactacatcaactacatcctctccgagtacaggcagatcctcacgaagctgtacgacctgggcgcgcggcgcgtgctggtgcagggcgtgggtccgatcggttgcgtcccggcggagctcgcgctgcacagcctggacgggagctgcgaccgtgagctgcagcgtgcggcggagatgtacaacccgcggctgatggcgctgctggcggacctcaacgccgggtacggcagcgacgtgttcgtcggcgtgaacacgcagcggatccacaacgacttcatcgacgaccccaaggcgtacggcttcgagacggccacccaggcgtgctgcggccagggacggttcaacgggatgggcctctgcaccatggtgtccagcctctgcgccgaccgcgacgccttcgtgttctgggacgccttccaccccaccgagcgcgccaaccgcctcatcgtgcagcagttcatgtccggatccgtcgactacatcgcgcccatgaacctcagcaccgtcctcgccatcgacctccaaaaggagcagctgcgcacatgattcattcatcgatcggccagtagcagtcgcgttcgttctcagcttgattatcattcgtgcttgcattgcaacttgcagttgccatgcctgcctttctttctttctctctttctctctctcgaggttttgagggtttcgtcagtacgtatttagagataagtgcttcccctgctagtgtcagttccaaattcgatcagttcgttgtccagaacatgtcattttcagcagcaggtttttctttctttctttctttcttttctgtccgtgttgttgtgcatgtgtacgggtggtgaccatatatatcccatcatataggcctttctagtcaatatataattcttcagaattcaagcaaaaaaaa

SEQ ID NO: 33821 - DNA, 700 bp, Setaria italica
  Peptide Sequence Number=SeqID_99795
ttttttttttttttttgttacacgaaacataacaggattattaatccagaaacgaagcaggattaaacaagtttcttacaacataagatgttgtaaacgacatacgacgacagataacagttcaaaccgacacaccgacacacaacaagataagataggagccactcgggcagatcataggataaccgcggcacacaggcctgacacagcagcaggaagcatcgtctagtactcgtcaccctcgtctccttcctcgccctcgtcgaactcagcgccgacctcctcgtaatccttctcgagcgcagccaggtcctcacgggcctcagagaactcgccctcctccatgccctcacccacgtaccagtgaacgaaggcacgcttggcgtacatgaggtcaaacttgtggtcgatgcgggagaacacctcgaccacgctggtggagttggagatcatgcacacggcacgctgcaccttggccaggtcaccgccaggcaccacgctggggggctggtagttgatgccgcacttgaacccagtggggcaccagtccacgaactggatggtgcgcttggtcttgatggtggcaacagcagcgttgacgtccttgggcaccacatcaccacggtacatgaggcagcaagccatgtacttgccatggcggggtcgcacttggccactagtgcgactgagttcggtagta

SEQ ID NO: 33822 - DNA, 419 bp, Setaria italica
  Peptide Sequence Number=SeqID_99796
tgtctaacatgcagaatatgctgctttactacatatatgtatttcttttgatctctgtctgaagacatctgtgctttatgtcatcattgtactcattattttatcttatatactgggttcgtgacattgttgtgcatgttacttgtcacgctgcaaacctacaaatgcattgcatttcctatttcatgcagagctttgtctttgttatgatgtttctttgtcatataacttttggatagccattgttgtactgcctgaatattgatttcccatgtctgtgttagttatgctcacttatgtcatctgtaggccattactgctgcaagcacgaggaaaaatgaagctatcttcagtgaaatccagagccagctgaagcacgaaaatgtgacagtggacgtgaaagcaacttcagaatcaaa

SEQ ID NO: 33823 - DNA, 510 bp, Setaria italica
  Peptide Sequence Number=SeqID_99797
cctccgaccccccaaaacttaccccttcccattctccttcccccacccctcgccgccggtgccgcctcctcctccgccagccatggccgccgcgggtcccgggctctacaccgagatcgggaagaaggcgagagatctcctgtacaaggactaccacacggaccagaagttcacgctcaccacctacgcctcgaacggagctgccattactgctgcaagcacgaggaaaaatgaagctatcttcagtgaaatccagagccagctgaagcacgaaaatgtgacagtggacgtgaaagcaacttcagaatcaaatgtgactactactttcacagttcatgagctgggcacaccaggcctgaaggcaattttatgcattcctttcccgtaccagaaatcagcaaaggctgaactccagttatttcaagcaatttaagtactgaactcacactcttgactgtatctcctcccttttgtctttttaggctgaactccagtacttgcaccatcatg

SEQ ID NO: 33824 - DNA, 376 bp, Setaria italica
  misc_feature (1)..(39): n is a, c, g, or t
  Peptide Sequence Number=SeqID_99798
nnnnnnnnnnnnnnnnnnnnnnnnnnnnnnnnnnnnnnngtactaatccatctttggttactttaaattaccattacacactcatttcatgtctaattaaacgaatgggccaatctattaatcctccttgcgtcgggatagcgaactcagcattggctgtggtttcatgtcagcccaaggccgcacgttccctcaacgtatgggctgcagcctgcatcggcccgagcgcgaacagacgcgccgagcgcagtagacttttaccttatacagataatccaacctttaaagtgccacccgacatggagatgcaacaagactgcgctagtccaaactccaaaggtctgacggaaccatcaaattggataacagttcctag

SEQ ID NO: 33825 - DNA, 568 bp, Setaria italica
  Peptide Sequence Number=SeqID_99799
gccatctgttggatgttcaaagactagtagcgtaggatgtggataatggaagaaatggcaactcaagtagaatcggactggattaagcggcgggctggttgagcggaaacgcatgccgggggtgcccgattcaatccagcagcagcggagagagggtcaagatcccaggcccaagagccaggtgcacgatttccagagagaagcccaaccaagaggttaagatttcaggcccaagagcccaagatcccgcctgaccccccagcgcaaagcgcctcccccctctgtctcgtcccagcgccgccggaaacagcaagctcccgcttcgccccagcccccagcccaagaactggagtgcggcgctcgcgctcttcccgtctcctgttctgcggccgccgccacaaaccctctctcaccgtcggcgacctcgccgccgtcgccttcatcctctcccccggcctctgccgctgccggactgtcttgttgtttgttgtagtgcgcgaggtcaacctaggcaagggcaaccccaaagtttcggattcttcaactgaagctccgcccccgtgtggag

SEQ ID NO: 33826 - DNA, 610 bp, Setaria italica
  Peptide Sequence Number=SeqID_99800
ttttttttttttgttcatgaggtaggggggcgtggagccccccaccccaccattttggaggatgcaaattgcaagataattcagacatctcaaatgacccatcagtacatcaacacaggcagccagcacttgtgtttcatgccttggtctggtcagatcactccatccggtctgatagtcggcctgtatgtgccatcactgcccctgggtcccagtctccaaaaactgccactacatacactacacagaatgtgccaccctttgtgctccttttcctacccctttggatcatgcagcaggttgacgatggcgacataggcagtgcacacaccccaaaactacgtctctctgaatgtggaccccacgcagtttctatgccccaaaagaaaaacttgcaatgtatgtacatcactcgtagtgctaccacaccacaggtggcgcactcatcagatcaggtgttcttctccagaaccgagagagccggggccaggtagttgttggccttgtctggcagatgagccacgagttcatacagctcattcccttgctccgagacatgctcgtagcacacatcgaagctcttgttcctcgccgtcgaatcgtgcagcgt

SEQ ID NO: 33827 - DNA, 566 bp, Setaria italica
  Peptide Sequence Number=SeqID_99801
tgaacccagaaaaacttgctaatgacaggctgtgaaaattgaaatgctaaattagaatcgtttaggtttgtctccttaggaaaacgactatgcaacaagtaaggtttcatgttgagctatccactccaatgttgtgagtcgtaacttgacattgtagcctcggagcatgagcttgcgcacgacaatgcgtccgatgcggctggtggcgccgacgacgaggacggtggtgtcctgcgcccccggcacggtgaactcgcacatgggcccgccgcggatgagcacggcctgctcctcctccgccagcgccgtggacgaggcgctggacatctggcccagccgcgagaatttgcgccacacctcgtcgaacacctgccgcgaccgccggcccaggcccacggggttcacgatcacgtcatcgaggccggccaccagcgcccgggcgttatcctcggcgccggcctccttcttcctcttcttcgcctcgtcgtctgccgccgacgccgatgccgccggcttgtcccgccccccgtccttctcttcgagcatggcggtggcggacttcttag

SEQ ID NO: 33828 - DNA, 437 bp, Setaria italica
  Peptide Sequence Number=SeqID_99802
tgacgcatcggtgcctccatcgaatctagaagggtagatatcctgaaagtatgatcccctgccgcacctcccatcctttcacagatttggcagatttgaatttagcaatcgtcagtttgctcttgctgcttttaccagcccttgactgggccagctgattgtagtaatcctggaaagccttggtaacattcctcactccttggttatcaaccctgttgaggtctccggtgatagtagaacgtgcggtagcgcagtagattaccttgttgcaacctgatacagcagcctgaactgaagaaggatcgccgacatcgccaaccacgatttccacagacctcggaatcatgtcgatcacttccggatcatttctcctgaccaatgccttgacgttgtacccgcggagcatgagcttgcggacgacgatgcggccgatgcgg

SEQ ID NO: 33829 - DNA, 2151 bp, Setaria italica
  Peptide Sequence Number=SeqID_99803
cctcttctattttcttttctggtgtcaaaatgcgcaagtttacgtttttaaatgaaaaggagtaggagaggacttataattacaacaaattcatgatattggtttcctgaagtcaatctgtgcggcgatctttacaaaatgtgccgaagtggcataccatgtgaattccacaaggcttgtatacaaaagaaaaatgtatggctttacaaaaggagaaaatatactcattatatgacctgtataaaacacatatatctgagtctcgtggcacatcaatcaggtgttcttctctagaacagataatgccggtgcaagatagttgttagccttgtctggcagatgagccacaagttcatagagttcattcccttggtcagcgacgtactcgtagcatacatcaaagctcttgttcctcgccgtggaatcatgcaatgctttgacacaaatatctgctacatcagcacagctaatgccctgagagatcctgctcccttggtcgaagatcaatgcacgctgaccaccaggttcttcctgcagcagacctgggcgcacaatcgtatatccgaggccagatctcctcaatgcatcctctccagccttcttcgctttgaggacttgttctcgcctgttggcttcaattcctgagccagtgcatgagaccagcacaatgtctgtttcttgaccactcggtaaagctttgatgtattccaatattagctcaaagtttcgggggtcactagcattttgagatccgtcaccaggcctctgccttttgggctcaaacctaatggttagtgtatgcacaagaaaagggtccaggggaggatcttgtgggtttaccggccgaaaagatgaaaatggcactcttaccctacaaaagcctgcttttgtagtcatccgagcaaagtacttcttgctctgtgacgtgtctgccagtggaccagtctcaagaataacaacatatgatcttccatttccacccaccgaaagaagcaatccatcatacctgtctagggtggaacctagaggaagagagagccttttagatatctcaacatatccacctcttgtgaaaacaaatcctgagaaaacagcctgtccaccttctgcaaactcaaatgacgcatcggtgcctccatcgaatctagaagggtagatatcctgaaagtatgatccctgccgcacctcccatcctttcacagatttggcagatttgaatttagcaatcgtcagtttgctcttgctgcttttaccagcccttgactgggccagctgattgtagtaatcctggaaagccttggtaacattcctcactccttggttatcaaccctgttgaggtctccggtaatagttgaacgtgcagttgcacaatagattatcttgctgcagcccgacacagctgctttgacagtgtcaggatcaccaacatcaccaacaacaacatccaccgaccttgggagcatatctatcacttcagggtcgtttcttcttactaaagccttgacattgtagcctcggagcatgagcttgcgcacgacgatgcggccgatgcggctggtggcgccaacgacgaggacggtggtgtcctgcgcgccgggcacggtgaactcgcacatgggcccgccgcggaagaggacggcggggtcctgctcggccaccgcggcggaggaggcgctggacatctggccgagccgcgagaacttgcgccacacctcgtcgaacacctgccgggaccgccggcccaaccccaccgggttcacgatcacgtcgtccagcgccaccatccccctgccgccgccgctgccattcgccgcctccgcgggctcgtcgggggcgagcaccgtcatggagccggacttagtcgccttcctggaccggcggttccgtgacctccggggcttcgccgccgccgtggtctccttgtccagcgtggcggacaccggcgccggattggcgctggcaacgaagcggcatgaattgccatggcgctgcctgccattgctgtgcgggaggccgaggaacgccgaggacgacgacgtgcagcggggcgccgccatggcagccatccacggcgtcctctcgggatcgggagatggagagcagggagcgtcgcctgtacggttttgtcccgggagattcttggctgcccg

SEQ ID NO: 33830 - DNA, 483 bp, Setaria italica
  Peptide Sequence Number=SeqID_99804
taaatgagcacatgcaaatttttaactaaatagtttctggtatccaggttcttacaaacaacagttttagcttttttctgcttcttgtgcgttaggaaaactaattgtatatcaaagatgatgcaagtagaatcagtaatcatgcatatcctcattagctttttctaacacgtggggtcaatggggcttatggtgatacttattaagtgataaatagctagggcagcccttcatttccagaaaacctcactttgaatataaacaggcccattgtaggtttctgacaaccatagtatttggcaaccttggttcctacaaactggatctcacaaacaactactccctccgtcccgcaaagagtgtccttttagactctaaatttatcccacaaagagtgttcttttatctcctagtaaatctcatctaattaaatcaacactcacaccaataaaaaagcgtatggagaagcgcgtagagccgcgt

SEQ ID NO: 33831 - DNA, 407 bp, Setaria italica
  Peptide Sequence Number=SeqID_99805
agttaccagcaaggagaacatttacttgtgaattaagcctggcatgggttgcaaatatgtaatgcaatgtcggcgatatgccatcttctaataactagtagcaggcatgccatcaaccacatacaaaccaatattcaacaccaaaccagcagtatcatctggcacccaacctacccgcctaccattcacaacctcagcagcaccagccatcttgccaaaacaccaccaaaaagcggccctttgcccgccaggccacaaccttgcactcattgacctccatgctcaccaaatgaaccgttggtgcaatgcaaaaccacatcatcaccctgacccaattacagatcgcacatatacatacatgagcaacatcacaacaagctgctcatcgcattccatttgcttattct

SEQ ID NO: 33832 - DNA, 271 bp, Setaria italica
  Peptide Sequence Number=SeqID_99806
cacggaagagtcggtcagagacacatccgccgcacccagaacagaacacaggcagaagcaggaagatgaaggtggaggtgctggagacgacgctggtgacgccgagcgaggccacccctcggcacgcgctgcggctctccaacctcgacctcgccgtgcccaagacccacacgccgctcgtctactactaccccaagccccctgccggacccgacgccggcgccgagggcggatcccccttcttcgagccggcacggctgcgggacgcgtt

SEQ ID NO: 33833 - DNA, 272 bp, Setaria italica
  Peptide Sequence Number=SeqID_99807
agcacgcgggggagtgatgtcgtgacatccaagcgggagcggcttcgtccgcgcctcgcggttgagccgggcgttctccctcacatcgccggtgaagaggcggtacctggtgcccttgaggccctgggcacgcagggcccggtcgagccgccgcggagtccaccacgcccactcgagagtccaggccgccagccacagcagcgccacggccgccgccgcgccagccacggcccacggcggggcctctcgtagcagcagcagagctcgagtcg

SEQ ID NO: 33834 - DNA, 227 bp, Setaria italica
  Peptide Sequence Number=SeqID_99808
atgtaaatatgttgtcattaaatttgctccatagacaaactgatagcttatgctttgatttgaatggctgtggtagacttgtagaggtagaattgataacttgtgagataatgtgacctgatgccaatgcatgttagcttttgtatagtgattatatgacatgatcttatttctgattgtcctgactctgatctttcatgattttcgatgtgtaggtgccctttgcg

SEQ ID NO: 33835 - DNA, 328 bp, Setaria italica
  Peptide Sequence Number=SeqID_99809
atgcaaaacgagtgtgtgggcttgggctcctagggaaatcctactaatattctattatggtggtcctattgagagctctctagtactgtagtgaacattagccttcttttttcttgaaaggaacgagcaggagagctgcctattacactggtgaagaagttagacccatactgagcagtacatatgaaaaaacaacaaaagggacaacaacaacattaggctgctcttaacgcggagtggagcattggacatattcatggacttaccaactcactaaagagagcaatgtgcatgtccttcagaaacctgtacttctgatgtgttgttg

SEQ ID NO: 33836 - DNA, 418 bp, Setaria italica
  Peptide Sequence Number=SeqID_99810
ttcattctgacaagaacttggtacactccgatcacatgattttgtctcagccagaatgccagatggttttgtctcagccagaaatgccagattagcactcctgttagcacttctacccattagcactcccgtttggagacatggctaatggatagaactaaagtccatgaatatcactttcacccctttatctcctcacttccccctttctctctcccctcttggtctttttcacaagccatcagcacccattaacgtatcctattgtatccaagagccaagacgtgaaagcatcaggtcctgctgcattccgttgcctgtgatggagttgcttaggtccttgaatggagtgtgatctccagagcattttgaaggcaccatctacaggagagaaagatagcagataaaataatcagca

SEQ ID NO: 33837 - DNA, 238 bp, Setaria italica
  Peptide Sequence Number=SeqID_99811
ttacaagggtcttctgtccgatggcaccgtcattgctgtcaagcagttatcatcaaggtctaaacaagggaatagggaatttgtgaatgagatagggatgatatctgcattacagcatccaaaccttgtcaaactgtatggctgttgtacagaagggaaccagctgttgctagtttatgagtatatggaaaacaattgccttgcacgagctcttttcgttgaacaacatagactgcga

SEQ ID NO: 33838 - DNA, 443 bp, Setaria italica
  Peptide Sequence Number=SeqID_99812
agtgtgcaacgtaatgctcctcttataaattccatgtttcttctaaactcattaacaggtttatattcaatttacttgatgatgaaactaatgatttcaaagaggtgcaaacagcatcaatagcgacataatcagcattttacagagtgttgtcctaataatcattaggttccaccgttccaaactaaactctaaaggtggcaacaaagttcttatgttggtctcaaagaccttcctgtctatcaaattgcaccgagtcaaccatcaaatgggcgacaacgaaaacacagtaatgtgaaatggcataacaaccatcaaatgggcgataaggaaaacacagtaatgtgaaatggcagatttgcatgtcagaagaaatggctaatggagatcattggagaatcaactggaaaaaggcttgtcaaccaaaaagagccatggagact

SEQ ID NO: 33839 - DNA, 385 bp, Setaria italica
  Peptide Sequence Number=SeqID_99813
tttgtcttgcctggagaagtggagagtaccagccacttagtttatggatgtattgtagaaaaaaaattagttttccagtagctgcagttacaaacaaaatgcatattaatgtagtttttatttttattacattcataaaacagtaacagatcactgcaagcggctagttaaaccattgtcgaacattttgatgccactgtatccctaatcgtgcttggacaaagaggaggtctgaaagatgccttagcaagcattatatgcttcaatgtttcaaattttcagggccttgatttcattgttgatggtggtcctagaattgctgatccttctactgtggtagatatgacgggaacaaaccctaccataattcgtcagggaaaggtcc

SEQ ID NO: 33840 - DNA, 1033 bp, Setaria italica
  Peptide Sequence Number=SeqID_99814
tatactaattctgagttatgcagcctctcagcatcctgtgccgctcattacgtgatatcgatacctacaccacaggatttcctcgaggtaccaaccaagggcaagctaacattttccgtgctgtcaagcgtgtaatacctgggccttacaccttcattttacctgcaaccaagcaatttcccaaacagttgattaagcatggttcttccacgaggtatgccaaaaggagacaggttggtgtccgaattccagatgatcccatctgccaggcaatattgcaaaatctggatgaacctttgatctgcacaaggtctgtagtataacccaagtcttctcttacttttgcttactgaaaatgccacatcctgctatgccgcccgcattcctccatgtggatttgatcaaaccgttaggacaaagtacctgatgctgtgcttgcacgtatgagcattctcatttctcaatacttcattatgtatgccacatggctctctgtctctctgtattgtggtgtagctccattaagaaaagaagaaagtattttacttgaaattatagaaaaaattcgagtactcttcaccattgattttgttagtatttgtaataaatcacatatttccttagcatttttgaggaattggttattataaataataagtatcatgttgtcagtttgtcgttgttgagttctataattattctttcgtttccttttatttacagtgtcaaatatctatcggaggatggatggatacttgatccagtaatcattgctgatctttatgagccactggtatcttcttaaatgttaacattgtacctgaaactctgtattcttactttttggtaccaccatcatagttctagttccacttctcttagagcatgttagcctgtatctttaccgttatctacaattcccttctatggagtacaagacatggtgttcgtttagggattattactagaaaaaagatgtggtgttcgtttagggattattactagaaaaagtttttgatctgacacctctttc

SEQ ID NO: 33841 - DNA, 1204 bp, Setaria italica
  misc_feature (1198)..(1198): n is a, c, g, or t
  Peptide Sequence Number=SeqID_99815
cgagagcttcagagctcgaaccccaacggcttccatggccgccgccgaccccgccaccgcggcctccttctcgcagctctccttccgccgcgccgtttgtccctccccgctccggctccccttatcgcgggcctctccgcccggtcgcctccgcgtctcctccaccgtggtggctctccacaagcgcaaccccaagcagctcaagtacgccgccgagcgccagttcacgagaggggatgccgggatgttgcgggtggaggtggagccttccggtgaggatttctggaagctggacccgattatcgaccttatcaatcgaggcgccgttggggtgatccctactgacaccgtctactccatcgtctgtgatctgagtaacaatgaatctattgagcgccttcgcagagtgaaaggcattggagactcaaagcctctcagcatcctgtgccgctcattacgtgatatcgatacctacaccacaggatttcctcgaggtaccaaccaagggcaagctaacattttccgtgctgtcaagcgtgtaatacctgggccttacaccttcattttacctgcaaccaagcaatttcccaaacagttgattaagcatggttcttccacgaggtatgccaaaaggagacaggttggtgtccgaattccagatgatcccatctgccaggcaatattgcaaaatctggatgaacctttgatctgcacaagtgtcaaatatctatcggaggatggatggatacttgatccagtaatcattgctgatctttatgagccactgggccttgatttcattgttgatggtggtcctagaattgctgatccttctactgtggtagatatgacgggaacaaaccctaccataattcgtcagggaaagggtccaaagctggattggatggtagcagaagatgaagaggcgcaatcaatgttcgcttttaaagcggcttgaaatttgcttcgcctgtcctattctatgggtttgcaatgccccaaccgaaacaccatctttggactgcatagatgttagtagttgtatatactgaacatgacagtatactgcatgtgtaaatatgaaggcaatgtaacgagttcgcagaatttgccagcagcgacacctttgctggagagttggagctgggtgctaattctctctctgataccgtgtgatcctagcgatgttttccaaaangacacg

SEQ ID NO: 33842 - DNA, 266 bp, Setaria italica
  Peptide Sequence Number=SeqID_99816
attccaattcctcagtacaaatatgtacctgaaatgtgcccttatggcaggctaaggtgccaagacagcagaaaacattgccccgtttcctccgtgttccttgccgtatgccctatgttcacatgccttgcaaaatgttaagtttgtgcaaaccatgttacacgatttcagttcttcgttgtgaaaattacttgtaagagtggtattttatcaatgtggaattgattattttagcaatcatgtaaatcgcttatttcattctagta

SEQ ID NO: 33843 - DNA, 462 bp, Setaria italica
  Peptide Sequence Number=SeqID_99817
tcttgtaaagtaactactgaaagaacaacttggatggggattgtgcttatcctgtccttttctttggggaaattctttttatttttgctgttgcttttcttcacaagtcagattgcatgacatctctgccttcctttttttaatggctaagataaatgtatgcctcgacgcgttttcagcccacaacatggcacaagagtattcgacatcattgaagatttctgcatcggcgaattgagggactgatgataaagaggagaggctgtcgatgattcatgtgtgaacgcatgctctcttccacagttcatgacaacgatgagagggagtgaaactgtttcctagtagtgatgaggactactcccagctttgtggttttgatttcatattgacttggtacttttaccatagcagtgtttgaacatggaccttcgatgatttctagacgttttgttagctttatca

SEQ ID NO: 33844 - DNA, 704 bp, Setaria italica
  Peptide Sequence Number=SeqID_99818
gggaccagcatatctgaaccaccgtcaacacctgcttccgtgtgtggccgcggggctaaagaacattacgacgatcagtgcatagcacgttgattgagtcctgaggtgcaggatggaaattctgatatatatctcacttgttgtgcttcttggtctgggagccctgtttgttattccaaggtctaactgcaaaggtaaaggagatgcagcgcatctagcaggcagtggaaagatatctagaagctataccaagaaagaggtatcaactcacaacacaaggaaggattgttggataataatcaaagataaggtttacaatgtcactgcatatgtggaagagcacccaggtggtgatgccatcctaaacaatgctggagatgattcaacagagggattttttggcccacaacatggcacaagagtattcgacatcattgaagatttctgcatcggcgaattgagggactgatgataaagaggagaggctgtcgatgattcatgtgtgaacgcatgctctcttccacagttcatgacaacgatgagagggagtgaaactgtttcctagtagtgatgaggactactcccagctttgtggttttgatttcatattgacttggtacttttaccatagcagtgtttgaacatggaccttcgatgatttctagacgttttgttagctttatcactttgtgagaatgtagtaa

SEQ ID NO: 33845 - DNA, 834 bp, Setaria italica
  misc_feature (789)..(789): n is a, c, g, or t
  misc_feature (813)..(813): n is a, c, g, or t
  Peptide Sequence Number=SeqID_99819
actgcaaggttcaggtaggaatacttattcagagttagctgggctgtagattcagtagcattttccttaaaattgatacagccatacagatttacatgtttctgtaattacttggtgattgttgtgtttgatctttgtgttacctttgcaatggtaattactgatggaagccaagtactgaagtcagcttctttcgtagaacattatttcgatcagtgcatagcacgttgattgagtcctgaggtgcaggatggaaattctgatatatatctcacttgttgtgcttcttggtctgggagccctgtttgttattccaaggtctaactgcaaaggtaaagtacgtatcacttgtaatcttagtttgaacccattgccacttagtatttgttatattgcaggtaaaggagatgcagcgcatctagcaggcagtggaaagatatctagaagctataccaagaaagaggtatcaactcacaacacaaggaaggattgttggataataatcaaagataaggtttacaatgtcactgcatatgtggaagagcacccaggtggtgatgccatcctaaacaatgctggagatgattcaacagagggattttttggcccacaacatggcacaagagtattcgacatcattgaagatttctgcatcggcgaattgagggactgatgataaagaggagaggctgtcgatgattcatgtgtgaacgcatgctctcttccacagttcatgacaacgatgagagggagtgaaacttgtttccttttttttttttaacctacaanttgattaactgggttatggaaacnggcgtacatggacactgccac

SEQ ID NO: 33846 - DNA, 770 bp, Setaria italica
  misc_feature (752)..(752): n is a, c, g, or t
  Peptide Sequence Number=SeqID_99820
aaatattatacctctacacgctttcagcccacaaagaagctgttacttaaatgtttacaggagcgcatccacgaattcataaactaaataacaaaatcctgacgatagatgctgcagaaccattgaaactgaaagaacaacttggatggggattgtgcttatcctgtccttttctttggggaaattctttttatttttgctgttgcttttcttcacaagtcagattgcatgacatctctgccttcctttttttaatggctaagataaatgtatgcctcgacgcgtaaacaatgctggagatgattcaacagattttcagcccacaacatggcacaagagtattcgacatcattgaagatttctgcatcggcgaattgagggactgatgataaagaggagaggctgtcgatgattcatgtgtgaacgcatgctctcttccacagttcatgacaacgatgagagggagtgaaactgtttcctagtagtgatgaggactactcccagctttgtggttttgatttcatattgacttggtacttttaccatagcagtgtttgaacatggaccttcgatgatttctagacgttttgttagctttatcactttgtgagaagatatgcttttgtagatctttggaactttctcagaccggacgacttattctgccaaccttcatattgatgtttagcatgacaatgaaaggcatttgctcaaaaaaaaaaaaaaaaaaacaaaaaaaaaaaacctaaagngaactgccaaggacacac

SEQ ID NO: 33847 - DNA, 205 bp, Setaria italica
  Peptide Sequence Number=SeqID_99821
tatgtgtgcatgtatgcaagtgcttgaaacataaatatgtttaagcacttgcatacatgcacacataaacgaaagactgatccacacatcaaagtattcaactgagagatgagcttcaggaaacacacccaatagattatagctcacaactggcttaagtttttaggggtagagctcgacgattgaccgaacacctaaactggta

SEQ ID NO: 33848 - DNA, 409 bp, Setaria italica
  Peptide Sequence Number=SeqID_99822
tttctactaacttagtcttaagataacatttgaactagattgttctacttgcaagggcacatcttctttccaaagcagccaaaggcctcctgcaaggcattcaactgggctttagtagacacaatcaaacgggagagatgttgcatcttagggctgcagaggctccctcctgttcctctgtagttccaggacaacagactcatggcgcccgtggcaccttgcaggctgcaggaccttcctctctaatactaggaggatcaccttgaagttgaagctggagacatggacgctttttgaggttctggagtcagcagcggtggaggcaacagagagctcccgccgccgcctcctgctcttagaagattgcggatccgaggcatccgggatccttcgatccgggcatcttcct

SEQ ID NO: 33849 - DNA, 273 bp, Setaria italica
  Peptide Sequence Number=SeqID_99823
ggcaaggtgtacaaaggaattctttcaaagtctaaatcagaggttgcggtgaagagggtgtcccacgactcaagccaggggataaaggagttcgtctccgaagttgtcagcatcggtcaccttcgacaccgtaaccttgtgcagttacttggttattgccgaaggaagggtgagctacttctggtctacgattacatgcccaatggtagccttgataagtatctatacggtgaggataacagacccatactagaatgggctcagaggtttcag

SEQ ID NO: 33850 - DNA, 496 bp, Setaria italica
  Peptide Sequence Number=SeqID_99824
aatatttgtacgatagctatcaacaaacttctgcagttcaaactgggctttccctagcatcatcagcactctaccactttcatcatcatcgtaattcaatgcagctttctcaagtaagcaagttcccatttcctccatggcttctgcaaactcatatacactatttgccgttgcagctgcagctgaaagcaagctatcataacagctcctcatttcatccatttcctgggcggcgtagacgagctcgtcgagcttggcgggcggcggggcgtggtccttccgctccctgtggtggtggccgaagccccggaacctgcgcaatggcgatttcatcccgctcctcctcgaagccggacccccaggccgtaatcgcgggctccgatcagcaggcagcaccaggtgggtgcggaagaggaaggcgaggatggctttcttcgtcgctgctgctctcgggctttggaattttggggaccaaaaatggagcgagaatagtcag

SEQ ID NO: 33851 - DNA, 191 bp, Setaria italica
  Peptide Sequence Number=SeqID_99825
tgagtcgctcgtgcatgatttcgattggaccgaccgacatccacgtacgacggtgcgtgggcagccatatgatgtgccggtgctctctgctctcccctcccctcttctgcatctctgttgtggagattggggttttgctttccatgatgagagattttgttacgctgatctgaatgatcttctggtcctgt

SEQ ID NO: 33852 - DNA, 171 bp, Setaria italica
  Peptide Sequence Number=SeqID_99826
cttctcggaggcctcgccgtccgcagggcttgctatggtgttcttcgctttgttatggaaagtggtgccaagggttgtgaggtgattgtgagtggaaagctcagggcccatgtagccatccttgaacttcatggacttggctctttgggccctgagctttccactcacaat

SEQ ID NO: 33853 - DNA, 342 bp, Setaria italica
  misc_feature (336)..(336): n is a, c, g, or t
  Peptide Sequence Number=SeqID_99827
gtgatcaacacacctctcaccgagaaaacaagaggcatgtttaacaaagagaggtgtgttgatcacaataacatcacactttggaagcatagcatccaggtcctcttcaaacttggccccaatttctttctcaagctctgggtcgatctttagtctgtcatggtaaagcaggttgcagttgaagggcttaagacgctgaagcaagagcctgccgatacgaccggccccgacagttccaactagttttttcccttcaagatcataagctctgtgggcaatgcctgcgacgttccactcaccctgaaccacctgttgatacccaggcaagaagttccngagcag

SEQ ID NO: 33854 - DNA, 522 bp, Setaria italica
  Peptide Sequence Number=SeqID_99828
gtgaggtgattgtgagtgggaaagactcagggcccaaagagccaagtccatgaagttcaaggatggctacatgatctcctctggtcagccagtgaacgagtacattgactctgctgtcagacacgtccttctcagacagggtggttcttggtcatcaaggtgaagatcatgctcgactgggacccgaagggcaagcttggtccgatcacccctcctgccggacctggtgaccatccacgcccccaacggaggaggatgagctgcgccctccggtcctggtccctgaggtctaaagctcccaacagagtcccgtgaaatggcagtttgagcagtcctagctaggtttctatcttatgataagggcaatgcgaagacacttggttaccttaagctttgtggacagaggctatgtattggtcccgtgttacttttgtttaagctaagttttgccgagacaagctaccttgatatgtactggatgcgaaattatggttccttattctcgttgctctggtgtgcgtc

SEQ ID NO: 33855 - DNA, 579 bp, Setaria italica
  Peptide Sequence Number=SeqID_99829
tttttgtttttcttttagttttttttcagaaactgtttgttacgtggaagagattagcactcatgccccatcacaaaatcccttagccagttgggagttgacaagctcctgtgcaacttaaagttcgggctcagacgctcagtgtacaatggctactgcctactgtcctccattgattcgcattcttgattcttcgttctgctctctgcgtagtcctttcatgcactgtctcgggcgagcctatggaaacactgctcccccatgcgatcttcttcagaccaccaccatgcctcatcctcacttctcgggctcctcctgcaacatgttgcatcgagctatgatgctccggaaatcctcgaggtttatctttccatctccatcactatcaaagcaacggatcatcttagatatctcagaatctgtccagatgaaatcgtttattgtagccattctttcaagatcccatggtgtgatatatcctttaccaacttcatcaaatgagaagaagaatgcaaccacatcatcttctgtcagttgaatcctgctcttacccagttattttaatcttcctgttcttag

SEQ ID NO: 33856 - DNA, 156 bp, Setaria italica
  Peptide Sequence Number=SeqID_99830
gcgagccatgccgccatggtcctcacctcggctcctcgtagacgggacaactggggcagagcacgcatgtctgtctcgtcagccttcaggcgtgcaaggaaagttggccgttggttggtcgggttggctctgcaccttgcattgcactactcattg

SEQ ID NO: 33857 - DNA, 1291 bp, Setaria italica
  misc_feature (1193)..(1291): n is a, c, g, or t
  Peptide Sequence Number=SeqID_99831
gtgctcggggagggcggcgcgggcgacgcgccgcacggcattgcggtgcaccccgccggcgatgagctcgtctgcgccacggccaagggctgcaggttattcaaactgatttttgaagagttcaccgttcgcattattccaagagatgcccaacctctagaatctgttggaccacagaagtgtcttgctttcagcacagatggtgccaaatttgccattggtggagaggatggacatctcagaatattccattggccaaccatgaatgtgctcttggatgagcctaaagctcataagtccttccgagacatggatatcagcttagactcggagtttctagtttcaacatccattgatggatctgcaagaatatggaagatagatgagggcacaccactggttaatttgactcgatcctcggatgagaagatcgagtgttgtcgcttttctagagatggcatgaagccattcctgttttgcacagttgcaaaaggttccaaagttgttactgttgtctggaacataagtgattggaagagaattgggtacaaaagacttctgggaaagcctatctccacactttcagtaagcttggacggaaagtatctggcattaggaagccatgatggtgacttctgtgctgttgatgtaaagaaaatggaagtttctcactggagcaagaaggctcatcttggttccccagtcacatccattgagttctgtcctactgaaagggttgtaatctccacatccaatcaatggggagcagagctaacgaaactgaacgtgcctgctgactggaaagaatggcaggtctggctcgtgctcctggctctcttcctggcatctgccgttctgttctacatgttctatgagcgctcggactcattctggaagttccccatggggtggcaccagccggccaagccctggagcgtgctgaaggagtcccctccggtcccagaggaccagactccatggtgatgttttgcattacaccatccacgttcagggattctttccgaaagtttgtgtcgagtgttgtttatctttgactgttgtaccactacgcttttcctctgatgatctgaccacacaagtctgtaaccgcgtattgtgataaactgataattcagaaccaggcggtagtaatcgaacactttctgtatacggggacttgctactaaaaaatnnnnnnnnnnnnnnnnnnnnnnnnnnnnnnnnnnnnnnnnnnnnnnnnnnnnnnnnnnnnnnnnnnnnnnnnnnnnnnnnnnnnnnnnnnnnnnnnnnn

SEQ ID NO: 33858 - DNA, 337 bp, Setaria italica
  Peptide Sequence Number=SeqID_99832
aaatttaacccaaagttgggacttacaaactttaccaagcaaagaatttgaagtgcagttgacttcccaataccatttgtccctaccaagcccagaacttgcccaggtcttggaacaggcagcctgtgaagtttgaaggaatttggtccatagcgatgtgttgtctccttttcaagttcccttggcaagtttataatttgaatagcattaaatggacataccttcacacaaataccacatccaatgcacatatcctcagaaattaaggagactgttgaggatggcgtaacttgtatgcactgacgcccggttgcgttgacggggcagcgcctgcggc

SEQ ID NO: 33859 - DNA, 397 bp, Setaria italica
  Peptide Sequence Number=SeqID_99833
ccccgccaacgttggcttgaaaaaggctccacgcatcctcctcgttcaagcactccatcttgatcttgttgcggcagcccatgtccgcgcaaaccgcctcgctcctcgacgccacaatgaccttcctcaccttgccgttggccatgccgaggggctgcgggatgccgaccctctccaggtccaggcgctcgcacacgccgtccagcaggagcaggaagctcttgtccctcaggaagcccaggatccccgcggcctgcgcctgctccgtgggcgcgtcccgcagcccgagcacggacacgacctccctctggagcttggccaccgtgcagtcccgggaggccgcgacgagcaggacgtggtcgaagcgcgcgacgcggccgcagacctcgcgcaccag

SEQ ID NO: 33860 - DNA, 538 bp, Setaria italica
  Peptide Sequence Number=SeqID_99834
tcaccagaccaatcgtggcatcaagaatgcaaagcattggcagcacctcaaccaatgatctagatcaggcgatgcttggtatcaaagatgatagactaccagcaggcacggaagaggaaagttcactgtacatgaaaggtaagccctcacaaaggatcgttgtagaaccgccaaaagcatcaagtggatcgctggagaagacacttccaactccaaactttttaacacggatggccaaaaaagacaaggcaaaaaacagagaaggtgacctgatcacctctggaagaaagataactggtgttcacttcagcccatctgtgccagctgaatccatacatgcagctaagagggaggcaggtagtgatcaggctgtctcaaggcatcagccagaactcgagcgaactgctacaatcacaatcgaaaagggcattcaagctgcaggaactcaggaaaaggatcaccaagaaaagagctgctgataccaccggacaacagcaatgtgaaattaaattattgtccaattcaaacaacaatagtc

SEQ ID NO: 33861 - DNA, 384 bp, Setaria italica
  Peptide Sequence Number=SeqID_99835
cgagcacaaccgtcgtctccggcgccgtgccgccggaggtcggggagctccggaggctcgtgaagctcgacctcagcagcaacgagctgtcgggaccggtcccggcggccgtcgggcggtgcggcgagctcacgtacctggacctcagccggaacaacctgtccgggccgatcccggaggcgatcgccggcgtccgggtgctgaactacctgaacctgtcccggaacgcgctcgagggcgcgatcccggcggcggtcggcgcgatgagcagcctcacggcggcggacttctcgtacaacgacttgtccgggcggctccccgacacggggcagctggggtacctgaacgcgacggcgtttcgcgggctaacccgggggtcttgtt

SEQ ID NO: 33862 - DNA, 628 bp, Setaria italica
  Peptide Sequence Number=SeqID_99836
tccgttgtgtcacagcgctgcttttgctccatctctttctctctgcctctgcctgctctgatcgttgagtgctcgtcgtctggtctgatctcggggtctcggaggatcttggatcatggaggccgcgtactacttgttccgcagcgggaggccggaggcggccaccgcgtgcgaggagcaggaggaggacatcggctcgccgtcggagtcctccgagtcgtcgtcgccgtccacgtccggggagtcttccgagctcgacgacgacgcgagctcctcctcctccaccggctccgaccgcttcgagatgtccggcctcatgacggagctccccttcaagaggggcctgtccaggttcttcgacggcaagtcccagtccttcgcctcgctcgccgccgtggggtcgctggaggacctcgccaagccgccgcggaagcgcctcaagccgtcacggagctgcggcgggggactcgacgcgcaccgcggccgcatcctctcgccgcgaaggcattgcaccaaggccgtcgccaggaaggcggccgtgaggaccggcgcgctcgccgtgctcgcggctgccgcgccgagaaggccgccgctggtggcggcgcccaggcccgacggcgtggccggc

SEQ ID NO: 33863 - DNA, 257 bp, Setaria italica
  Peptide Sequence Number=SeqID_99837
taggggtaggatgagcaggcggtccttgccggcgcggcagtagccctgcagcggcaccaggttgcggtggcgcacgcgcgacagcgtctccacctcggcgcggaactcgcgctccacctgccaaaactcgccggagaggcgcttcaccgccgcctcgcgcccgtcggggagcgtcgcgcggtacaccatcccgaagccgccgcaacccacgatgcgggactcgtcgaagttgcgcgtcgccttcatcacgtcctcca

SEQ ID NO: 33864 - DNA, 305 bp, Setaria italica
  Peptide Sequence Number=SeqID_99838
atgtgcgaggacccgggcctcgcacatgcccagcgtctcctccatcttggctgcctgggcggagccctcggcgtcgttgggcatgtgcgaggacccgggcctcgagtgggaggccaagttctgcgccacctcactggaggccctggtcgagggtgcccagggggtgctcggcaccaggagcatcaccgagatgatctccagggtgccccgcgccgggtcgccgccctgcttggccaccttcttgatctcgttgatgagcttcttctcctgggtctgcaggccctagacctctccctctcaatcct

SEQ ID NO: 33865 - DNA, 560 bp, Setaria italica
  Peptide Sequence Number=SeqID_99839
gaggaggccctgcgcgtccgccagagcctgcccttccggttccccgcggcggtgaccgccccgctcggcttcctcccccgccacatcgccgacgccatccccttctcctcctccgccctcccgggtgtcctcgcccagttcaacgtcgccgagggctccgcccaggcagccaagatggaggagacgctgggcatgtgcgaggacccgggcctcgagtgggaggccaagttctgcgccacctcactggaggccctggtcgagggtgcccagggggtgctcggcaccaggagcatcaccgagatgatctccagggtgccccgcgccgggtcgccgctgcagccgtacaccatccgtgccgtgcaacccgtccggggctccagcttcgtggggtgccaccagaaggagtacccgtacaccgtgtacatgtgccacagcaccggcccggcccgagcgtacatggtggagatggagggcgccggtggtgacaaggcctgcttggccaccttcttgatctcgttgatgagcttcttctcctgggtctgcaggccctgcctctccct

SEQ ID NO: 33866 - DNA, 1200 bp, Setaria italica
  misc_feature (40)..(40): n is a, c, g, or t
  Peptide Sequence Number=SeqID_99840
cctaatccctgtgtgccttggcagtctcttttagtttttntttttttaacttaaaaagcgcacccaatgggattaggattagatcgcaaagcctagtgcatggcactagatacattctattctatgtacaatgggcaacgccaaacatactgtcaaataagatgtgaagaaggatttgccgcaatggctatacattcatggtacaaaactacaaacaaggggtgtgaatattttgccaaactccaatcatcacatcttcctcaggttgtcaagccgcgcctgcaagtcgtcgtcgattccgccatccggcccgcctgcagcttcagcttgagcagcaggaactttgcctgctgccaccggtttagcaaccgcagtcgcaggagccttcacaagctctgagttgacatcaatgccaatttcatcgaggacttggttgactagctcttctgtttcttcctcctcctcgtcaccctccaatgcatcatcgatggcgtcgttcatcacatcactgaccatctccatcctctcattttgcatctcgaactcctgcattatcttctgcagagcaggcaggttcatctgcctgttcatttgtcccatggcttttgtgacacccttcatagcttcacccattgcttgtgttgatttcaaagtctgaatgcgaagagatacaccttgtagctgggacttcagggcataaaactttgtgatctggtgccttgtgcggataaggtcctttgccataatttttacagctcccatctgtccctgcttggccaccttcttgatctcgttgatgagcttcttctcctgggtctgcaggccctgcctctccctctcaatctccctgatggacttgtccagcatccgcttattctcccgcagcagctcggctggggtcttcttcttgccgaatatgaagctcatggtggcgggtggacggggaggaagacgatctccgccgatccggcgactgcgattcggggccgctggctggctgaagaatccctcctacctcctggttcctctgcgcttgcgggattgggaggtcttctcgggttgttgtggggttgggccggctctctgcctcttgggggatgatggatggaaggggttcggttgattcgcggcgaaggctttgaagcttcttgggttggttgccttgtcgttggaacggagcaacgcggtttggccggcgac

SEQ ID NO: 33867 - DNA, 659 bp, Setaria italica
  Peptide Sequence Number=SeqID_99841
ttacgtaacttacaagttagtagaagttaagtgccgcggccgccaccggggagtggcttggcgagaccgagaggcagagggtcaggctcgttagagagtgggtgcagatggccagccagccgcgggactcccgcgcagcctcgcgcagggatgagcctcctcgccttcgaggccgccaggcgcgcttggatgtcatcacccggatggccagggagcgccagcgcgagctgcaggggatatcagggtaccatgccgtgtccgagttccctcgccgcagccgcaaccgcatccagggattgcttagagggaggttcttgaggaatggggcgcttctggttgaagaggagcgaccaccgtctgtggcagcgagggagctcgggcagttgaggcagagccatcgcacgccaaccttgagatcagagagtgttgtaagtagtcaagatgttagccagtctgatgcttctgtgcctgaaagtggtagattactaggtaacgatgaatctcaacgaggggctgaggccagggcttttactgatagtgaggattcagcccaaactgtgctggagaatgtggatttacaagaggcggatgcagatcgtgctgaggtacactcaccaagtataccattggatggcacggctgtgatgcaagagtctctt

SEQ ID NO: 33868 - DNA, 395 bp, Setaria italica
  Peptide Sequence Number=SeqID_99842
gtgttttattattgtatcaacaaatttggagttcagggtctcggaatttatgatgaaactggatcgtttatgcacttgtgctgctagtgctagaattgggcaattgggaaatccaatttgctgaagaaatgggattcagtgtgagtactctctgatactttgcggcgtatgtttttttaggctgtatcgtggtgctggcatgttttgtaggtgaatgtcagattagcctgttctggtttatgtctcgtagaaactgcaatcagcaacgattgggtacggttctaatgcttgctgttgtgcatagctttggtgtgctatacctcagtgattgagatcttctctgcaatatttactactactggctactagtcaatgtgctgtattatcaagttgtt

SEQ ID NO: 33869 - DNA, 777 bp, Setaria italica
  Peptide Sequence Number=SeqID_99843
tggatcggtgccggtaatgtgactgaattagtagacaacaacaggttccagaatttacaagtcaaccagtattaattgcatacagcccactgattagtccggccataagtttgccaagttcatctgtatgtttcgcattacaccaggtataaggagaatcccatccccatgaacacgactacacgggtccattcgatctcgcaaaagcatggagagccttagtatgcaggcatctgccactggattccgctgtctaaaatggacaccagtggttggactgacgacaaggttcaggattcaccaagtcttcatgtgcttgtccctgggagtaaccaagattcaacttttgctaatgcttcatgcacttgtcctgagcataaccaagattcaggttttcctaattcttcatgcgcttgtccctgggggtaaccgtggcggttgagtctgtcacatcctgcagatcaagcatcgactgtgatctcatatgagctgagaacaactggggtggacgaggtgcaggtggagaagcaaagacatccatggcattgctgggccttctgtgcgggcgacgggaagatggcttctgagagcggtaatgttcatcatcactgccactgttgcttcctgagctgcttgcggcagcaggcgatattgtcaacctcctacaatttgtggggctatcgacagcatcatcttcagggaacacctctttgttctgtggtttgccccacttgaaactgaatggaagaagacctttgcgcttcctaggggatggtg

SEQ ID NO: 33870 - DNA, 375 bp, Setaria italica
  Peptide Sequence Number=SeqID_99844
agttcttctagtttttttttttttttttttttttttgttctattgcaagatagtattaatttttgctggaactagtgtttacaggaaaacgctacatgagtctgcatatagatctcgtagatgaacgtgaaagaaaatttgttttgtaggatggcgaacagaacaatgtcctacagccctacaacctaactaattgctaatacggaaaaagatcagaggtagtacaatttacaaaataagatggaaaaatgctcgtaaacttcgtgccaatcctggtctcacctcttctgtgcaaaacaacgaccaggtccatttctttcatcacttgtaggcgtacttggtcaagaaatcagatatttgcgaggcgctcttctt

SEQ ID NO: 33871 - DNA, 408 bp, Setaria italica
  Peptide Sequence Number=SeqID_99845
gaggtatggcttgtggccacactcggacacccaggactaaagggtccactgcgctagggttgatgagcattttcctgaggtcacggtcaactgcttctaccagctcacttgcactcttggaaacaattcctgtgtttgtggcacctcctatgtagtttagaagtaacacccttccagcaggagcgcgatttggaaagagtgatgagctgtatatcgtccctaatgtctcaactccttgactacgtggatgcaactggccaaaaccctggagctccccatcaatcaagcattcctttctaatagcttcctttggatacgaaatagttacagcagcaactggtggataatagaatcttgaaagggcatctgcagcatcgcttgaaagtggacgcaagatgtcactagcaa

SEQ ID NO: 33872 - DNA, 1659 bp, Setaria italica
  Peptide Sequence Number=SeqID_99846
ttgtagggctgtaggacattgttctgttcgccatcctacaaaacaatgtcctacagccctacaacctaactaattgctaatacggaaaaagatcagaggtagtacaatttacaaaataagatggaaaaatgctcgtaaacttcgtgccaatcctggtctcacctcttctgtgcaaaacaacgaccaggtccatttctttcatcacttgtaggcgtacttggtcaagaaatcagatatttgcgaggcgctctcataggcaccctccacgcatcggcccagggcaactcctgctacatagttccctccaaggaacagcccatcatagccacctcggtccagggaagattttgcagcctccaaaagatcaagatgtcctaccaggaactgaggtatggcttgtggccacactcggacacccaggactaaagggtccactgcgctagggttgatgagcattttcctgaggtcacggtcaactgcttctaccagctcacttgcactcttggaaacaattcctgtgtttgtggcacctcctatgtagtttagaagtaacacccttccagcaggagcgcgatttggaaagagtgatgagctgtatatcgtccctaatgtcgcatatcgtccctaatgtctcaactccttgactacgtggatgcaactggccaaaaccctggagctccccatcaatcaagcattcctttctaatagcttcctttggatacgaaatagttacagcagcaactggtggataatagaatcttgaaagggcatctgcagcatcgcttgaaagtggacgcaagatgtcactagcaacatatgatggaatcgtcatgataacacttttagcctgcactgaaacaacgccttcaggtgtttcatacaccaatacatatcccatgccatctgattttgtaatgctagtgagtttccacgaaagcttgactttactacccaagctggatgtaatggcatttggaagcatggcgagacccttcctaaaagatgcaactgtctgcccctttggcgtaggaaggcggggatccctcggtggtttaggattcttgcccctctcctgaatcgtcttgatggttccaccaataatactacctccagcctcttctaggcgccacaccttcccaaatgcagctttcatactgagctttgaaggatcaccagcatagacacctgagcagaaaggctcaatgaggcgctcaaagacttcagctccgaggttgcggcgcacgaattcttccactgactcctcgcggcctggaggtggcggtcggatgccgagggccccaaagccagccctgagcttgccaggaatgctcatgagatcgaagaacgggaggtcggcgggcttggatggcacgggcctcagcttcccctcccacagcacgaaccgcggcgcattcgggtctccaaacacgaggtcatccttcagcccgctatccacggccatggtgaggacggggtcggagggctggaagctgttgggcccctcctcccagaggtacccttcatcggggcgctcgacggtggtgatgttgccgccgggtcgggcgcgggcctccgtgacgagcacgtcgccgacgccgtgcttcgtggccagcgcctgcgcggtgcagaggccgctgatgccgccgcccaccacgacgc

SEQ ID NO: 33873 - DNA, 949 bp, Setaria italica
  Peptide Sequence Number=SeqID_99847
caaataaagacagaactctgtatatttttgttgctcccaatgatgcttctagtttgtcaatcttctcctggaaatcatgatagccatctagtatcagagcagcatgctcgacttggtttgctgtggactcaagcaattcttccaaattctctactttctcccaccaggcatcatgttgcataggaccaagtttcagcatatcagattgggcagctataaatgcacactctagctccctaagtgaagcatctaaaatagcacgctctttctccagcttgaatagactctcttctgtctcagttatctcaataagctttgatttaagaaaatttatgtcatccttcagtagcatattctcttcctttagtacatcaaactcctgagcctctgtatcagactttccttcactagaaagctcagattgtgcaccagtttctgataattttatctctaaaatgctcatcttccgttgcaaagcttccttctctttaagaattttgtcagcacgttccaatgcctgaagacgagcttgattcagaagcaatatattcttctcagtattttgtatcattcctaccaaatcttccagttgaacgtttggtaggccattttcatcatcagaattctgttggtgctcatcatcactggaagctccagctctatctctctgaatgttaaccctgttacggtagttagcactaggtgtgctcttctgaggaggttgtgcgccagtcctgagattgcggtgtcgagtccggcgggaaacggctaggcggctgcgcccggcgatcgaggacggagcggggccgcggaacaggagagcggtcgcctcggcgccggccacgcttccgcctcactccactccgcagctttttttccaaccgccgcccacgcgaatcccgacgccgccgcctcgaggcccacctcccactctccccttctccccacc

SEQ ID NO: 33874 - DNA, 416 bp, Setaria italica
  Peptide Sequence Number=SeqID_99848
tggaacaagtggcgaaccaagtgcgtctctgatatactgatcctgtgacgcacttggttcgccacttgttccaaaggaaatggcaccaacagatgtggtagtacttggtgaggagtcgcatgatgtacatgacatgtcatttgtcatatgcattgcaaggtcctgccctgttctttcaccagatcttgctcatgcctcagtcaacaatgaccatgtggaggcgttgagagtatatctttcatcaaggtctctttccagattgaaaaaccagtttcaagctggaaaggcatgattacggtcgactgcattgaaggttacccaccaatcactctacagctaggaaagcacgtttcctcagtgcaggcgattctatctagctagtcgatcctgatttttttgttgcagcatcccaattt

SEQ ID NO: 33875 - DNA, 250 bp, Setaria italica
  Peptide Sequence Number=SeqID_99849
cgatggtgacgttttagtcattttagatctacgagcagatcaatcattgtttgaagctggagttgctcgagaggttgtgaacaggatccaaaagttacggaagactgctcagctcgaaccttctgatccggttgacgtgtattataaatcttcaggcaatgacaaaaatacactggaaagagaccttgatgaaagatatactctcaacgcctccacatggtcattgttgactgaggctaggacattctta

SEQ ID NO: 33876 - DNA, 617 bp, Setaria italica
  Peptide Sequence Number=SeqID_99850
actttagaaggactttgaggaaagtggggaggttacattctttggtcattgcttgaagctggacgatattaaggttgtccgacaattcaagcgtcctgaaaatgtgtcagagaaggagattgatgctgcaggcgatggtgacgttttagtcattttagatctacgagcagatcaatcattgtttgaagctggagttgctgataggttgtgaacaggatccaaaagttacggaagactgctcagctcgaaccttctgatccggttgacgtgtattataaatcttcaggcaatgacaaaaatcactggaacagattttgaagtcacaggatcagtatatcagagacgcacttggttcgccacttgttccaaaggaaatggcaccaacagatgtggtagtacttggtgaggagtcgcatgatgtacatgacatgtcatttgtcatatgcattgcaaggtcctgccctgttctttcaccagatcttgctcatgcctcagtcaacaatgaccatgtggaggcgttgagagtatatctttcatcaaggtctctttccagattgaaaaaccagtttcaagctggaaagagaccttgatgaaagatatactctcaacgcctccac

SEQ ID NO: 33877 - DNA, 2791 bp, Setaria italica
  Peptide Sequence Number=SeqID_99851
ttggttgcaaaatatactcctctatttgatttttcttggaacttcgagagactgcctttagagtgattgcggataactatgtcactgatgatagtggaactggtgttgtccattgtgctcctgcttttggtgaagatgatcatcgtgtttgccttgctgctggcatatttgagactgctggacttgttgttgctgttgatgatgatgggtgcttcattgaaaaaatatctgagtttaaagggcgatatgtcaaagaagctgacaaggatatcatcagtgctgttaaggataaaggaagacttgttagtaaagggagcattgagcactcttatccattttgttggcgctcgggtactcctcttatttatcgggctgttccaagctggtttgtcaaggtcgagaagattaaggaccagttgctggaatgtaacaaggagacctactgggtgcctgactatgttaaggaaaaaagatttcacaactggcttgaaggagctcgtgattgggctgtaagcagaagtagattctggggcactccacttccactgtggatgagtcaggatggtgaagaaattgttgttatggattccatcgagaaactagaaaaattatctggagtcaaggtcactgatcttcaccgacactatgttgatgatattacaattccctctaagagaggacctgagtttggggtgctcaaacgtgttgatgatgttttcgactgctggttcgagagtgggtcaatgccatatgcctacattcattatccatttgagaataaggaactatttgaaaagaattttcctggcaattttgttgcagagggtttagatcaaacacgcggatggttctatactctgatggtactctcaacagcactgtttgggaagcctgcatttaagaatcttatatgcaatggtcttgtcttggctgaggatggtaagaaaatgagcaagagtaaaaagaattacccttcacccacagatctcattgatgagtatggagcggatgctttgcgactatatttgataaactcgccagttgtacgggcagagtctctgcgattcaaacgtagtggtgtttatggtgtcgtgaaagatgtcttcctcccatggtataacgcttacagattctttgttcaaaatgcaaagagacttgaagttgagggtcttgctgtattttctccaattgaccaagcgtcacttcttaagtcatccaatgtgttagatcactggataaactctgcaactgaaagtctagtcagctttgttcgacaggagatggatgcatatcgtctttacacggttgtgccttatttggtaaaatacatcgacaaccttactaacatatatgtgcgattgaatcgcaaacggttgaagggacgtactggagaaggagactgcagaatttctctttcaacgctgtaccatgctcttgttacaacttgtgtggcgatggctccatttacaccgttctttactgaagttctttatcaaaatctgcggaaagtgtcagataaatccgaggagagcattcatttctgcaagttcccctccacaaccggagagagagatgagcgtgttgagcaaagcgtaagtaggatgatgaccataattgatcttgcacgcaatattcgtgagcggcataacaaagctctcaaaacaccactcaaggagatggtggttgtgcatccagacaatgaatttcttgaagacatcactgggaaactaaaagagtatgtcatggaagaaatcaatgttaagactgtcactccatgtaatgatccattgatgtatgcttctctgcgggctgaacctaatttcagtgtgctaggcaaaagacttggaaaagacatgggcaaggtatcaaatgaggtgaagaagatgacacaggaacagatcttagcctttgaggaaagtggggaggttacattctttggtcattgcttgaagctggacgatattaaggttgtccgacaattcaagcgtcctgaaaatgtgtcagagaaggagattgatgctgcaggcgatggtgacgttttagtcattttagatctacgagcagatcaatcattgtttgaagctggagttgctcgagaggttgtgaacaggatccaaaagttacggaagactgctcagctcgaaccttctgatccggttgacgtgtattataaatcttcaggcaatgacaaaaatacactggaacagattttgaagtcacaggatcagtatatcagagacgcacttggttcgccacttgttccaaaggaaatggcaccaacagatgtggtagtacttggtgaggagtcgcatgatgtacatgacatgtcatttgtcatatgcattgcaaggtcctgccctgttctttcaccagatcttgctcatgcctcagtcaacaatgaccatgtggaggcgttgagagtatatctttcatcaaggtctctttccagattgaaaaaccagtttcaagctggaaagggcatgattacggtcgactgcattgaaggttacccaccaatcactctacagctaggaaagcacgttttcctcagtgcaggcgatttctatctagctagtcgatcctgatttttttgtttgcagcatcccaattttgagtgattggcccttttgttttacagcaattattttaaacagctcagttccatttatgcacctcaccgaagtcatgttttcacattcatcgcttgttaaagatgaatgggagatgtatgtatgtatgctatagcaaaatttgcattggctccccgggttatagagagccaatgaactta

SEQ ID NO: 33878 - DNA, 327 bp, Setaria italica
  Peptide Sequence Number=SeqID_99852
cttcaccggaatcgcccggtcgaacccgcctcgggacaccagggaacccaccaccgccatgtcgcggcagaacacaccttggaaccgcgggctcattggtgtcgccgccgcggtcaccaagttcctgggcactggaattggaatcacagtcacaggcgccgcctttgcaaccacaacctctgccacgggcttctccaccacggtcgcttcatcttcttgcttggccgctgccgcggcagccaaggcagcagcggcgtccttggccctctgcctctccgcggcctcctcgtccagcacggcggacatgatgaacgaataccccttctg

SEQ ID NO: 33879 - DNA, 246 bp, Setaria italica
  Peptide Sequence Number=SeqID_99853
tacagacctattagcttggtgcacagcttcgcgaagatcgtggcgaagttgcttgccaatcggcttggcaaggaactacacaatctggtggacgtcaaccaaagtgcttttgtcaaggggcgctccatccatgacaattttaagtttgttgagctagcagcgaaatccttgcacaggaaaagaaagccgagcctcctcatcaagattgacatctctaaagcctttgacacggtgtgctggccattt

SEQ ID NO: 33880 - DNA, 374 bp, Setaria italica
  Peptide Sequence Number=SeqID_99854
cgaggaggaggccgagaagctgcgccgcacggaaaagcgcatccgcgcggtgctcaccgacgccgagcagcgccgcttcatcgacgacgacttcgtgaagctctggctccaggagctgagggccacggccttcgacgtcgacgccctgcttgaccgcctcaccaccatggccgccgtgtccaggatggctgccgcggagacgtcgcggaagcggaagaggctctggctcaacatcgacctcggcctgcggcagcgctgggagctggatgcctggatcgccaggatcaacgaacgcctcgacgagatcgaaaagggcaagaggaacctcaggttgcgtcccggggacgggaggcggacgactccgccgctgcagc

SEQ ID NO: 33881 - DNA, 367 bp, Setaria italica
  Peptide Sequence Number=SeqID_99855
aatctgcagaagctgtcatgactagcaaatcaagtacagaagagattccccagtactctagtctgaagtgtacctgcatcaagatcccttcttcagagttgggatcggtccttgcaaacatgatactttactgaccattatatggagagaagaaaataaaggtgcttaatgctgatgccaactcagccaccagtctccagagcgacactgacgtttcaggttcttttgggagattccctgggcgtctggattccgtcggcagcgagccttcaggtggcacgcgcacaaggagagctggtgccctctgccctgcactctccgagcagggcaacgccgagcggtctcgcttcctccccacgatcgcccg

SEQ ID NO: 33882 - DNA, 392 bp, Setaria italica
  Peptide Sequence Number=SeqID_99856
tttgagtacctaattacaggtcgtgttgcaactctcttgtacaaagtgaaccaaaaaagaggaaacctaacaaaaggaaaggaggtgacacagatccacgcttgtacatgggggaggtggctaaaggagcctaaaaggagctctttccccacgcctaaacccaccaaaagaacccgctcgcacgcataaacaaggctaaagatctctcgcgctcgcccgcgaaaccgacccctgcacgttcttgacgagagcctttagcaattcgcactcgcggcagcaggttcgccgtcttttcctcgcgtcctccgcgaaattcagcgcgaagcttcggccgccgtttttcaacctccggccctctagctaggagcaagtcgaatggtgagcatggtggc

SEQ ID NO: 33883 - DNA, 592 bp, Setaria italica
  Peptide Sequence Number=SeqID_99857
ggcaaccagctagccaaccactacaataggttgtctcttaattgtttcctagccattctacaatccgttaatttatgagtagagaatcgtacaatggtgtgtagagtatttcatattccaaaaaatttagtttacgagatggtggctttgggaaagcaccatgtattctctcactccatttccttcctatcttaaaaaaaaatactacacggcaatgagaagacatacgagactgctcacgtgtattaatatagtgtgtcgttaccatgtgtgtgttttagctactagtagcatcaataaatttaaaaacgtagtagaggtttgtattaaggttaacgccatctacttgagattttgtagctggcaaatatgaaactactttatcagtttaattaaaaaatgtttgatattttttagaactattaaccattaacttaaatcagattaaaaactttcaaaccatttttatagtgaagctagatctgaatgcttgcaatttgaaacaaagtgacgtccacatagcagtgattgtgtatacatattattagtgtttatttatttgtttatgatgatgttgatgatgatgatgttg

SEQ ID NO: 33884 - DNA, 460 bp, Setaria italica
  misc_feature (1)..(24): n is a, c, g, or t
  Peptide Sequence Number=SeqID_99858
nnnnnnnnnnnnnnnnnnnnnnnncaattattcagtgtgttagttcgacctaatgcacgtacaaaggtgtttctgaatcttgccgttatttcgaagagattcgaaaaaaaggaaaggaagaggggaagaggaggaaaaggaaacaatgtgtggaagggaaacaatgtgtcccaatgatggttatgtctacttccgaaatagcgaactgttgtctggacaagttgggaaggccactttaggtaatgggaataaggatggcatttactctgttcttctaagagattataattctcatgctgcagcaagttgcatgaatcgcttggcaaaatttagtgcaagatttattgggaatcatggtttttccattggtgtggatgatgtccaaccaggagaacatctaaatcggcaaaagaaaagaaatagatgaggggtacaaacaatgccacgatcttatttcttt

SEQ ID NO: 33885 - DNA, 1184 bp, Setaria italica
  Peptide Sequence Number=SeqID_99859
tagaagaacagagtaaatgccatccttattcccattacctaaagtggcatttactctgttcttctaagagattataattctcatgctgcagcaagttgcatgaatcgcttggcaaaatttagtgcaagatttattgggaatcatggtttttccattggtgtggatgatgtccaaccaggagaacatctaaatcggcaaaaagaaaaagaaaatagatgaggggtacaaacaatgccacgatcttatttctttgtttgccaaaggtgcactcgcgttgcatcctggttgcaacgcagctcaaacgttggagcataagataactggtgtgttaaatgaaatcagaacggctgctggaaacgtgtgcatggatacacttcactggaggaacagcccattgattatgtctcagtgtggatctaaaggttctccaatcaatatcagtcagatggttgcttgtgttggccagcaatctgtcggagggcgtcgtgccccagatggttttatagatagaactcttccccactttcctataaattcaaagacccctgcggctaaaggttttgttgctaattcgttctatactggtttgactgctactgagtttttcttccacacaatgggtggtcgagaaggtcttgttgacacagcggtgaaaacagcagaaactggatatatgtcccgcagattgatgaagggtttagaagatctctctgttttctatgatcagacagtccgtaatgctagcggtggtatagttcagtttttgtatggagatgatggcatggatcctgcaaagatggaaggaaaagatggcacaccgtgaaatttggatcagttgtttatgaaagtcacggccacatgtcctcatagggggctggatacattatctcctgatgatatcaagcagatgttagaggataagctcacacagcataaaacctcatccgatggtggttgtagtgaagagttcaaggaatgcttgaaaaaatttcttgaggaacgtatacaattactaaagtgcacaagaaaggcacttcatctagatgagaaacatgtaggaaagaatgattcttgcatagaagaaatcattgctgctaatatttctggtatatctgcaaaacaactacaggttttcttggataccttgtttttctcgttataactcaaaggcaattgaagccgga

SEQ ID NO: 33886 - DNA, 542 bp, Setaria italica
  Peptide Sequence Number=SeqID_99860
atgaggatgcttggagcagatacatagagaaaacaaagctgctgcttgctatcagcataaagttatcaagaactgggatgcaataagcctaatattttccagagaccatgctgccacaagtgaggatgttagcgcaggtgctgagaatggccaagaggtggcaatgaaggttgccgaagatgttcgtcaccatactccaagtccaagttcaccttcaacatctggacctagctgtcaataccgtcctggactgcccatgttgacccaatcaaacaaacaaggcaggatgaagaggttcagaacaaaggatgcactcttttgcatgtctggtaacataaaaattctttccaaatatctatgaagtcaaatgagactcaagaggagccaaagtctgcatgtcctaaggaaatttttgcagcacttcaagcgatacccaatttagcacgtgatgatttgctaagggcctattgtatcctcacaagcagtgatcgcaagtttgaatgtcttatggcacttccaattggtactatttgttaggttaa

SEQ ID NO: 33887 - DNA, 430 bp, Setaria italica
  Peptide Sequence Number=SeqID_99861
atgtgtatcactcaactttgatgcgaataagctgatagaagagattgaaaagatatccctggtattgatggtgaaagcaaaggtactgcaggacagttgattcagcaaaggttgaaaaagaaaaggtttttgcttatactggatgatatatgggactgtagcaatgaggatgaatgggaacagctactggtgccattcaaaaaatcacaagtacagggcaatataattatagtcacaactcgtattccagcacaagcacaaataatggttcgaaaaattagatcattcagtatatttgcaaggtttagactataaagaattcaaggatttattcctagattttgtctttggtgatgatcaatctagaaaggaccacacattcttacttgcaactggggataagatagttaggagactaaagggctcccct

SEQ ID NO: 33888 - DNA, 462 bp, Setaria italica
  Peptide Sequence Number=SeqID_99862
ttgatcgatggggcttggtcgaaggaggtcatgatgttgatattgcggatctgaaagtgcaaatgtcatcggctgttgtgtttcttggactttcgcgggcaatgtgaaccatcctgttcctaatccacaggctggttagtcgctgtttgtttccaagattgtatgaatttgtatggagagttgtagaataataattgcctgcagatggtcaatagcaaacaaagcgccattatccagccagttcttatgtttgattttggttttgagttgtgaaaacgttgttaagttatgaaccacaagagacatcattcgtttggctttgagtggcccctagctttgtaatggtaatgctaggatagtaaaaacatttctgggatctagttttgcagtcagtagcagtgcttcctctgtatgcttctgcactgtccagctccagcagctgcacaaccatttcgttccgtc

SEQ ID NO: 33889 - DNA, 1255 bp, Setaria italica
  Peptide Sequence Number=SeqID_99863
gcgaggaggagggggaggatggaggtggatcagacggcgcgatctacgttaagaagccggcggccgccgcggcggtgacgacgcgggacgagacgtccgtggcgatgccgacgtcgttcatgacggggtccgtggtcgggaagcgcttctaccgcgacgccaccatgcgcctcgccgacgacggcaacgggtggaccgtgatgctggactaccgcaccctcaagtcgccgaccaagcggccgttgaagctgccctcgcgcgcacttgccatggccatcgcagccgagtgggagtaccaggagtcagatggaattcgaccttttacaatgcctctcatgaagcttgcttgcactgcattggagagagttcctttgacacgtaccaaagtaattgataatttgatgaagaaatttcatcaagatttggtgttttgccgctcacctgctgacagtgaactgaccattggagttcatcaaaagcagaaggagaaaattgatcccatactggaatgggtaaacactgaatttgggttcaagcctgttgtatacacaaccttttttgggggcaagcaagatgagggcctcactaaggctgtagaaagtgttctgaagaaaacaactgattgtgaattggcatcaattgatgctatggctgcagcagcccattctctggtgatccctcttgcaatatttagagaaaggctgggaattgaggaggctattgagttgatcaggctagaagaagaccaccaggttgatcgatggggcttggtcgaaggaggtcatgatgttgatattgcggatctgaaagtgcaaatgtcatcggctgttgtgtttcttggactttcgcgggcaatgtgaaccatcctgttcctaatccacaggctggttagtcgctgtttgtttccaagattgtatgaatttgtatggagagttgtagaataataattgcctgcagatggtcaatagcaaacaaagcgccattatccagccagttcttatgtttgattttggttttgaggtttgttagtagaacgacgttgtgtttaagaagagacatcattcgtttggctttgagtggcccctagctttgtaatggtaatgctaggatagtaaaaacatttctgggatctagttttgcagtcagtagcagtgcttcctctgtatgcttctgcactgtccagctccagcagctgcacaaccatttcgttccgtcatttttagcaatgcttcaaatttatggtactaatttgttg

SEQ ID NO: 33890 - DNA, 564 bp, Setaria italica
  Peptide Sequence Number=SeqID_99864
cgcgcccccaggcctccgcgggcggcgccgccgtcgcggccacggccgggttcccctcttgccccgtggtggagggcgagcatccgcagctgaacaccgtgctgggctccaacgacaacgagatgaattacggcgggatgtttcacgtcggcggcggcggcgccagtggcggtggtggcgagggctcctcggacggcacctcctcgtctctgcccttctcgtggcagtagttctcagcggctgttcttgcgtgcttccgatccccggtagagctcctcggtttagtgaatgatcgctgatcagcattggttcctgtgttttctttctgcattcattttcttgaatccattctactcgccagcattcgtgtggacaacaatctgagcataattcgagtgctcattttcccgaagttatctttgcaattgtggtgcctgccgactgctgagtgctgacctcagtgttgctttttgccttctcttgttccggtcttcctgagatcacatctgacacatgtcatcgtcgtgactgatgcattcagtttcaggtctttggttaaccata

SEQ ID NO: 33891 - DNA, 266 bp, Setaria italica
  Peptide Sequence Number=SeqID_99865
gggcaaggaggtaggctccggcgagctgcacgagatcgccggcatcgagaccctgcaggcggacgtgcaggtggtgttcgagatcccgaacctggaggacgccgagcagctcgaccccaagtggctgcaagacccccagaaattgtgcgcggagaagggcgccaccgtggagggcggcgtcgggccgttcgggctgatcgtgatggcgtcgggcgacatgaaacacgagaccaccggattccaaggcacattcaagcacgatgacg

SEQ ID NO: 33892 - DNA, 564 bp, Setaria italica
  Peptide Sequence Number=SeqID_99866
cagcagcattgttaaaagagttaacaacagcagttccagtactggcaacagtattgcttttgtcattgcttctagaagaactaactccattatttctagaggcactaccattattcaagttaactacttccttagtccatgtgtctgccttcgagcgggctcgattcatccaatccctttcagatctgcatgtgccaaaggacttgaaatcgtgacgatctgcagcagtcgacctactctccctgtcacgggaatcagagtccctctcccgatccttgtccctattctttccgaaattagcatatccccttgacttccccattgcatcccggtcaggcctccgagatacattcgagcctgaacttctccgtgatgaagactgccgggaactacggtcacagtcatgtccagatgaatggtttcttgctgaaccaccagtaccttggtaatctgagcgggaggaagctgtagcccagatgtttgcggcgcctgctgccctgtctttctgcagccattccggcttcaacgtgggtgtgtcctgctccatggcagcaggcaccactc

SEQ ID NO: 33893 - DNA, 404 bp, Setaria italica
  Peptide Sequence Number=SeqID_99867
cattatttaagtcgtgataaatatcggtgaaagtagttatgcaataaattgcaagagttttagtgttacacaaaaggaagcccatgcatacagcaattacacacctctcaaactgacaatgagctccataaagcttcagtgtttggagattaagcaaatcgtcataaagccataaaatatcgctgttctatttctgatcaatgtccatttgttctgcaggttccttcgctctatggctagccactgcgttgtcaaaagtccctctgacatgctggcacataaccatcagatcctgcaaagcatctttcaatacatcctttgctggatctcctgttgtctgaactctaatgttgaccttcttgtcagcaggatgagggatactatatccacaaaatgctaccctt

SEQ ID NO: 33894 - DNA, 918 bp, Setaria italica
  misc_feature (875)..(918): n is a, c, g, or t
  Peptide Sequence Number=SeqID_99868
agcaacacagcaatggaggcgagggttgcaggagtgcccgaagacgaggagtcccggcctcctcccccgcccgtccgccgccggccgccgtccatcctcgcgtggtccccgcttgccgcctccaccgcctgcctgggcgacggtggacggccccctcgggctgccgctggaggaggcggagggccatgcccggcgcttcttcctgtggggtttcgcgtgcctcccctttctctgggccatcaactgctgctacttctggccgctcctccgctcgccggcggcatcctcacccgccgccttcgggcccatccgcccctatgttgtgcgatcagcgattggctttaccatattttctgttgttctgatcacttgggccacgactttcattgttggaggcgaacgattgtttggaccagcgtggaatgatctcgtaatgtacaatgttgctgacaagcttggcctctctggatttatgggatagcctccgctggctccgaccatctcactggttgtactccattgcttttccctggaggagatagtttcgtcttcgtggggcttggtactatttgctgttatctaatatcaatggctggttagactgaaggttagtgtgggctgtgttgtagaaagggatgaatgatttgtgttggagaggtcatgttaccatagatctgaggtaaatatctatgaagaaaccggactcaaggataatgcttttgtattgctagacattctgatatgtgttttatgatacgacgttgcaccgtgctttgtgtccgttttgctggtgtccgttttgctggaatgaatcgggcatttgtattccctcatatgagaaatcagactcaatttgatggataaaaaaaaacacnnnnnnnnnnnnnnnnnnnnnnnnnnnnnnnnnnnnnnnnnnnn

SEQ ID NO: 33895 - DNA, 188 bp, Setaria italica
  Peptide Sequence Number=SeqID_99869
tgagcacccagatcaatgcttctgcaacttttgttgctgcatttctggtcttctctgctcacctctacttcccaaccactgctcatctcttctccccagccatgccattgctaggagccctctctgatctcatagaaccttcctttccattctgcccgcttacattcagttctgcctctactgatcat

SEQ ID NO: 33896 - DNA, 451 bp, Setaria italica
  Peptide Sequence Number=SeqID_99870
agaaatcagaatgtgaattgactcaagtagctgtattttgatgatttcagtagaggattcatcccttgaaattcttagaagacgtgggccacccaactattccataaactcaaggttaatgtacgaaaggatcttataattcctcctgtagctacaaagtaaatgtagggaaattgacatatgaaaggaacctggttagtctggttaagctagacaatggaaggggaaaatcaagtatataaaggtagtattgaacagaaacactgtcagcatactaacacttcatttgcactgaatagactcccagatggacaaaagactactctacaaacactacccacatagttctcccttcctacttcagctgagaagtgtttggtcaaactattttatatgtcattgatgaaatcgaatgttccattttatatggggcgtgttaaggaaacacatt

SEQ ID NO: 33897 - DNA, 492 bp, Setaria italica
  Peptide Sequence Number=SeqID_99871
ttttcttcttttagtgaccataaacttattttttatggcaccgtatcttttatatagtatctttgaaaatattttcattacatgcacctggcatttttaccaccatatatatagcatgtgtgtttttcacctctgctttgtgtgttcaactaatttgatttagaaagtgactttgatttgacctaactaaggtagaaagtaactagtcactcatttggaacacataggaagtaattttgtaactgatccatatgacaaatgaagtaactgtacatgacttggaaaagcatccggaagtaactgatcacatgtccacatgagattgaaagtaaacttttgtttttctctcttctgaaaatagggctcctaagtatgactttgtttcttatccttttcagggatagagatctaaatatgaggcgcaaggagaagtattgtttttattttgggtggggaggcgatacattctgtacatagtgtgttataagattg

SEQ ID NO: 33898 - DNA, 1250 bp, Setaria italica
  misc_feature (1)..(60): n is a, c, g, or t
  Peptide Sequence Number=SeqID_99872
nnnnnnnnnnnnnnnnnnnnnnnnnnnnnnnnnnnnnnnnnnnnnnnnnnnnnnnnnnnnggtccacaaaaagatggtacatataataaaaaaaatcattcatcttcaacagaccacaaataactgttaataacctcgagagtttgtatgtcagctaaattctcaccttcaactagtgtttgcaagttacatggcgatataccaacatactcagtctacagctacagcatgaatattgaccaaccggatggtactttcccctgcccctacttgtgtttaaccagaaggtggtggaggcggtggcggcatggacatgggaggtgggggcatcccaccgccttgttgtggcgggggtggaggtggcatccacataggtggagcggacataccggcaggaggtggcggtggccttaccatgccaaccggagggggcatcatgtttggtggtggtggcctcatgggaagcctgtactggagctgctgtggcatggggggtggcgcagtgtgtggaggagcaggccaagcaggttgcccatgcatctgcattggaggagggaattgtccaacaggtggcggtggccgaatgtgttgaatctgtcccggtactgtgccattgacataagatcgcggcacagggggggcaccatttggaagcccttgggtcggcggaccacttgcaaacatcgtgtgtggcctattcctctgagagcctgggttattggctgccagcagtcgctctgctggtgtaccgtgccgttctccctttgtgtctttcttgtaagcataagagacagtgattggccggttgcataaatgttggttgttcatggcctctattgcttgatcggatgattcaaaggattcgtagctcacgaagccaaaacctcgagaatttccagtttcagggtctcgcattatcttaggattagtcacaatcactccaaatgcactgaaggtgtcgtaaaggagcttctcatcaacatctggatcgagattgccgataaaaagatttgcgccaacatccaagcttttcttatcctgggaggccttgtttactcttatgggctttccgtatagtttgatcatgttcaaaatcttaatggcataatctgcatcttcctcgcttctgaattctacaaatccatatccctggtgtagatttgtgactctgtcttttgggacatacacattaacaacagggcctgcttggacaaacaattcccatagtagctcctcagaaacctgctcta

SEQ ID NO: 33899 - DNA, 2151 bp, Setaria italica
  Peptide Sequence Number=SeqID_99873
tttgtttgtaacggatttgtaacacgcctgaattgtctgtaactgtttacgagatctgcttcacttttcatatccttaaataaaacaatcctcaaattgaaaacacaaggatatcatattacatgtgaaacctgttatcacaacaatattggctggattccattctacttctcgtttgattgcaaaaatatgaatgttatagcttataaacaaagttacatctctaaaacagatacagattcaaagaattctcgtattcagcggccttctcccactgcttcgaagcagttgttagcaaggagaaactctgtatcactatcgaacaattatttgcatgcagatgcagcccctggtcacgccatcacctgccgataaacccaagctgatgaaagatgaaggccaggatcagcatgacaatagcaaggatcaagcctcgccgccctaagagccagttctttgtcttcttggcaacttctacccctttctgtgctcgctccatccatctcatcattctatccaaatcctccggagatagtgaggacatggcttgttgagcttttgcagcatcctcctttgacagcttcattccaaactgctcgctcatgtttgccatcatctcagggctcatgttcttcatcatgtttgccatcatctgccgcgttgcagggtctttcatagaatttctcatggtttcctgcatatcagctgtagaaggtggaagactagaagataactggcccatcctttggtcatttgatagttcgacagggctctcccgaatagtttgagatgatgatccaaggggtgaattactagttgtggctctcgatgaaggttggaagttattctctgacctcctgggggtagcaccaggcccacccatctgagaagcaaaattcatcatattctgtagttcatcaggaggcatcttaccaatcatatcagatgccatcttaatcatatcaggagacatttctggcatattggatcccagatttggaccaacggagctagtgccattcattgaagaagcaacttcgaacattttctgaagttcttctggtttcattgtgccaatcatatcagtggcagtttttataagttctggtgacattccttccattcctatcttcgataagccttcaggattgctcttggacacataattttgggatggcctgatagaagcaggatcatctcttgacctttctgagcttcctgctacttcaggtggctgtgaaacagtatacccagaagaacttctttgactgcttgatggctttgaagtatcttcttctacaacttcttcaataacaacaccttttcgcatgttcactcctcccccttcccgtgcaagtttttcttcagtatctctgagaacatcagcaatagtttcatcctcaggggaaatttcatgggctttactcaagtcggcaacagcagcctccaattttccaagttctttatatgcttgacccctccgataatatgctttaacattgcttgaatcataagttagaacctctgaaccttcgcttatgcattcgtcaaattgtccggtcttcaagtaacaagccattaaattaagagtgcattgcaactgcagggtatgcgctgcggacgatggtatgttttttaaattatccttggcaagtttgtatttgctggcagcatccgaatactgtccctggttatgaagttcatttccctgcttctttaacatcttggcaccagatatcgcgtacgacatttgagcgtctgcttgagccttcatagcagcaaactcctcgggtgtagtgttggcgagtttctcagtcatatcacgcatgtcctctggtcttgcctgattcatctgctgtgcagctcgccttaagtcctcagctttcatgttcttcatactctcagatgccatctttaagaggtccgggttggacatcagctgctgctgcatcctggcgaggtcgtccggcgacatgcggcgcatctgctcctgcgccagccgcagcatctccggatccatcatcgcggcggcggcgggatcgagatcgggggcgggagctcgcggattcgggatgggatttggttgggagttcgctcgctggcttctctcctgccttctgcgccttctttttattgacttttttccttcct

SEQ ID NO: 33900 - DNA, 763 bp, Setaria italica
  Peptide Sequence Number=SeqID_99874
cccctgtctctctctaatcccccttccccgccgctctccccaccgtctccgcgcccccgccgacgccgcaggccgcgtcggattggtcgggtctggtgctcgggtgaggtccgcgcggggcggcgtcaggccgtcggccgatggcggagctggtgggcccgcgcgtctacagctgctgtaactgccggaaccacgtctgcctccacgacgacatcatctccaaggctttccaggggcggaatggccgcgcctttctgttctctcacgccatgaacgtagttgtgggggcaaaggaggataggcagcttatgacagggctacacacggttgctgatatctactgtaatgattgccgagaggtgctgggctggaagtatgagagagcgtacgaggagtcacagaaatacaaagaaggaaaattcatatttgaaaaggcaaagattgtcaaagagaactggtaatatcaaagatttggcgcaccaaatgtttgctgaagataatatggtcattatgtgtgtttttaaatgtttggatccttgtaaatagctgttctccatgggggtccaatcctaatgtaaagcacacttattcctgttcgtttgtgtggataagatacagcttctggttatttgttatggaatcatggcctctaatgtgcttaacttagtgggtcctcaaagtaaaaaaaacattctttgtcctggatggtaatgttgtggaattgttgttgggtcttatcaggttaatggaatattgatattcc

SEQ ID NO: 33901 - DNA, 469 bp, Setaria italica
  Peptide Sequence Number=SeqID_99875
cagcaaccgccggttcgcgttccggctcggcaagacgtacatggcgctgcacatggagttcaacggcggccggacgacgcccatctactggcagcacacggcgctcgaggcgcagccgcagaacgcgacggagccgccggtgtacggccgcctcgacggccgcgggttcttcgggctgtacctcgagggcggcggccagaaggtcgacgtgctctcgttcgacacgttcgtgcagaacctcaccggcgtgttccggcgcatgactctcgatgacgacggcaacctccgcgcgtactactggaccgacggcgccaagggctggatctccgactacagagccatcgccgagcgttgcgagctgcctgcgtcgtgcggcgcgtacggcctgtgcgtccccggcacggcccagtgccagtgcctcgacaacaccacgacaagcacctcccgcagtgccacgccggggaaaccg

SEQ ID NO: 33902 - DNA, 219 bp, Setaria italica
  Peptide Sequence Number=SeqID_99876
gcgggagcgcgccgatgaggttgaagttgccgatgacaggccacggtctcggaccagggggaaggttgtaaacacggcggctggacgttggtttgagcgtgcggaggatcacggcggcgagcaccatggcaaggaaggtggccagcagtggcggtagctccatcggcgctggacaaggaacgggagatggtatcagttaatcagtgactggactggggt

SEQ ID NO: 33903 - DNA, 483 bp, Setaria italica
  Peptide Sequence Number=SeqID_99877
agagcatcgttctccttgattggaaaaggaaagcttttgcacctagtaaacattctgccaactactcaaaacacaacagacaaattacaacaaaatataaagaatctagaactaaagattttcagaaaaacaagttgtatctaataacactcagcttacccatgggtcactgtgaacagagataacatgcatatagccctctcaaataacaagtacaccaaaactactttaaataaaaattagacactgttgattgctccagtgtgctatttgttttcctaaccatgagagaatatcatggtgatctaatgttcattaaaaggacatgtaaagcttgcatgaaatgacaaccttcatctagactcaaatgtttcagggataactaatcagcctaatggaagaaatttgatcgtcttcaaaagcagcatagatgttattaacaatgctaaccccaataataaggaagcacttacaacacaaaag

SEQ ID NO: 33904 - DNA, 416 bp, Setaria italica
  Peptide Sequence Number=SeqID_99878
ggacacgaaccagggtggtggggtgtggtgtacgcccacacctcttactgatctaggctcagttcctactgtataaccatactcctaaggccttcttttttatattttgaaagtatactatcaatcctttttaaagtttatcatgtgactatgcacttgttttgcagtcttttgaactagttctccttagcttcatcaactgatgcatcagaatttagaatttgaaccggtggttctttatgagctttacatgtctgtatgattgttcttgtgtatatcgttagccttcttccttcaagggcatatgcattaagatattcctacaaacagtgagtccacctcatttaattcagttgagtttctcatttcacctgaatggttcttttgatgtagatctccctcttgataaggaggcc

SEQ ID NO: 33905 - DNA, 746 bp, Setaria italica
  Peptide Sequence Number=SeqID_99879
gaagggatgtgataacatcctagcacagcttcacactgcgcatccagaattttgtgataaagtgggcggaattctcgccatgcatattgatgacttaagagctctagcacctctatggctttcaaaaactgaagaagtgaggcaagataagtcccattggtcaaccaatattactggcgatatatatggcatgggttggatcagtgagatgtatgggtattcatttggtgctgcagaagtaggtctacggcacaagataaatgatgacataatgatctacccaggttatactccaagacctggcattgaaccacttatcttgcattatggtttgccatttaaagttggaaactggtcattcagcaaattagaacaccatgaggatggaatagtttatgattgcaaccgcttattccctccacctccttttcctagagaggtcgagatgatggaacccgacccaaatgtaaaacggggcttatttttaagcatagagtgcattaacaccttgaatgaagggctcttgttgcatcatgcatctgttggctgcccgaaagcacagtggtcaaaatacctgagtttccttaaaagcagaaggttttcagagcttacaaagccaaagaattggaagggtcaaaaggttgacagcacaatgattatgcaacatgctgcattatccaaggcaaacagagaatataccaaaaaatcaacacccttttctaccactcgaatgttcatcatatttg

SEQ ID NO: 33906 - DNA, 346 bp, Setaria italica
  Peptide Sequence Number=SeqID_99880
cgagtacggcgatggccggttcggcggcgagccctgcttcgtgcccatggaccccgccgccgcccacccgcgcggcgaggacgacgggtacgtgctcaccttcgtgcacgacgagcgcgccggcacgtcggagctcctcgtcgtcaatgccgccgacatgcggctggaggccacggtccagctcccgtcccgcgtgcccttcggcttccacggcaccttcatcacggccaacgagctcgaggcccaggcctgatcgcccgagtagtcttcccgtactagtcacaccgagttgctagtacttaaacttaaactttaaagttaaaagttttaaggttaaaagttaaaa

SEQ ID NO: 33907 - DNA, 216 bp, Setaria italica
  Peptide Sequence Number=SeqID_99881
tcggtcacttctgtaaggtgatatcaagctagcaatgcagatcaggccagcatctgcgaatagctttgctacttctcctactctgcgtatgttttcagcacggtcctctgctttgaagctgagatcccggttcaacccgtgtctgaggttgtccccatcaagaacatatgccagatgccctctggagtgcagctccctgctcagcgcgcatgcgag

SEQ ID NO: 33908 - DNA, 311 bp, Setaria italica
  Peptide Sequence Number=SeqID_99882
caagggaaaaacgaacttggaatagaagttttggatgccagcaatatctgagagccacagaagaaacctaggaaatgaaggaagcttgcgaaaaggagtatttctggatttcttgtggaaaacagaaatagtgtttctaaaaaacgtggaacttgtacaaacaatttccaggaggtgaaattgtttagttccctgtggagtgagaaggggagggaaaaagaacagctagaatctccagtactgtgcattcttctggttctgtccagtctaaattcccaaacatgctcttcctagttaatgaaagaatttat

SEQ ID NO: 33909 - DNA, 355 bp, Setaria italica
  misc_feature (46)..(46): n is a, c, g, or t
  Peptide Sequence Number=SeqID_99883
actccagagcgacccctccatgagccgccgcaccttgtgccgctgngccctgagctcgtgcatcagcttctctccgggttcggccgctggcttcttgcccggcgccgcctgcgacgggatgatgggcccgctgtgctgcttccagttctccatccgccgctccgacgcctccagctccctgagcgcgtccatctcctcgtacagcctcgcggccgcggccacgtgccgctccatcttgcggagccgcttcccggcgcccctagagaacccgaccgcgacgtccagctgcgcgaggcggccgcgcttggcctcggcgtagagccggtcgaagtcccgcaggagcggtgcctccgcg

SEQ ID NO: 33910 - DNA, 437 bp, Setaria italica
  Peptide Sequence Number=SeqID_99884
ctccatgcccgagccgccgatcgtgctcgccaatggcttggtcgattccaatactgacaaggcggcatctttttggccgaagatgggaaccgagtgccggagcgcggcgccgggcatcgccgaccggtgcaacgggccggaagagtggccgggcgcgcgtcccactgttaaagatggcagccctgggacgaacgggccgaaggcaatggagatgcgcgcgagcacggcgaggaccgacttggccatgagcttcgccgccctgccggcgtcgacgctccagagcgacccctccatgagccgccgcaccttgtgcccgctgcgccctgagctcgtgcatcagcttctctccgggttcggccgctggcttcttgcccggcgtccgtccttgtcgtacgggtatttgttatttgggttcccgttctttgtttgttcttgtt

SEQ ID NO: 33911 - DNA, 274 bp, Setaria italica
  Peptide Sequence Number=SeqID_99885
acgaccaagttaactacttagtgattcttgtgtgccaatcaacaacacaatgaatgaatttgttgatttgactggcaatactacacctggccctggaaatgaacaaagtgcacaaaagggaaatcagagacatgcaggaaggtggaaaaatcattcccttgtaactcctactcagcagcataatgcatgtcgtgttagtatgtccagttattccacccagcaaggctgcccctccccaactatttttacgtatccagaaacagtattctactaa

SEQ ID NO: 33912 - DNA, 574 bp, Setaria italica
  misc_feature (552)..(574): n is a, c, g, or t
  Peptide Sequence Number=SeqID_99886
aaacaaaaggaatgaatttagacggttggtactacaatcagataccttctttccgcctgacaaaagaaaagggtggcaagctccgtggcttctatgagctggatccagcttctattcctgatccttacctctctgggggtacccactgaggcactgacttgcggaggccgaattcggctgctcagaaggaagactaaattccttcacgttaattgaagcggtgatcagttgtatgcgcttcgggatgtctgtgcaccgggcaagtgtggcatccttcgtcttgtaggcagagtaaaatttgtatctctaatgttgatgcctatgaaactgtgataattctatttggtagactggtagtgttatctgcagccgaggagcggctgccttctctatgatgtgctgcaaaacagctccgcgttatttattatgagcttcaggatcatgttgaccagagaaacatcatactgtaaatttagcagtatctaatttgtttatggtgctgttgacccgatgatgctgcagggacctagttgcgctgaaggttttgtaacnnnnnnnnnnnnnnnnnnnnnnn

SEQ ID NO: 33913 - DNA, 446 bp, Setaria italica
  Peptide Sequence Number=SeqID_99887
aagacggaactacttcgattttcccacagcattccatttttcagaacaaagggaaatgagaaggttggtgtcccatgtggatttcttgaactagatgctgtgtcacttcctagtgacctggatgcagcatttccaccagttactcttgattcttgtgtgcctatcgacagtacaatgaacagtgggtttgttgatttgactggcgatgctacacctgaccctggaaatgaacaaagtgctcaaaagggaaatcagagaaatggaggaaagcggaaaaatcattcccttgaaactcctgttcaggaaggctgtccctcccccactatgtacacgtatccagaaacagtattctacaactttgaagaaggccggtcatataataagtttgagcgaggccagatatgggctctttacagtgatttgataaacttccaagtactatggtt

SEQ ID NO: 33914 - DNA, 2654 bp, Setaria italica
  Peptide Sequence Number=SeqID_99888
cacgtgatgaatggagcacaatctaggtgaacaaatgaagaaggggttcgaaaaccaagtggtgagggtatggttaatcatacagagacaagtggaaaaggagttgatttttctgcaaggaatccatctaaagcatctgcagcaaatggaaatgatagggcagatgataggatggcatctgacgctatcggacaaggttttggtgatgggcaaaacctaggtagtggggtggacacatcaggagagccaggtgctgcagggacccctaatccacggagatcttctaggagaaaggcatgtgatgatggcaacaacatcctgaattctccaaagaaaaagagtcggacactcaaagattggttctcaaatgctgcttccagttctaataaagtgtttgatgataaagctactcatgctgatgggcaggctagtgaacctcctgtctccagcaaaacaaataaccaagagaaaggttgtactgtcaatgaaggcaatcaaatgaacaaagaagctcatgatacaaatgctgagaagccttgcaatgctgggagcttcacataccctgatccagaattttgtaactttgatgagttcagggatgtcaatctgtttgcagttgatcagatatgggtactttatgacgaccttgatgccatgccaagatattatgctagaataagacgtcttgatactaccaacttcagagttcagttcacttggctggagcatgatgcagcaaatgatgaggaagataaatggactgataataaactgcctgtggcttgtgggaacttcaaattaggagatacagaggtgtcagaagatcccctcatgttttctcacattgtttcatcatggtcgaaaggccgaaaaaggggttcttatgtaatacatccaattaagggtcaggtatgggctctttataagggctggagtatgcagtggacctcagatgcagataaccatagatcctatgagtacgaggttgtggaggtcctttcaaacttcacgatggaagctggtgccactgttatccctttggtcaaggttgaaggtttcgtgagtctgtttgcaaaagcaaaggacaagtcatcatttgctataccatcaagtgaactacttcgattttcccacaatattccatttttcagaacaaagggaaatgagaaggtcggtgtcccatgtggatttcttgaactagatgctgtgtcacttcctagtgacctggatgcagcatttccaccagttactcttgattcttgtgtgcctatcgacagtacaatgaacagtgggtttgttgatttgactggcgatgctacacctggccctggaaatgaacaaagtgctcaaaagggaaatcagagacatgcaggaaggtggaaaaatcattcccttgtaactcctactcagcagtatgtccagttattccacccagcaaggctgcccctcccccactatttacacgtatccagaaacagtattctacaactttgaagaaggccggtcatataataagtttgagcgaggccagatatgggctctttacagtgattttgataaacttcccaagtactatggttgggttaccaaagttgatctagatccattcagagtccatctgacttggctggaagctagcccacaatcagaacaggagaatttgtggttagagcatgagctacctgtgagctgtgggacatttaaaatccgcaactggaggatcaagtatgacacaaatgatgcattctctcatgtagtagaaacccaagttggttcaaaacggcactttgaaattcacccacaagtaggggagatttgggcgatctactacaattggtcacctggctgggttccttccagcaaggatgcttgtgaatatgccattgttgagattactgagcgctctgaagctagcaccaaagtcttatttctcactcaggtcaatggctacatgactgtattcaagccagacaacgagaggagtatccttgatgtgcctgcaaaagatgacttgaagttttctcaccagataccttctttccgtctgacaaaagaaaagggtggcaagctatgtggcttctatgagctggatcctgcatctattcctgatcctttcctctctaggggtacccactgacttgcagaagctcaattcggctgctctgaagaaacaaagactaattacttccctttaactgaagtgggcgatcagttctattgtaaatgtttctggacgttcatgcgccaggcaactgtgatttgggcgaaaccttgctatatgttccagttctaggcctcgtcgcatgcagtgggtcatcagttctattcccagctgagcgtaaaattattatctaatgttgatgcatttgaaactgtaatcggtctttggtagagttgcatgcaggcgagggcagctggcctctctattacgagctgcaaaacaaatccgcgtaattcattatgagctccaggatcatgttaagtctcaaatcctctaatgtaaatttagcactatcaattttatatccattgttgctgttgacctgacgatgctgtagggtagggactagttacaatgaggcattctggcctagttgggaagtttttcaaaatcattgtagtcagcatcttggtaatctagttgccattttgac

SEQ ID NO: 33915 - DNA, 474 bp, Setaria italica
  Peptide Sequence Number=SeqID_99889
ccgccaacaatttattcaggctacaacagcgccttacatgtcctcggccaggccggcggcgccgaggaggggcacgaacttgaacatgacgtcgacggcgttccgcgcggcgatggcgaggaacgtggcggcctcgttgctgagcgacgagccgccgccggcgaggtcggagagcgagcggatggtgaggaatggcacgccgagctggtgcgccaccagcgccacggcggcgctctccatctccacgggggtgcacccgaagcgggatcggatgaactgccggtagctggcgttgtcggtgtacacgttggcgctgcagcccctgggcacccgcgtcaccttgggcggccggggcaagcacgtcgtcgcgttcacgcacgccggcagctccaggccctcgagcttcccggcgaggtcgtagtagcgcttgctgacggggacccagaacgcgtgctgccgctgctccggcgtgcc

SEQ ID NO: 33916 - DNA, 436 bp, Setaria italica
  Peptide Sequence Number=SeqID_99890
atggcactgctgagatgacaccactaccccatcaagatgcagcaatgagatggatcacagtgatcagatgatccactgcaaccaaatggttattgagggccgtgagatggttcaaggtattgaagctactcatggtacttacactgttgaggcagcgcctacctcatcaagacatggctgcaaaatagtccctggtagcaggatggatcatggttgctcagttatccgctgtaaccaaatggccatccatgacaggcagatggctcaaggtattgagatgcctcatggtaatgacactgcggaggcagcaccagacgcaccaccaaccacagcaagacgtcggagaaagaactccatcatctgggagcatttcactactgaaactgattctgatggatgcacacgagcatgctgtaattattgcaagagaatcttt

SEQ ID NO: 33917 - DNA, 394 bp, Setaria italica
  Peptide Sequence Number=SeqID_99891
tctacaagctgagccgaaaaaaactaccacttccagtttcatagcttgctggtagagcttgccaattatctcaagctcctcaccagttaatgatacactcagtttgtccagcaactcttctatttggagtgcattatcctcaaaatcactggatgcataggtattaatccatttcttgtatgggtgattttcatcttgtttaaggaaaccgtgagttctttgcctagatatgcatacagcctcatgcatggagtcatggccccaacagtgtatgcagcaattttagtcttctcgaatggtgtgaccattttgtcagaaccttttgcaccatcaacttttccagctgcagttgcaagtaggaaatcagtgtacttggttgttgctgcactttgga

SEQ ID NO: 33918 - DNA, 325 bp, Setaria italica
  Peptide Sequence Number=SeqID_99892
tcctcatctacgactacctccccaacggcaacctccacgaccgcctccacggacacaagatgacgggcgagtcgccgctggactggacgacgagggtgaggctgctcctcggggcggcgcgcgggctggcgtgcatccaccgggagtaccgcacgtccggcgtgccccacggcaacatcaagtccaccaacgtcctgctcgacaagggcggcgccgcccgcgtcgccgacttcggcctcgcgctcctccttagcccggcgcacgccatcgcccgcctcggcggctacatggcccccgagcaggccgacaacaagcggctctccca

SEQ ID NO: 33919 - DNA, 241 bp, Setaria italica
  Peptide Sequence Number=SeqID_99893
gagccctaatcctgctgcacccgcctcgctcgctcctccgctgcgcgccagctcgctcgctcctccgcgcattgcacgggttcagctgctagcctatcagcatggctgaggaaaccgccaacgacactcaagtgccccaagataacgaggttgcccccaacgatgaggcagtccaaggtgatgagttggttcaaggtgacgatgagttggcccaaggtgacgatgagttggcccaaggtag

SEQ ID NO: 33920 - DNA, 386 bp, Setaria italica
  Peptide Sequence Number=SeqID_99894
cgctgcttatctacctaattatttgaggtagtcctgttccctttcatccttttgcctgctccaaagcaccttcattcttttgtcacttcccaactggtgcacttcatgtagtggatggatagagtatcaaacttgccgtccattatactcactgattggtcccatttgcattacatgatcaacggcatcagaaatagccttgtgcaagtatctcattttcttctcacattgtttggcaacatctatgccactattaaattttgaacaggattccgaatacagccttgtaatagtaggtggaagggatgtccgtgacccttcaagcatatgcatgttggaaccaaagatgttatccatgtagccatttagtccacctctgcattata

SEQ ID NO: 33921 - DNA, 309 bp, Setaria italica
  Peptide Sequence Number=SeqID_99895
ctgagccttaccaagtaacactgagccttccagtcaagacacaccagctgtctactctagtgccactgcgtagtgctccacttggtagttcactcctagtggaggcgatggcctcagcagcttccagtagcttcctccgtcggagaacccatgctctgctcttgctcctggtgctggcgctcctgagctcggcgcggggctccgtggccgcgggagtgtccgtggccagccccagcaggaggctgatggagctctacaacccgccgcccagcgacatgctgaggtaccacgacggcgccgtgctgagcg

SEQ ID NO: 33922 - DNA, 751 bp, Setaria italica
  Peptide Sequence Number=SeqID_99896
caaatctccaacaaaccccatgcacatgagcacatccgaaagcttcctgctcacgctcgcgcggagcagcccggcatcattaactccttaccatccccttgcacatcagttgcaaatgtccaagcactgagtagcgtagcagagcagtgtgcggcaacgagcgcagtgtagcggtggcacgcacacgtcgccacgcgaatcggcgtcgccatgggagcgccggaggcggacaagaagaaggtggaggagaagaagaaggtggaggtgaagacggccatgtacaaggtgtacgtccactgcggccagtgcgcgcgcgacatccagacgcagttcaccgagttccaaggggttgaggaggtgaagctggacgctaaggcagggaaggtgacagtgaagggcgtcggcttcgacgtcgagaagctcaggaagaaagtcgagaagggttgcaggaagaaggtcgagctgattgttcctcccaaaaaggacgacgtcgtcattgaggtcaagaaaaaggaggaggagttgaagatcatcacagtaaaggttcccttgcattgccccgattgtgcagtaagggtcaaagagattctgctggagcacaagagtatctatgcggccaagacggaccacaccaagaacacctgcaccgtcgagggcgtcatcgacgagaagaagctggtcgagtatatctaccagaggacgcggaagggggctgtcgtcgacaagatcgagaagaaggtgatcatcaagg

SEQ ID NO: 33923 - DNA, 855 bp, Setaria italica
  Peptide Sequence Number=SeqID_99897
gattgttctgcaaataactgaggataggacatgtcattgcaattctcggatttcagtacttatttggatttttgacagtatatattataatgattaatgaaggatgattgttctgcaaataaagtgtgcttaaacttgtcatgttgctgaagctttcaggaagagtgccagaaaacgagttatacgagaagtccaatgttgttaagttggtcagttggttgaagacaacattgatgtctgacagctgattatgaccaagatttaaataattaagcgtagccattttggaaatggagtaaggtaaagtcccaatgaagttgtttttctctagatttagtctctcaagatttggtgggagattataagggatatcacttcctccaagattattgttgctcgcatcaagctcagatagttcagtgaggagattcatgttgtatcccagggtcccatttagccccatgccaggtacttttattgttatcactcttgaaccagaacaagtaaccccgagccaagactggccacaagggtcaccgttctggggcacccagtttgtcagctgcgacggcgagttcaaggccgtgtagaacgtgctgagggcagtcacatcgtcggagttggtgtcgccggtgacgcccgtgaaaacggtggccaagagcagcgccgccactcccgcagcgcccaaagccatgcctgaagctgctctgcagtcactcagttttttgccttcaccgtggagacattcttcttggggtatccaaggaagaaggtgaagttaaaaaaataaagatatctaccttttgttcaccttctatgcggcgcctctactacctactactaggacttactaga

SEQ ID NO: 33924 - DNA, 421 bp, Setaria italica
  Peptide Sequence Number=SeqID_99898
acgcgatggcgaggcggacggcgggtgcgccggcaacttcctgctgccgctgctgctcctggcagcttcgttgcttgattggaacttgatttctctaattaatatgatcatcttttttgctattcgatttgttgctccaacaagagggtttcacacttggaggctctaccttctgttgtggtgtacgattatttactcagtgcttgctattttagcacaagttacatttcatataatctggtgcattgagggaatgggatggtctgtggctcattcttggtgggtgaaactggtgggtttagcaagggaccagccttcggaatcactatcagttatatattttctagccttacagctatctgctacattcattgctttggttgaagtccttggaagcaaggacttaacaaataaacgtaaa

SEQ ID NO: 33925 - DNA, 825 bp, Setaria italica
  Peptide Sequence Number=SeqID_99899
ctgttcaaaatactgaaaacttgaacactggctcatttataatctgaagaaaactttctctagttatgtacacatcaagaataaatccagcaactgatgccgacgttgcattttgaaagaaatgcaaaagcatcctatgaatcacagactctgcagctcttccggcattcaccaggcgatccctcggtgcctaccatgtacaccgggttcttcccgcattcgcccgccgcagcccattgcgcgcaatactcactcttgtcagtgcatcctccagcctcctccttaaggtccggggaattctcataggacttgacatggatccactttggtgcagaccatttctcgccttcgatgaccgggcagctcccatggaggctgagcaggtccggcactccattaacgtgaaggctgaagaagagcaccgcgtcacctttcaccggtttcactgccaaccctttctttgcacattcagagaaagtgtcatccttgggctgagactcccaccccttggcgttggggaagacggtctcgcctcccttttcgacggtagacaggtacatgagcacggtggcgtagcggtggcctccccgggcctggttgaccttgtcctggaagtagtcgaagtgcggctcgtacttctggccgtgctcgtaccggagtatctgaatgttctcagcgttctcttcaggaagaaacgtccatgccgcaatcctctcctcaatcctactcaccaccggatcctggcgcttgtcgaggaaggtgccggagctggtgcgcacctcgctcatgacgctcttgccggagcggttgtccgccaccatcggg

SEQ ID NO: 33926 - DNA, 398 bp, Setaria italica
  misc_feature (88)..(88): n is a, c, g, or t
  Peptide Sequence Number=SeqID_99900
aagtaagtaactgtgcattctaaatcaccagtatcttggtattgattgttaatggtaagtaaggctttggattgggtttcttactatnactgccttgtgtaaaccaagtgttctgattatcacagaacccgatatcaggaacagtgggcagagttttgtttttaactatactctggccaaggctattgtggaatatgcttcagctgtatacatgacagacctaacggctctatatacatggacatgttcaagatgcaatgacttgactcgaggctttgaggtgacatgtataattgttgatgtccaaaattgcttgcaggcattcgttggtaggtagttagaatacccaaatactacaaatagactaatacaattagttagacaaataagggaaacta

SEQ ID NO: 33927 - DNA, 636 bp, Setaria italica
  Peptide Sequence Number=SeqID_99901
actacttactaagggaatagacccaagtaagacttagttacaatactttttaatacaagacgcctactgctgttagaaaaccaccgaagaattactcagtcgcactagtgtggacgtatgcatgaattcttgctgtaggatcctcaagagtcaaccgaagaaaatagctaccagtcaaaagcaaacggagttcactagctcgacatgggtatgcagccacaacacggaccagggttttgaatttgtgtgtcacctgttcatgagttaaagactccatcaacgttgagtaacctgccgtctcatactctacatcagcaacattagaggcctcaggaaggcttgccattggctggcgatgaacttgattggcgatgcggcggtcatacatcttcaggcgatcaacaacactgccatcttcatgagataaaaggcgaatcctactagatggtgccaagatgcctttccaaatgccaaactcttgcttgcaagttatgttgcagaacctggcccagtaaatattcttttgcaagtgaaataattccttgagaaacctgtttgcaaaaatcctcagaacagttccgacacaaggcattgtgcataaacctcctgggtagaggcgttccttcaagatgtaga

SEQ ID NO: 33928 - DNA, 804 bp, Setaria italica
  Peptide Sequence Number=SeqID_99902
ttttttttttttggacaaggggcccttacatctcattagacaattagagtccaggactgcagaaacagctcacacgacgccactagacactagtgttctagataaggactgtacataagcttaaccattacatactgttagcggcggtactgcaacaacatgctaattctaggcaataacggtagcaagctagcaactaaagagtgctcagcacatacaaatacacacacgattcatttacaagcatattcaagctctccgactcagtgacgtatgttctctgtgccaaagacccgatatcttctgctgccccaggggtcgtttttgtccagccggtaagatttcaagcaacaccatatccaaggtgggttcctggtcaagggagcgccttcctcgtcctcttctgggatgcccagtagcttgttcatcttttttatcagcgcctctgctgttagaaaaccaccgaagaatttggccccatcatctttgtggacgtatgcatgaattcttgctgtaggatcctcaagagtcaaccgaagaaaatagctaccagtcaaaagcaaacggagttcactagctcgacatgggtatgcagccacaacacggaccagggttttgaatttgtgtgtcacctgttcatgagttaaagactccatcaacgttgagtaacctgccgtctcatactctacatctgacagaattgagaacaaaattgtcatgtggcaagccttatgtgggcaacaggtggcaacaaaacgtgcatacgcagcacctcatcaatataacacatgcaaacaagcactt

SEQ ID NO: 33929 - DNA, 876 bp, Setaria italica
  misc_feature (1)..(11): n is a, c, g, or t
  Peptide Sequence Number=SeqID_99903
nnnnnnnnnnntttttttttttctacaggggaaagattataacttccatagacttgtaaattaaaagatccgaaagatcttagttacttctcaagttgtccctaaactgtctgaaacagttggcgatacatgaaatctgagtcctgaacttgctatcccatcccacatctaaaagctgggacctttcatccttcctctctttattaacccatctactaagacgtacataactagcagtagcagcttacataagtggcatcccttcaacctgcaggagtggaattctagaacgcacctcgcaggcgtagcttggcggtagtggccccctgcttctggagcatgagcaggtcgttgcagttgaagccgcagccgcaggtggggcactcgaggaagttctcgatcccgaagtccgcggaggcgatgccgacggagaactcgaggttgtcgccgtggcgggtgacctcgatgatgttgagccagaagaagaggaccttgacggagacgccctggaggtcggtgaggtggtcgggcttgatcttgccggtgatcttggtctggtagcggagcgagtaggagccctggatggagaactcgcagacggaggagcccgcgccggacgcggaggcgtcgagcgtggccgtgaaggcgcccgtggcgttgttgagggtgtaggccaccacgcccttagggagaatccccggggggaagtcgaagccggcgagggcctcgtaggcggtgggcttagcggaggcggcggcgcccgccgcagccgcggcagcgacggcgaggaggaggaggcggcggtgcgggagcatggcggatttgggaggagagcggagtggggggctttggtttggtttggggattttttttctg

SEQ ID NO: 33930 - DNA, 397 bp, Setaria italica
  Peptide Sequence Number=SeqID_99904
ctttcggcaaagattagtgaggcaatttcgataaagcagaacatgttaattgagtatgcattgcgtcctgggatgtctaatagtgaaaactctgatgacatgataagggttttctccagtacagtcaatgatggagtcaatggggctgagagttgcgattctcgtctaaaatcagttgaaaaggaatcttttgagttgagaaatgaggcacatgcaagcatgactggttaccatgagcaaagtgcatttcggatggccgatggcttctcatttttaaatgatcctgacccagcaaaacagcataaagaatacttcttcatatgatggatttctagagcatattgatttacagatgaaatcattagaatatgaaaattgaacagttcatcaagttccc

SEQ ID NO: 33931 - DNA, 369 bp, Setaria italica
  Peptide Sequence Number=SeqID_99905
ttctaaggaaggagagatggcgaagatcagcagtctggaggcatgtgcagtattttgcatctttgaccaaagtcgacataactagccccataatatccattgtagttggaagtgaagaagcagcacttagggctggcaggcatttgctaagatctggatttcatgttacaccaatccgaccacccacagtgccacctaactcctgcaggttacgagttactcttagcgcttctcattcctcagatgatatcaaaaggctggttgatgcactcacaccctggcttcctgacaaatatgctgagcagacttacgctacgttgtcaaaactctaagaataatcatccagcatgatctcaagtactaccactt

SEQ ID NO: 33932 - DNA, 702 bp, Setaria italica
  Peptide Sequence Number=SeqID_99906
ctcaagagcagcagctctttcatttgccaattgctctagtaatttggagttctctgcctttaattggcttatgtgagcatcatacctccccatgattcttgcagtactctcattgaaaaatgcgagaatatctcccctcaggttatcatcatcctggacagtcatcctagcatggaatgagctgcctgccacaaccgaagtatcggtaatctgtacagctggtacttgtcgctggtactcagtatcaaagtacgctggaggcccaaaagtctgtgggtcctgcctgggggctaactgatcatggtcaaccatctcctctgggataggtggtggttgccacacaatcaaggctccagtctccgcagaaagatggcatgctgagtaaaagtctcgacacctaattcgcgacaaaacatctcttccaacaggagcaagattcaagatagaagactcataaactgtttcctgagctaccaaagcctcatcagcctcatcgatcacctcaacctctatcttctgtgcctctatttgtgaagcagcaggtgccagtggtgcagttcttccttctgcaacgatatccaccactgaagaaaggattgattcagcggaaacctttcctcctcttcttgatggtggcaaccttgcgtctcttagcaggaatatcactgacctgatgtgttgcaggctatgatcaggtctatc

SEQ ID NO: 33933 - DNA, 487 bp, Setaria italica
  Peptide Sequence Number=SeqID_99907
ggctgctccgccttgacttggtatccgccgccgctgcccgtgcccgccgcggcgccggagccggaactaccggcgccggcgccgcccttcaagtcgaggaggtcgtcgacggcgaacggcgagtccatgagcggcggcagctcggcgccaaagatgtcctcgaagtccatggtcggctccatgacggcggccgccggcgccatttggccagccttagccgccaagtctttgttgaacacgcggcagacggcccattcgtccttggcggcgcgggggaggttgggcggcagcttgccctcgaggcggtactcgtgcatcacccatggcgtcttcccgccgcgcggcgcgcgcccggtgtagaagacgagcgtcttcctcatcccgacgaggtcgcggccgcggtagatctccttgtccttcccggtcgccttccagtagccgctgggggtggcacgggttggtgcgcgcccccgtgggtacttgcggt

SEQ ID NO: 33934 - DNA, 1128 bp, Setaria italica
  Peptide Sequence Number=SeqID_99908
gaaatcgcgtcaagatctggttccacagcgaagattctgatgctaaattcgatagagagagcactttatactttagtgcctacattggaatattggataaaggagatcaaaagctctaatgaggtgacttaagactcgctacagactcctagattgcagcagcaaagcaaacacatcgtcaaactggaaactggacaccaccaacaaacttgaatatatacagcgcaggaggccgaagttactgcatcctaaattatgacctaaacttgagagaatggagtgaattttgcaaggaatggtaacattttcagtttgggttactcagatgctgatgagatctggaggcggcgatgatggagagcttgtttgctgctgttgctgatctctcgcttcgcccgttggtgcttcattggacccagctggggctggatgtagaggaccggatgcagatccatcacatgcatttggaacctcctccccttgcttagtagatggctttggaagctcactcaggatctgcacaacctccctcatcgttgggcgctgcacgctctgctcctccgtgcaaagtaatgcaacgtagaagacatgcatgatctcatgcagtggaacagttgagagccttgggtctaggatcttcatcacttgttctttgcttgagtctgtcatcatcttcgcccattggacgatgtcaacaccatcgccaaactcacctacaggcttccttccagtgaccagctcaagaagcacaacgccaaagctatagacatcactcttctcatcaaccttcagtgtgtatgcatattctggcgcaatgtagccgtatgaaccagcgatggcagacatgcattcagatgccccagaatcctgcaagaactttgctagcccgaagtcggccacatgagcttcaaagttggagtcaagaagaatattattcgacttgacatcacggtgaagtatcaatggtgaacaatcatggtgcaagtagcaaagacccttggctgcctcaatagcgatattgtatcgagtgtcccagtgcaagtgccctcccttcttgccatggagcatctccccaaggctaccattgggcatatactcataaaccagtaggttagtctcattgtttga

SEQ ID NO: 33935 - DNA, 811 bp, Setaria italica
  Peptide Sequence Number=SeqID_99909
tcaacttccgtgtgctttgttggtgactctgtctgtgcactcgcatcagccgtttggtacttctttttgtcctcagatagcacaaccaatggggaagatgagacagaaaatgtaggtggattttcatttacattctctgtgaagcttctggtcctgtcaatactttgagaagaacttagtggcttagaatttacttcaggggttgacatcaaagatggatgcttcttatcattttgtggtgttcgggtgaggttattgtccctgacattacattgagctgagctaagggtcttacaacttccatcaccaggcttcagcactcttttgttgaccaaaattacacgcggctggttttcaccaggtggaggatctaccaattcgacaatatctggcattgattgaagaaggtaagagaatttcttgtggccaaagaaatctgtacctgtaagaatgctgttcctcagaagaagatctcggagatgtgagaggctcgtcccttgaggatatgggtgtagtgcctccagaattgcattggttacatatttggggattgagccatgcttggtatcagatcgtactgaacaatgctcggaatcagatggtaccttgatgggttcctttgattccttctccaggaagggatcatccagggctcctttgtagtgaccataccaagatccatgtaaaccatccggtgggtgatttaaaaaccgttttggtaagaaatcctcccctttaactaggcatcccaaggccacataactgttcgctgcactgcacagtacactactggtagcgcaactaggacaag

SEQ ID NO: 33936 - DNA, 286 bp, Setaria italica
  Peptide Sequence Number=SeqID_99910
aaaaataaggaaaaaaagaagaaaagaagaacgtaacatcacggacccaccggcagaaatagcacggtcagtcggtcacgacggaagcccgtgtggccgtgtccgcaagcatcggtaatcagtttactccagtgtccaacccggcaaccccacacaaggtcggatcggcgactcggcgtgccagaacgtgccacccttttttatctggactggatctttggcgatccctctccgtctgctcctctcgcccggcaagcccaacaactggccgtccacgctcgcaacg

SEQ ID NO: 33937 - DNA, 416 bp, Setaria italica
  misc_feature (375)..(416): n is a, c, g, or t
  Peptide Sequence Number=SeqID_99911
tctatttgtaatctccttcttcgaagcaaatcacgatgccgagttccagcaagtggtcactcgtctccaagtcgttccaaaagaagagagttgtgtgcgaggaggagcaattgcaagggttggagctggacattgttgatcttgagagtggagttggggctttgttcaggacattgatccagagcagagtttctcttctcaatactcttagcttgtagacagatcatacaacaattctgaccccttgcgattagcatccgccttttagaggatctgctgatctagaagcaaatttttgatgtacatatatatgaaaggaagtgtacagaaaattagataatgaagaagcaaagtttttgataacccaaaaaaaannnnnnnnnnnnnnnnnnnnnnnnnnnnnnnnnnnnnnnnnn

SEQ ID NO: 33938 - DNA, 273 bp, Setaria italica
  Peptide Sequence Number=SeqID_99912
cgggccatctctgctcgggaccggaaagcgtcgccactgatggatctacacgccggagacggctagggtttagcggaacggggaatgcgggtggagggcgtcggccagagcaggcgcgcattcttataggaatgccgttgccagttttggctctcgcccgcggaggggtcgccgtggaaggaaggtaacggcgaggtggggcgtgggcgcgcggcggcggtatgaactggaggagtcgacactcgccagccagccggcgtgatgccgcgcgtg

SEQ ID NO: 33939 - DNA, 240 bp, Setaria italica
  Peptide Sequence Number=SeqID_99913
tccccgccagcgtggatcttccccatcatggcgtccatgaggtcgttccacggcatggtggggaggaggcgctcgaactcctccgtgaagccgaggctgtcgacgacccagttgtcgctgttgacgtcgatgatggtcttgtcgaagtcgaacaccacgatgatcccggccattgcctgctgctgggtttcgaggcgaggcaagtagtttgctttgtcgtaggttgtggagaacctgaag

SEQ ID NO: 33940 - DNA, 535 bp, Setaria italica
  Peptide Sequence Number=SeqID_99914
cgctcatcaacctcgcccgcgtcgtcatcaaggtcaacgccggcacgtacacggagaaggtgaacatatcgccgatgcgtgcgttcgtcaccgtggagggcgccggcgccgacaagacggtggtgcagtggggcgacacggcggacacggtcgggtcctggggcagggccatgggcacgttcggctccgccacattcgccgtgaactcgatgttcttcgtcgccaagaacatcaccgcccagaacacggcccccatgccgaagcccggcgcgctgggcaagcagggcgtcgcgctgcggatatcggcggacaacgcggcgttcgtggggtgcaacttcctgggcgcgcaggacacgctgtacgaccacctgggccggcactactacagggactgctacatcgagggctccatcgacttcatcttcggcaacgcgctctccctctacgaggggtgccatgtgcacgcgatcgcgcggaactacggggcgctgacggcgcagaacaggcagagcctgctggaggacacgggttctcg

SEQ ID NO: 33941 - DNA, 659 bp, Setaria italica
  Peptide Sequence Number=SeqID_99915
cgaacccatcggcgaactcgaaaagacctccagaacgacacggccgcgggcggcggctcgacctcatcttcctccacctcctcctcgccggcgccggcggcttccccctccctcgcccccaccgcccgcatcccccgccggcccgtccccgtacggcgacggcgactcaggcggctcggagacctcggacacgggcgtgagcggctgcacgtgcggcgacgcccacccgaacagccccgtcggcaccatctccacctcgaagccttgcgcagctcgacgaagccgtcaaattcaaaaaccctaggatccggcgaagctcatcaccgcggctagccccgagacggcgacgacgggcggcggcggcgaccgggtcgcttccgaagcgagcctcaagccgcctccgaataaactaacctccgagaggactggccagtgccgcaaaggagagcccccttttaaaaactctcttctcggcggcacacggcaacgacgacccagtcagagaaattcggcggcgtactcccacacgagtacgccacgccacagcggagctcgtcggcggcgagcggctggcggctgctcgtcgccggcgaagacgcgtggcgcggcggtgggatggttgcgcgcagtggtgagttccttcttctcttctggcgtgc

SEQ ID NO: 33942 - DNA, 561 bp, Setaria italica
  misc_feature (485)..(561): n is a, c, g, or t
  Peptide Sequence Number=SeqID_99916
ccggagtccaccatggccgaggaggcgccggtggaggaggcagataaggcggccgaggaggagaaggcagagaagtaacccgaggaggaggagaaggcgacgtctcctgctccgaccaaggaggatggggagtcatcaaccgggaagcagaacaccacggagcccgtggaggccaaaccggtcgacgagcccaaggcggagggggcggcggcgcccatcgtcccagctgagtcgtcggcggcggagaagaagatcaacgccagcgacgaacaaaccgctaccgccgtcgctgccaccaccaccgcaagcgaaccgccggccaactaattgattaggaggaggcgaagagacgacgtgcagcgaccaatcatcgatccaagcaaactaaacgacatgttgttcttgttaagttaaggaattacggtttgtgatgcgttggttgtactacgtgtaatcaatatatatatgctcgatcgatcaatccnnnnnnnnnnnnnnnnnnnnnnnnnnnnnnnnnnnnnnnnnnnnnnnnnnnnnnnnnnnnnnnnnnnnnnnnnnnnn

SEQ ID NO: 33943 - DNA, 335 bp, Setaria italica
  Peptide Sequence Number=SeqID_99917
aaattttagctacctatatagaccaattgagcctgggattatataaaaatgaatacactatatcttcttctcctttttttttgtgcaggagggatgtcatgctgtttcagtaccttaatcagggtgttttgcatggttttcatcaatcaaaaatgtactttctagtattaccttgccccatgttgatagatcgctatatgacaaagtgtttatattagtatacgttaataaagagaaataacacgaacagaaccgaatgaaatggaatgaaatattatcattgcattagcatcataagaactcttggtaaaattggttcggtagcatcgaaagat

SEQ ID NO: 33944 - DNA, 597 bp, Setaria italica
  Peptide Sequence Number=SeqID_99918
ttgcagagaatgttgtgtatttggaataagaactacccctaagaacaatgaagccaaagggatgaccaagcggtcttacatggatgctgttattaaaggtctaaaagcagttgaagctgttgatgttgttttatttgattctaactcaagaacaaatgacacattagcttgcacacctacaattgagtttgatggtgacacaatgaaaaagaggatatatgtcaggctccttcttagtattgatcgccgtgagacaacttcggctgcattggatactgttaatttagccctggaattgaaggaccaaggtgtcattggcatcgatctttctggcaatccagtcgtgggggaatgggaaacatacttgcctgccctgcaacatgctaaagagctaggaatccccattacaattcactgtggagaggtagcaaacaggaaggagatccaggcagtgctggatttctgccctcagaggctgggtcatgtatgctgtctgaatgatgcagaatggaagaagctcaagtccctgatgattccagttgagatatgtttaacatcaaatgttatgacaggaggtgcttcctttcttcttagtaa

SEQ ID NO: 33945 - DNA, 1266 bp, Setaria italica
  Peptide Sequence Number=SeqID_99919
cagcacctctgtcatctttcagtccacaggggtagtaaatagaaacaatccaacatcattcgggatccaagggatgtgcgcttccaggccaattcagattgcaactggcaattccacaataagtcattccgttggtgatgcgaacaaatatcaccttagctttccaggtactagtaaccgaccaggaaatttggcacaaggtttggcaacttcagttggacaggtccaggtgccacaaaagtggatacaagaagaaacccacgatttatctactatcatttctgggaatggcctggttaatggtgtgcctggcacacttcgaagtgccacaaacagtcctttgctgcagcaagaccttgttgaatgcagacatgccaaaatagttatccagccgtcttcatctgtaaattcagaacatcttgaatgcactgctggagtttcttccagtctgatggattctcatgtatcccaacagagtggtgtttcattgtctgcgttttctgccagtgcattgcctatgaatggctcattcggcagtactaatgtagccaagttgggtgctacatcctctggaggcacaaatatttgctcctcaaatggcctgagagtagcaagagacaacgaagtgggagctacctctttaggtagtgtgatacttttgcctccagacactgcacaaaaccaaaagtacttgaactttggtggtggaagcagcttgggacacaacatggatggagggaacagagacagtgtattggattcaaagcttgtatggagttctttgccgacctctcagccaccaagtactatcagaagtcatcatcccttgaaccaaagatcgaataatggaacccttggtgtcaagatgattgagcagacaagtgcaagtgcttcaacagctgctccgcaaacgaagtttgacatgttcacctcaggagatatactgacggcaaagaacgcattggattcgagctttcctaggcttaacagtgagcttagttcaagcagctgcagcttcgacggccttctcaattccataatcaaagtggagaaggatgatacttccttcaacgatgatctgggatgcgacttctactccctgggtgcctgcatatgaaatccacctccacatatctgcatctgtgtacatctctcattgtatgctgcgtagttagtgttgatctttgtgtggcgcccctatttgtgctgctgactgtcagaaattacagtaactaataactgctaggtttgtatgtaatgtagcag

SEQ ID NO: 33946 - DNA, 317 bp, Setaria italica
  Peptide Sequence Number=SeqID_99920
aaccctaagtgttacttatgtgagcgtacgttttaccgcgatgccaggccggcgcacgcagcttatgtatcattccagacactgaagagctgcgcgccgccatggccaacgccggccatgttgtcgttgctgcttgccgctgccggggccgaggccggcgtccacgaaggcatcctcccgccaccgtaggccgcctccgcgttcaccaggtagctctcgtaccccatctgcgccgcctgcttggtggcctcgtcgtgctccccttgatgtgaccgcgcatgcacctgctcgtgactcaccattgccgtcgtggtccg

SEQ ID NO: 33947 - DNA, 425 bp, Setaria italica
  Peptide Sequence Number=SeqID_99921
gcaaaaatcaactgcaagtataaaaaggaaggaatatatacagaagtgattcacagtgtacatcaaccactgcaaacatatatgcatatagcttacgcataaaaatgtatataaacaatcagtgctgaattagatcctgtgtagacgcgggagatggcatcagcattgtagagcaactcgtattttgtagcttgctccccaatcaaagctgctacacttagctgaagacttcattaccgtcagacaactctacagttaaatgtatgattcttcggatacctttgcgcacatgaaatacctcaacctcaacatccgctttcaagcttaagtcattgctcttttcaagatgctctccaccaatacccaacaatatctcctcccactgaaacaaaaaggtatgattaaattactgtcagataaaattt

SEQ ID NO: 33948 - DNA, 264 bp, Setaria italica
  Peptide Sequence Number=SeqID_99922
aacggccgcctcaacgccgagccgctcgtcgtcgctgccgccggccgcccccctgtacctctcggctgccccttgcgagtgggtcgtcttgccctgcggcctggctctgactaaatcctagatgtcgggtagcctcggttgtgacggcccaaaccctaggcgtcggttggcctcggagtcggaggcggcagtgcgcggtggagcgacggggcatagcgatgcacgtggtggagcgacgggcaatggctggtgcgcggcggccgg

SEQ ID NO: 33949 - DNA, 1004 bp, Setaria italica
  Peptide Sequence Number=SeqID_99923
ggggctactacctcctcccccaccgcggccgccgagtcgacgagctccataaccttccaggacccctacaggagctccacgcatcagcctatgtccgatgccgcctcgtcgctgggcgatccacacgtggactggacgcaagccttcttgaacgggaggagtgatactagcttccaagccgtgctccaagacgacgacatggttcgagctcagccggcggccggcggcgaagccccagcgatgaacaatccattaataagggacatggactccggcttcttggtcgaccaagcgcagctagcaccgtcgccgtacggcacggcgccatcgcaagctatattcaacagcacggcggggcacggcatctcggtgtacggggacagccagtcctcgatcagctacgacgacgcggcatcgatgcagttctctcagctgctgaagccctcggtgccggcgtcggcgccgatgcaaggcggcggcggcgctccgatgctgcagtactgcttgtccggcggttacctgcctttcggtggtccgctgccgccgtcgcagcttctcttgcaggccttgcagacgacgaagcccagtagccgcagctccaacgctaactctctgactgtgaaggacgccagctcaccggcgacgaggaaaagcgtctccgagtcggctgccgccgtgaaaaggccgcggatcgaggcgccatcgccgctgccgacttttaaggtgaggaaagagaagctaggggacagaatcactgcgctccagcaactagtctcgccttttggaaagactgataccgcatcggttcttcacgaggccatcgaatacatcaaattccttcacgatcaagtttcttcactgagttctccctacttgaaaaatgtgatccccttgcagcaattccagcagaagggttccgagaaagccaaggataacggtgagacgaagcaggatctgcgcagccggggcctgtgccttgtcccggtggcaagcacgtacacggg

SEQ ID NO: 33950 - DNA, 237 bp, Setaria italica
  Peptide Sequence Number=SeqID_99924
attgatgctataacacatcttgatgaattcgaagtggactctgagtacataccacgcctttgatgtcaaaagactaatctgttgtgtagccaacactttgtcaagaggtatttcctttagatgttggaccttcagttcaatcgagatttccttcatgtcagccaagtaacctttagctataactgtgtctgggaatttgccatggtattttccagatacacataaaggatatttcac

SEQ ID NO: 33951 - DNA, 414 bp, Setaria italica
  Peptide Sequence Number=SeqID_99925
ctgtccttttagtttctgcttaaccttttgtgttgcatctactttatccagattggtttgaagtaagaccatctctgtgtactccgacggaatactattttgtatgcttaattttatcacctttctctccagttgtttgtctgcagaaagccacgcctttgatgtcaaaagactaatctgttgtgtagccaacactttgtcaagaggtatttcctttagatgttggaccttcagttcaatcgagatttccttcatgtcagccaagtaacctttagctataactgtgtctgggaatttgccatggtattttccagatacacataaaggatatttcactgaaaggtctggtatgtactcagagtccacttcgaattcatcaagatgtggcaaacatctctattgatgctataacca

SEQ ID NO: 33952 - DNA, 1029 bp, Setaria italica
  Peptide Sequence Number=SeqID_99926
gcttccacgaactctattatgtacactccagatctccaatcctccacacaaacacaaaacacaacacccggttttcctactacgactccgatcctccacagcacacctccgcgcagcactcgtagcagccgaggcacgagagcgccgcgcagatctgcgccattacaatggcgcactggtcgttcatcctgttgcacgccttgatgcagcacatgcagcagatgcagtccgccagtcggctgcagcagccgctagccttttgcattatcactgacttctctggcggccttacgtctccatatcctgtgataagattttctctcgtagctcctttgtcaccgaatcccagttttaggccatcaagagggatacgtatctcatctgggcctttctgtccttttagtttctgcttaaccttttgtgttgcatctactttatccagattggtttgaagtaagaccatctctgtgtactccgacggaatactattttgtatgcttaattttatcacctttctctccagttgtttgtctgcagaaagccacgcctttgatgtcaaaagactaatctgttgtgtagccaacactttgtcaagaggtatttcctttagatgttggaccttcagttcaatcgagatttccttcatgtcagccaagtaacctttagctataactgtgtctgggaatttgccatggtattttccagatacacataaaggatatttcactgaaaggtctggtatgtactcagagtccacttcgaattcatcaagatgtgttatagcatcaatagagatgtttgccacaattgtatttgatgctcctgcaaaccacttaagaatccggctctcaattgatgctgtctcaagtgcagcatcataatgtcccttgccaattgacgctagcatgcgcaagaaatagtggttgcaatgcgatcctagtccaaaagtagaaatgcggggagatttagatcctctattgataatctccgttttcatagtttgacagatattatgcatcctttgagtga

SEQ ID NO: 33953 - DNA, 1470 bp, Setaria italica
  misc_feature (1468)..(1468): n is a, c, g, or t
  Peptide Sequence Number=SeqID_99927
aacgaacgtagacccaagctaccagccctacgtctacggccgcctcgaaccgcccgcgctcatcccgctgcagatgaaggaggtcgacctcgccgtcgactgcgcgctcgacgccgcgcacgtcaccctgcgcgcgcgctggtggctgcactgcatcacgcgaagccgcgagtgcgacgtgcgcatcgttgtgcccatgggcgagcagggttcaattctaggcgctgaggttaccattggaagacgatcgtacaatactcaagtaatcgacgtagaagaccacactgtgcatcatggacaaattcagagtggcggtcttttgaagccccaattgtttttcttgacaatacctcaggttgagggtggagcagatatatatgctacatttcgatggtctcagaagttactatatgacaatggatgcttttctgttgacatacctttccgttttccttattttgtcaacccactaccaaaagtgttcatgaagagggaaaaaattcagttaactgtgaatagtggtttcagtaaagaggttttattgcaaggaacaagccacccattgaaggaaaagagtaggcaaggtgataaattgtctttcctgcatgaaggtgttgttgagaattggtcaagcaaagatttcaacttttcatacagtgtttactcagctgatctgtctggtggtgtgctcgtgcaacccgcaacgttacgtgactatgatgacagagatagtttctgcatttttcttctacctggtagtggcagcagaaaggtcttcagaaaagcagtcgtgtttattgttgacacaagtggaagcatgcaaggaaagcctcttgagaatgtcaagaatgcggtgtctactgctctttcagagcttgtgcaaggggattacttcaatattataacatttaatgatgagcttcactcattctcttcatgtttagagcaagtaaatgaaaaaacgatagcaagcgctactgattggatgaactcaaactttgttgctgagggcggtacagatattatgcatcctttgagtgaggcaatggctttactatcaagtgtccatgatgcacttccacaaatatatctcatgactgatggttcagttgaggacgaacataacatctgccaaactatgaaaacggagattatcaatagaggatctaaatctccccgcatttctacttttggactaggatcgcattgcaaccactatttcttgcgcatgctagcgtcaattggcaagggacattatgatgctgcacttgagacagcatcaattgagagccggattcttaagtggtttgcaggagcatcaaatacaattgtggcaaacatctctattgatgctataacacatcttgatgaattcgaagtggactctgagtacataccagacctttcagtgaaatatcctttatgtgtatctggaaaataccatggacaaattcccagacacagttanag

SEQ ID NO: 33954 - DNA, 171 bp, Setaria italica
  Peptide Sequence Number=SeqID_99928
gtgatgtttgttactcttctatgcaagtcagttttagttgctcacatgacaccttatgttttctctgaatgatgggctacacatttgttttttaagaatggtgaacatagtgcaaaatttgcctcctcaccctgtagtatacaatacttaagtgcgaagcatgattttcct

SEQ ID NO: 33955 - DNA, 539 bp, Setaria italica
  Peptide Sequence Number=SeqID_99929
ctttacattatacaaaggagtcacagtgttcaccatgcatgatctggtgcatgacatggcaagattagacatggccgatgaaattctggatggtagcaaacaaggcattactgtggaaagcactggtcgatatgtattgcttactgattgtagtaagcctctgaaatcgtctacacgttttactgataagattagggccctgcgttttcttgactgtagaagaattaagctacacggcgatgcattttcatctgcaacatccctacaagtcttggatttaagcgagtgccgcatataccagttgccagcttgcatcagtgaattggtgaaattgaggtatctcagtgccccaagattcaatgtcaaacgatcccgtattgtatcaccaagctctcgaaactaatttacctcaacctgagttggtccacgatattagcattgcctgagtcaattggtgacttgagatgtctgatgcatcttgatatctcgaattgtcactttatagataacctcccaaaatcatttgtgaacctcaaagg

SEQ ID NO: 33956 - DNA, 312 bp, Setaria italica
  Peptide Sequence Number=SeqID_99930
ccggccgaccgcatccgccgcgcccacgacgcccccgtctcccgcctctcggcggactccgacgccgggcaggacacgaggtcaacaatggcgcgcccggctgccctctccagaacgagcctctcgttgctggtcttggggaagctctcctccagggagtccatgtacgccgagaagaaccggaggccctcggtgaagaccttgatgaacgccgcctccgtgctggcggcttcctcggacgacgacgcgtccggatcgggctccacgaggtcggcgtcctcctcgacgacggtgaccacgcgcggctcgagg

SEQ ID NO: 33957 - DNA, 271 bp, Setaria italica
  Peptide Sequence Number=SeqID_99931
tgaggtagtatccgacgagctcgtcgtcggtggggtggaagcggaacccgggcggcagagtcatggtgcccattatactgatcgaaatggtggttatatgaatctacacactttgaggttgctaagcaaccaattaaggacaggaagaagcaaatacttataatgctacggatggaatggaacactagctagctgtaattaagaatgccaactgccaggcaaatatttgaggcagaggagcgaggggtgtcaatggacgagcagggaatat

SEQ ID NO: 33958 - DNA, 406 bp, Setaria italica
  Peptide Sequence Number=SeqID_99932
gctatgaggtctttggcggtgccgtagttaagcttcaaaggctcaaacactagggtaaagtgggctatatgctgttgggtctgtgatggaggcctgaatggggacaaaaatgctatgtaatgtagtacttaagatttttgagttgtaaagtcaagttgagtagccggtaaaccaatttgtcaacttagatgactagtcatgactaggcaaggccgtttagccaggatagcatgccagcaaggggatacgatactcactagtgcacggtactgctgagcatgagcatttgaacttctaaatcggtaacttgtctgcctgtgtggtttcagtaggcagacataccttttgctcttaataattgaataatgaaaaatggagctcagtgttcgtagtcttcttttgtact

SEQ ID NO: 33959 - DNA, 357 bp, Setaria italica
  Peptide Sequence Number=SeqID_99933
gttgggtttgattcaggatctgctagttccactggagttcctgatatgatggtagctgacaagatgaattcatctttagtcatcgacaattgtgatttatcagctgaacagcacggccttcatgcaaggaaaagggtattgtcaccattaactaatgtgcttcctgctggacagttccatggtgatgcactgagcattggttccggcaatgtaaaaatcagcacactgattgcgttagacagctctcttcttctggtttccatgacagcaaaaagccaacactggaactcttgatgcctttcactcacctactgagccaatattgagatactccaattggagtacggagcagggtgt

SEQ ID NO: 33960 - DNA, 299 bp, Setaria italica
  Peptide Sequence Number=SeqID_99934
ggcatggagccccaccatgaggggaattacgtactggcgtcaaacttgtatgctgcagatgaggattggagacgtgtggtagatattaggttggacatgggagcaaggaaagggacttcaagaggtgctattgcggcgtcttatgttgaagtcaatggtgactaaagtgcagaaagcttgtatgctagtacacatcaccgctcgccggtgacttttccaactccactgcttcgagatgcacaatgctgcataaccacgaatttgcttgccttactagcacattatgtgcttgtgtctat

SEQ ID NO: 33961 - DNA, 438 bp, Setaria italica
  misc_feature (341)..(341): n is a, c, g, or t
  Peptide Sequence Number=SeqID_99935
ttttgtttttagtttagtttattttccttttgttacttatttcctaagtcttgtccggtggaggaagagttcggagagggcgtggaccttgtcaagtgggtgcacacagcaccggcgaggggtgagacgccggagcagatcatggacccccggctgagcaccgtgtcgttcgcatggcgcaggcagatgcttgcagtgctcaaggttgcaatgctgtgcacggagcacgccccagccaagcggcccaggatgaagaaggtggtggagatgctgcaggaggccaagaacagctgagcctcctctttttaccactgaatgccgagtgagattgctgcttgggnatgaaccgagctacataaaagatagaatctccggtcatcggtgcatcagagcatgaaatccagtagcgtttaattcgctgtatatattcggtaatta

SEQ ID NO: 33962 - DNA, 954 bp, Setaria italica
  Peptide Sequence Number=SeqID_99936
aagaaaggactagaaggggcaggggaaggtggtggtggcagcaccgcaggttgtggcctcaactgtgttcatcgagagcttgcagcaggccatcgatttccagagctgcgtaaaggcgacatacaaagacgctaatgaactgggcaatggaacattcagcacaacctacaaggctgtcatgccctctggcatggttgtgtgtgtcaagaagctgaagtcagttgaccgcgcggtcatcgaccatcaaacaaagatgatccgagagctcgagcgccttgcgcacattaaccacaagaacctggtgagcccccatcgggtatgtcatctacgatgactgtgcgctgctgctgcaccaccatatgccaaatggcaccctgcttcagttgatccacaatgactggaattctgatggagagaagcagaaacctgactggccgaggctgctgtcgattgccattgatgttgctgaagggctggcgttcctccatcaggttgccaccattcacctagacatctcttcagggaacatctaccttgactcgcattacaatgcgcttctcggagaagttgagatatccaagctgttggacccttcaaagggcactgctagtatcagtgcggttgcgggctcctttggttacatacctccagagtatgcctacacaatgcaggtgacagtgccaggcaatgtgtacagctacggcgtggtcctgttagagatcctgacatccaagctgccggtggaggaagagttcggagagggcgtggaccttgtcaagtgggtgcacacagcaccggcgaggggtgagacgccggagcagatcatggacccccggctgagcaccgtgtcgttcgcatggcgcaggcagatgcttgcagtgctcaaggttgcaatgtcttgttgtctacggtagtcttacgttcccctttagtttccttttaagttttcgtttt

SEQ ID NO: 33963 - DNA, 222 bp, Setaria italica
  Peptide Sequence Number=SeqID_99937
gacaataattgcacaatgtatgcgaagtgaaaggtcgtgagtaagcagaattccaacagcatgttgcattaattaacagtgttggtagtagcaacggaaaatcaatcgcacatagtgatcccaatggaatggaaattacgactactaagcatcacgggcagtaccgcactaggtagtactagtagtcatgtacagaagaagaatgagtggggggagtcgagg

SEQ ID NO: 33964 - DNA, 509 bp, Setaria italica
  Peptide Sequence Number=SeqID_99938
ttgggttacctttttctaagttgggtagttgggacctcgtctggctcgagtcatgggactcgtagctttgggtcagagggtgacatggagctccaggctcggatggagttgaagaggaagagaaggatggagtcaaaccgggagtcagcaaagaggtcaaggcagcggaagcaacaacatctcgacgaccttaactcacaggtttgtgtctcttacatatgtctacataatttgcaaaattaaccatattttagcgtagattgtgatgtctttcatttgctagattattaccttgctttatatattgaagcttgcactcatgtgcaggtgaatttgacacaaagcaaaatcagatgaaaaaggagacttgagcttcaggatctgctgaagcatactccaataatgcacggagccctgtttttcagggcccacccaacaaactgcttctaaggaagcagtcggaacaatatcaagattacaccaaaagatgatattaacattttcaccac

SEQ ID NO: 33965 - DNA, 371 bp, Setaria italica
  Peptide Sequence Number=SeqID_99939
accctgttgggtgggaccttttcaagtgggagtgggacctcgtctggctcgagtcatgggactcgtagctttgggtcagagggtgacatggagctccaggctcggatggagttgaagaggaagagaaggatggagtcaaaccgggagtcagcaaagaggtcaaggcagcggaagcaacaacatctcgacgaccttaactcacaggtcgaccagttgaggacgacgaaacagcaactcctcacagcactgaacaacaccacccagaactacgctgcagcagaagctcagaactcggtgctgcgcacccagatgatcgagctggagagcaggctgtccgcactgcgtgacatcatatgctatatgaacgcaaa

SEQ ID NO: 33966 - DNA, 589 bp, Setaria italica
  Peptide Sequence Number=SeqID_99940
attggaacttttgtggtgatggagtttcgtatatgataagcaaacagaaagaaaccctggactctagaagaagatgagatccttgaggaaggcctggataagatccttgaccacatttggtcaaaaaaagaaagatccttgacggtaagaagaaagaagattatgtcaggcatggtggcgtcaaaaggcatcggaaagagaactgcaccaaaaatgtgaaaagtcgggatgttttaacttcaccatacattctaggagaacaatcgataaccattgaagggaaagcctcggcatcttcttcaggcatatcgtcaaggtcaactatgttttcctgtatttctgaagcaacttgatgaggacaccacgagtacatctacaccagcagcacctcaggcgcctccagttgctcatccagttgggccaatcactcgagcccgtgcgagagaattaaacttcatcatgctgttaaggaacgaaggcccatcggaataagaagatggcccaacagggcagcccaggtggggcgcctagggttgggcgccgtgaccccttcggactccaggggctgcgccccctttattttagttct

SEQ ID NO: 33967 - DNA, 489 bp, Setaria italica
  Peptide Sequence Number=SeqID_99941
cagcccatagatcacttgctataccagtgcttctagctaggaggtagaagctagagaaacaaggcatcaggatattatgcgtggtaaaatgttgtagggccattgtgtcaccactaatcagtgtctttgtcttttgatttgtttaagggattatatgggtgtaaggcaatggttggttggcctttcgatcatgttagttgtagatgttacatcaaattggtgagtggcaagttgtcccttggactggcgtggggtggtggctacatgtattggtaggtgagggcctgcagggagatgacggccatggggtgaaggagaatttgataaggacaccacgagtacatctacaccagcagcacctcaggcacctccagttgctcctccacctcaggcgcctacagttgctcatccagttgggccaatcactcgagcccgtgcgagagaattaaacttcatcatgctgttaaggaacgaaggcccatcggaata

SEQ ID NO: 33968 - DNA, 1263 bp, Setaria italica
  Peptide Sequence Number=SeqID_99942
ccgcctcactacaagatctatgtcaagatggtgaaagaagtggcacttgatgtgaagtgcactgataccgttgatcagattaaatctaagatcagttccatagagggcattgataagaaccatcaagcactcttttttggtggaaatcacttggagaacaacaacaggctcgctgattacaacatcatgacaaactcttctgtcgacctctatgtaaccgatgggatgcaaatatctgtcagtatcccctctgttggaaagataatcaagctcaatttgaagaaatcccagagtgttgctgatgtcaaggcagagattgaacagaagggaggaattccgctggatgaacaaatcctgatgtgtggatgccaacagcttgaggacaacaaggtgttgagccagtgtggtttgagcaatggtgatgaggacaccacgagtacatctacaccagcagcacctcaggcgcctccagttgctcatccagttgggccaatcactcgagcccgtgcgagagaattaaacttcatcatgctgttaaggaacgaaggcccatcggaataagaagatagcccaacagggcagcccaggtggggcgcttagggttgggcgccgtgaccccttcggactccaggggctgcgccccctttatttagtccgagtcctttttgtttacgacttgagttttgttttacatctagctttagctacccttgaacacgcgcaaatacgcgctgtccttgtgtgattcagaactccaccttcgagtgatatttagattgctcgcctctctttcttgttcgttcttcgattgcggacaggaatcgatcttcgtgatcaggctgatctcgcaccagcgaggttggtaaccatcgggagttggttcagcgattgcattggcgcttcgggttcgctcgtcgtagtcggatcgtgagggtctacttccaccaagtcgaatttatcttcactcaccgaaagatcgggcactccgactctatcaagtggtatcagctttccaggttgatcggtgagttttaccgagtgtttttcccttcctacagtccacaaaaaccaaaacaaatttttttcaggttagatcctttgtcccagcaaccgtttagcctcgcacattctttcaataagtgtctttgttgaatttgtgtgcctactcgttcaattgttgctggttacttgtgtttaatctgttgtttctcgtttttttctattcttaacccttagtttttcgtccgttccgttccgttcctt

SEQ ID NO: 33969 - DNA, 483 bp, Setaria italica
  Peptide Sequence Number=SeqID_99943
gctaatcatttgatcaacatgtgcagcggcatctatgtgtggggtgtcctcggcatcaagtgcaaacaaatcaataggcgcccgaggaatataaccataaacaacttgaaaaggacacatctttgtagaagaatgcgttgcatgattataagcaaactcaacatgaggcaagcaatcttcccaacgtttcaagtgtttatctaaaacagccctaagcatagtggacaaggttcgattaaccacctcagtttgtccatcagtctgagggtgacaagtggtgctaaacagcaatttagttcccattttattccatagtgatctccaaaaatgactgagaaacttagcatcacgatcagagactattgtatttggaataccatgcaaacgaataatctcgcgaaagaacaattcagcaacattgctagcatcatcagtcttatgacaaggtataaaatgagccattttggagaaacgatcaacaac

SEQ ID NO: 33970 - DNA, 4660 bp, Setaria italica
  misc_feature (40)..(40): n is a, c, g, or t
  Peptide Sequence Number=SeqID_99944
ccgttcatcaattgctcttgacttggcctcgaggtcatcngaatcgtcagactccactccagagtcaccaccctcgcttccttcgtcactatcagcgaggaagtcgtccgcaagggggtcatcatcgctttcatcatctcccttttcccctccttccctccttcccactaaggttcgcttgttcctgtccagcagctctgctgctttgccatcttcattgcaataatctcttgctctccaagcactccatccttgttgtgttctggatttcgtagccttgctcttgtgatctttggcctttgcgcttcaagcagaaactctgcacaaattttccactgaaaactaagatctccaggggagaccgagactctgccaaacttcttacctaccatcaagctgatacaggatacattttgttttgtaatcaacttgtttgtgtggtaaaagctcataacattttggccaactgatccatgatagactgagagaggaaggttgtggcttgttacatgtcacaaatcctctcggaggctatcctttccggatttatgatcaattcgacgctccggcgaggcacccatcttgttctctccttctccgttgtgttcctctactggttctacgtgttctcagtaagatcctagccaagatcaattcccatccattaactcattcaaataagaaaatagcatccccatcctgtacctatatatccaaactatagcctctagagacaccttagaagaaacttctagatttaactgggcgtgaacataggccaagctaggtaattttttgggtgaagcattaagggttactcaaagaatttgttgaggatgaccctgttgggtgggaccttttcaagtgggagtgggacctcgtctggctcgagtcatgggactcgtagctttgggtcagagggtgacatggagctccaggctcggatggagttgaagaggaagagaaggatggagtcaaaccgggagtcagcaaagaggtcaaggcagcggaagcaacaacatctcgacgaccttaactcacaggtgaatttgacacaaagcaaaatcagatgaaaaaggagacttgagcttcaggatctgctgaagcatactccaataatgcacggagccctgtttttcagggcccacccaacaaactgcttctaaggaagcagtcggaacaatatcaagattacaccaaaagatgatattaacatttttcaccacaactttcgataaagaggcgatgccaaactagttatggatgacgtaggcaaataccactgtcaaagcctatcttgaggttacagcaaggagattaaactttaccacccttttaaagatattttctacaaactaacagttcctccaaaaataataccatcatataatacttgattgttagttttcaagattaataacaatatttaagagcttagattggtcttacaaaaattaccaaacactccagatttagaatattgttgataccaaaaaaagtaaaaggctctgccaatcacaattcacagcttactctaaagaatttaaaggctctgccaaattttgttctgtcaatcgcagttaaacatgaatgttcttgcataaaaaacaggtcgaccagttgaggacgacgaaacagcaactcctcacagcactgaacaacaccacccagaactacgctgcagcagaagctcagaactcggtgctgcgcacccagatgatcgagctggagagcaggctgtccgcactgcgtgacatcatatgctatatgaacgcaaatctgcaggtttctaattctgcaacaattaatgccaatccgtcaactatcatgggcgtcactgctaactacgatgcttttgacgcaagcgcatggaactcagggatgccaatggtgcagcagcccatagatcacttgctataccagtgcttctagctaggaggtagaagctagagaaacaaggcatcaggatattatgcgtggtaaaatgttgtagggccattgtgtcaccactaatcagtgtctttgtcttttgatttgtttaagggattatatgggtgtaaggcaatggttggttggcctttcgatcatgttagttgtagatgttacatcaaattggtgagtggcaagttgtcccttggactggcgtggggtggtggctacatgtattggtaggtgagggcctgcagggagatgacggccatggggtgaaggagaatttgatgaggacaccacgagtacatctacaccagcagcacctcaggcgcctccagttgctcctccagttgggccaatcactcgagcccgtgcgagagaattaaacttcatcatgctgttaaggaacgaaggctcctaggtacacttctttcccatctccattttttccgtgctttcagggccatcagtttccattgcatccttcttttgtttcttaagatgctttgctggcctatcaggtacatgtgtagtctctttggggacgcttctttctttattagacttcttagtctctttgtgatttttcatccgaacagctttctcatctttatcaggaacacctttctcttgttcttgttcttcaggaacagcttccttatcttcatcatccccgctaggatcagctttctcagctgctacttcagatgctttggacgactcagatgtaacaggaattgtattgctcaactttttcagcttagccacgaaaaatccatccatgttgttgacatgaggataaaaccttcttgttttgtctaacgaagtatggaaccgatgttcccggaaccggatgaatcctgggcgtccaaaatccaacccgcaaggcacaagctttacgtttctctttttaagtgcatagtcaattaccgcctcgttctccgggatcattattgaacaagttgagtaaacaatgtaaccaccagttttggagttggcatcaaccaaatcaatagcagctagcaacaattgcttttgaacaaaggcacagttcctaatgtcatcgatgtcctttgatgtttttatttgtggatccttccaaatggtcccagttcctgtgcagggagcatccagcaatactctgtcaaccgaattcatcccgagaactttgggtaactctttaccatcatagttacaaactatggtatttgtcacacccatgcgatggatgttgcccaacagtccatgcaaccttttctcattgaactcatttgcatagatgattccagtattcttcataagagcaccgatgtaagtagtcttgccacctggagcagctgccatatcaacaattcgctccttctcctggggagcaagtgccatcaccggtaagaaagaacttgcaccttgtttcatgtaatgtccagccatatattcagtagtagcaccagctgaaatggtggagtcatagacaactaatcctacctttgaccatttgcctattgggtctagattaaatcctcttggtataagagcagcagcaagatctctcctcctggtctttaatgtatttgtccgcaagcactcaggtggtcttttctcaaaagcttccaatagctcaacaagctcaacagcagggaacatctcaatcaatgcttcaacgagaaaatcgttatacccatagtatgatatgatgtcagttttgagttgattgacataatctttccgtgggacatctttctgcctcagcttggtgaagtttgagaggactcgaacaatttctgatatcctccttttgagatttggtaggttaggaggtaaatgtgcctcttcctccagttcctcggctgttggtaatctgaactcatcagattctgatcttatgttggttgtaagttcgtcatctgcctcttcttccaccttccgcttccgttcatcaattgctcttgacttggcctcgaggtcatcagaatcgtcagactccactccagagtcaccaccctcgcttccttcgtcactatcagcgaggaagtcgtccgcaagggggtcatcatcgctttcatcatctccctcctcctcctcattctcttccacctcgtcgccgctgctggagcctccgtcggcatcggcgtccgagccagagagctcatcggcctcagcgtccgacccggatagctcctcggcgtcggaatcggaggggacgtcgaggtcggagtcctcctcctggagctgctgcggctccgtatctgagtcgtcggaggactcgagaagctcctgcttcttcggcaccctcttcgccgccttcggtgggggcgccgccttgctccccttcttcgccgcggtaaccggcggcggcggctgcttgctcttcggccccttcttcgccatggataccgtcgattgctgcgtggggacagggggcgggcgaatgggggaggcggggagcggagaagatagccctaaaacgctagccaggtggggcgcttagggttgggcgccgtgaccccttcggactccaggggctgcgccccctttatttagtccgagtcctttttgtttacgacttgagttttgttttacatctagctttagctacccttgaacacgcgcaaatacgcgctgtccttgtgtgattcagaactccaccttcgagtgatatttagattgctcgacccacatacaagaacgtttctttcgtatttgttcggttacttaggtttaaccgttt

SEQ ID NO: 33971 - DNA, 486 bp, Setaria italica
  Peptide Sequence Number=SeqID_99945
aaaacaatagtgcagtattatgggagtgacattattgaagaacgtttttacatttacctggaatacgttcatccgggttcaattaataagtatgtcaaacaacattatggagcaatgacagaatcagttgttcggaacttcacccgccatatcctaaggggtctagcatttttgcatggccaaaagattatgcatagggatattaaaggagcaaatctactagttgatgttcaaggtgtagtcaaattggctgactttggaatggccaaacatctaagtaccgcagctccaaatctttcactgaagggaactccatactggatggcaccagagatggttcaggctacactaatgaaagatgtaggctatgatgtcgctgttgatatatggagtcttggctgcaccattatagaaatgtttgatggaaagcctccttggagtgatcttgaagggcctgccgcgatgtttaaggttttacataaggac

SEQ ID NO: 33972 - DNA, 523 bp, Setaria italica
  Peptide Sequence Number=SeqID_99946
gtttggtggatctgagttggctggctttgcttcatgattaaatctcagcttttgcagttagttggaaatgcttttggttggtcatttgtacattgctgatgggctttattgtttctgggtccctaggacacacattcaactcaagtgtatctttagtgtaaaggcgagagctttttggaagtaatccggagttttcaatattttctttatgattcagtggatcttggttagttggatgttatgatttaatgggttagtcaggtatgatattttgtttaactgttgaagtacaactttatgggattctttgtcgaaacatctgaactcttcctggatagcattggattcttttcgacatggtcttccctgtgtttgtttggcttagttttaatcctctttagtggtgtttgaatccttcttagtttgtctcaaactaggatctttaagatagatggatcacatcagttcaactagccacatgctagtaaaagttagtatgttctaaatgttgtggccttaaagt

SEQ ID NO: 33973 - DNA, 1706 bp, Setaria italica
  misc_feature (1)..(29): n is a, c, g, or t
  Peptide Sequence Number=SeqID_99947
nnnnnnnnnnnnnnnnnnnnnnnnnnnnnctaacaaaatcaagcacagtgcatgcttgttaacattgatttgttcagtgacatgattgataaataacgtcactggccctttaacaccatatcatctgatccaacagcatcaagagccagtgtgatcacagtaactagctcactatacagcagggggagacacaatgcacgtacacctaaacaaaaaacttacacctgtaatacccgattattgaggcacttacttgtctgtaactatcctcccaaaccaaaaaataaaataaaataagaacactagtaacaaactggacaaatcaatcaaagaatcagagaccaccgctttgcaatctccactgttcttcagttcttctgctttccccgcgatttcccaccgatgatccgaggcgatccgggattggcattggcgttgccgctgagggacgatcagcctggtatcaaaagctcagcccctccactcggggcactggtcggccggccgcgtgttctgcgacccggccttgatcgggcacggcgcatacaccggcggcaccatgcagttgtacatcaggcagagcgagacggtggaggggagcgacgacgacggcgatatctcgatgcccgtcaggaagttgtgctgcaggtagagcacctgcaggccgccggagcccaccagctcctgcaccagccgcgacgggacctcgccggtgaaccggttgttgttcaggtacagctgcccgacgccggcaaggagcggcgagagctggccccagaaccggttgtagctcaggtccaccaccgggatcgtcacgtcgttcgccggctgcacgggccccgcgaagaagttgcgctgcagctgcagcacggagaggggcaatgcgaacaccgccggcgggatcgggccatccagctggttcatgctgaggtcgaggaagttgagccgggtcagccgtggcagcacctggtccaccgtgccgctcagcttgttggccgacagcgagaggtactgcagcccggcgggcagggtgggcacgccgccggtgagggcgttgtgcttgaggtccagccggagcagcggggacgagtcctggaacgccgggacgccgccggtgagctggttgtggcagaggatgaggttggtgatcgacggcagcgcggcgatggacggcgggatggcgccggagatctggttgaagctgacgtcgagcgtccggaggttggtcagcgcgccgaagccgtccggtatcgagccggacaggaggttcttgctgacggccaggaaccggaggttcgagcacgacgcgagcgacgccgggagctgcccctcgacgcgccccggcacgagcgagagctcggtgagcgcggacagcctgcccagcgccgggtcgagccgccccgtcagccccggcgacccggcccgcgggtccccgagcgcgagcgacgccacgcggtccccgtcgcagaacacgccggggaacccgcaggggtcggcggtgaagtcccagccgtcgaagaacgccgaccccggcatgtcgtccagcgaccgccgcaccgcctgcagcgccaggaagtcgaccgggtcgaggatccccgccgcggggagcggcgccgtcgccaccgccgccaggacgacgcacgccacgacggcgcggagccgcgcggtcactgccattgccgcgactctgcctcccacctctgctc

SEQ ID NO: 33974 - DNA, 250 bp, Setaria italica
  Peptide Sequence Number=SeqID_99948
tcgtcgtcgtcgtcgtcgtcttcccccgtgaaggtgaagtcgagcggttgagaggaggatgctgcaggctcatcatccccggcctgcagcccgtgctcgtagcgaggccgaggccttgaggttgggcggtagtaggggtagtaatcgtcatcaccattgtctttgtctcctcctgtgaagcacttgaggatgttccccatggatcgatccctgccttctctccaagctctctccgattgatctcttcttg

SEQ ID NO: 33975 - DNA, 189 bp, Setaria italica
  Peptide Sequence Number=SeqID_99949
caaatcttccacgcaggaatactgctaaaatgatcaggtgctctttcgagaggtgcctttggattggtgaattcaggcttgccaggagcagtagcatcaccatctttttcatgagaatttttcagcttctggtcctcctttcttggcctggctgttttcggtagtatgatttcaaccctgtcacgttca

SEQ ID NO: 33976 - DNA, 744 bp, Setaria italica
  Peptide Sequence Number=SeqID_99950
ttatatagtctgaagaatgaatttgatggatttttcattcatatggatttctggttcgatgcgatgtgtcttcgatgtgcctatgtttcattttagtaactgctacttgtagcaatgcatacagtgctatccagagcaatgaccaattggggtgtactgccatagtgccctgtaaaaggtctgaagccaccgaccagtatgaacattttgaaagatttgccaaactgaagatactgctactgatgtctagaaggaacagggcaagaatctatcagcatcagccgatatgccaaatgctactagtcagtggcctgtggtccatatcacacacaccaaccagtttggctgtctgaaaattcagcttcagttggtggcccagaggctcagtccataacagcacggacctgaatttatcccttttttatttaaaaaataacagcagggatcattttccaatcctcgtggtgggattgggagaaattcttgaaccatctgagccgtcaaataatccagattttagaaggatggagctggtccatgatgttccttctccaaggttcccaaaagtctcacctaatggagagtggagacaactttggcgcctgcttacttttctttcctatttttttaaagaaaaacttgattctcctttctttcagaaatatttttgtattcagagaaatattaaggataacctaactatcatatgcatgcttgtacttgaaatttacagcaactaccata

SEQ ID NO: 33977 - DNA, 515 bp, Setaria italica
  Peptide Sequence Number=SeqID_99951
cattacatataattcttgcaacatataattttaagcacaaagcacagatggcagggtatgcttctacacagaatgcttttactgtttccatctttcgatgctttagtgactcataaggcctggtgcagtgcaggaaaacctaccaaatgtttctaaaagtcagataccatcttaactcttgcccatgtgtccatctgatttccctaggggccagggcacatggttaattgccccttttatttatttttaatgacactgcatcaacattactttctttcaaatgcacaatgctagtgatatctaattcttactatcttgtaatgtgtttgggatgagttgtggctttcttctgttctgttatgaacctcaccctaacaccctatcatttgctaagtaggctctaaccccagcagtgcctacactacaaggcactgaaattatctgttctgttttgaattaagcattcaaatgccatcttcagcagaattatctatcacatatcctcgccattttct

SEQ ID NO: 33978 - DNA, 555 bp, Setaria italica
  Peptide Sequence Number=SeqID_99952
aaccgacacatctagcatcttcatctgtgcactcatcctcggacgcaaataaagattttggagtatcagtctttctcaaatggatatgttttacggccagccattcctcaccttcaaggacagaacacacttcgtattggctatccttgtctattactccatcaggcttcaaattgaacagcagaatagcatttcccttgacaggttgtaccgcataaccaacacactcagatgctgccccttgctcaacttgggtgccctgcacctcagatctggggaagacagtttccccgcctcgcttgacatcagaaagatatatcaaaactgtcacaagtctatcattgccactgcttgattgagatccatagttgttatagccacttttgttcacctcatacttcagaatctgcatactctctccaaaatcttttggaagaaagctccatattgatatcctatcttcaatctttgaaacaattgtgtctttgctatcagccatgtacattttgatgctttcatcagtgttgtttttgggaactactttgttagtctacc

SEQ ID NO: 33979 - DNA, 1389 bp, Setaria italica
  Peptide Sequence Number=SeqID_99953
tgcacaagatatggttgggcttcattggattggctacctatgtcaggattgcaaggattttggatctgacagtaaaagagactgaatctggagacttgagatgatagcaaaccacaaatcattgtattggtggcatccgccatcatctctttgatgggtatccaagttgacaatggcttatcaacagtctgaccttgcaagttggtttccgcccttggggtgatccacttgatttgaggcagtggcatattatgcaggactccaccctacaactggcggggttgccttcttttctggacagaaacatgcagatttgttgctgtgctgagatctggatgtcggtgatgtacagtacagatcgcactgactgaaaagctttccaagttgaaagatcttcatcgaaggaacttggttgatgatcatctccgtttccgcgagtagtcgttatctgtataggtgtatatggaccttgattgaaggcaatcttgttctcgagcaactgtctctgcgtgcatacgtctgaagggaatgaagtcgtcaaaattgtaatactgtgtctagatttagcctcgagaccggagaatttataagtgcaggccaatttttaagctttcttcttttcaatgaacagaggcatcgttgcactgttccattttcattaaacgagacaaagcgttcacagaacagtatcagtatgcttattcttcaggctttctgacaatgaagatgatgtttgcattgagtttacaaaaagttttgctctctgttgcttcagttgtactcctgtgtatgaaactatctcaagtgtctttaatgcatattgtctgttattctttgtgtttcttcctgtatcttatacactttacaatttgtttttccattctggatatgaatgctgtcgaccagctcttgaacttttagttcaactgcaatacaacaatgcacaactttcatatttgacttaaaactgcaacagataatgtatttgaatactcatgataggcaagggtattaaatatgtcacacatacatgtgcgacttggcaatgtgtaggaggaggtctgtcattgtgatatgggatattcgtagttaatagtaacttatactagattcataattttccaattatatctacaagagggatcctttcacattttccaaactcttgctgattgaactggtcggagattattgcaatgtctttctcatcgatcttccccatctccttgagcttgtagatcacaaagtctgatttgctgttgcataggagcaagaagattgctaatgagtgaccattgacaactatattacttgaatatgaaatacacagtcactataagaaacataaagatagcatactttcagattataagagctgtgagcaaagaa

SEQ ID NO: 33980 - DNA, 284 bp, Setaria italica
  Peptide Sequence Number=SeqID_99954
ccgcgcccagcagctaccacttcgccgcgggctcgccgccggggctggccgccgtgcgacccaacatggtgctccccgcgccgccacacctcaagctgtggggcggcagcgatactgctacgctgccatccatgggcattattggtggcgtcctagccggtgccggcgctccgccgccagtggtgcccccgcagctgtacgcggagctcctccccgtccccggtgcaccgtcgtcgcagcagctggacgcctgagacacgcaacgaggggataggacgacgcac

SEQ ID NO: 33981 - DNA, 391 bp, Setaria italica
  Peptide Sequence Number=SeqID_99955
tgcttcgacattttccctaacattttaggctaatttagagcaggcaacaattctattctctttgtgatagcacacattgagtttcatacgctgaataggttgcacacgagccaccaaaaccattgtctttttagctactgggcttccatttctttttaaaacaaaacaaaaagaagatttagtcacaactgcaaataaacttttttgcatcttcgtctatagatcctttatcatatttattcaattagagtactgacacgcaaattatgactatacactcataaacgaatttgaatttcaggtgcaaattcaattagcctttggtgttgaacaggttaaagaagtcgtgtattgtaattatgctttaacaaatccaaggtggtgaaggctt

SEQ ID NO: 33982 - DNA, 292 bp, Setaria italica
  Peptide Sequence Number=SeqID_99956
aacaataccgaacaataggaataggtgataccggtctaggtagggagcttggctctggcgattctctggtccggagaaagagagaaaaaagatgccttgacttttgatttggttttcagtgggatgttaggattgaaagaatgtgcaaatgcagggtgtgattatatgggctaagtaagtacaacaatatcagtggatggtcggttacctggagcttggttgtatagtatattatatgtaattttctctttctttttggttgagccatccatgttacaggtatcatccatgg

SEQ ID NO: 33983 - DNA, 486 bp, Setaria italica
  misc_feature (477)..(477): n is a, c, g, or t
  Peptide Sequence Number=SeqID_99957
gtttgatgactaccagtggcaaataactacagcaataccaacatgatatgatgttttcctgtacaactagtaaatgatgtagcagcgtgttatgtgataatgtttcccattcagtgattttctagttattgttagaaacgctgaatggcttttaagaaatagcatcttttttccatcattaataacagccaatcctcacttatcatattgtattctgcaggttgttacttgtggaaatttgcccctcgagtcttcattccaacgggttccgagatgtgtttacacttccacttgcttgtatgagtataggggttgggattcaaaagctgctaacactacacatcgccgattcacttggggactcaggtcaatggagcgacatgcagtggatttctacatctctgatttccaatcaggattgcgtgcacttggttgtaaaactaggtattttggttgtctacgttgttaaccctattnttgtttgta

SEQ ID NO: 33984 - DNA, 2047 bp, Setaria italica
  Peptide Sequence Number=SeqID_99958
ctctctatcccctccctctcgcttcccctacccccattctgccattccacagccgaaacccaccgtctcgcggtggggaggaggaagaaggggatagcaccgtcggctgccgctctcctcaggtgctgatgcaaggctttcaaaacctcaacaatctcacttaacgcaacacaatcacactgaaggtttagttggattggccatttcagaacatgggttcgcgatttccatcccaccagctaagcaatggcctgtatgtctcgggccgacctgagcaacctaaggagaaggccccagtcatttgctcctcagctatgccatacactggcggggatataaagaaatctggagagcttgggaagatgtttgatctccatagaaaatctggtcctttgggtaaccagccttcaaggaatacttcgttcggtggtgctgcctccaactctggaccagtttctaatgctgttggtcgctccaactactctggttctatttcatctgcagttcctggcactggaggatcttcaaggacaaaatctaattctggacctctcaataagcatggagaaccgacaaagaggtcgtctggcccccaatcaggtggagtaacccccatggcccgccagaactctggccctctgcctcctgttcttcctacaactgggctaattacatcaggtccaatcacctcgggtcagatgaattcatctggtgctcaaaggaaagtatcaggccctcttgattccagtgtatcaatgaagatgcgtactgcctcttttgcacacaacccagctgtcacaaatctcaatgcagaagatggttactcgattaagggcagcattccagcagcaataatgtggttggttgcattgctttttgtggttggatttgtggcaggaggcttcattcttgctgctattcataatccgatcttgctcatagttgttgtggtgatatttggttttgtcgctgcacttgtcacctggaacatctgctggggaacgaaaggtgtgactgggtttgtcagtcactatcctgatgcagatcttagaactgcaaaagacggagagtatgtgaaggttactggggttgttacttgtggaaatttgcccctcgagtcttcattccaacgggttccgagatgtgtttacacttccacttgcttgtatgagtataggggttgggattcaaaagctgctaacactacacatcgccgattcacttggggactcaggtcaatggagcgacatgcagtggatttctacatctctgatttccaatcaggattgcgtgcactggtgaaaacaggatttggtgcacgtgtaaccccatatgttgatgaatctgttgttattgacataaacccagacaacaaggacatgtcgcctgaattcctaaggtggctgcggggaaggaacctctcgagcgatgatcggattatgcgcctgaaagaagggtacatcaaggagggcagcaccgttagcgtgatgggtgttgttcaaaggaacgagaacgtgctgatgatcgttcctcctgctgaacccatctccaccggctgccagtgggccaagtgcatgctcccaaccagcctcgatggcctggtcctgaggtgtgaagatacatccgacatggatgtgataccggtctaggtagggagcttggctctggcgattctctggtccggagaaagagagaaaaaagatgccttgacttttgatttggttttcagtgggatgttaggattgaaagaatgtgcaaatgcagggtgtgattatatgggctaagtaagtacaacaatatcagtggatggtcggttacctggagcttggttgtatagtatattatatgtaattttctctttctttttggttgagccatggatgatacctgtaacatggatggcttgatgtcagtactacctacctaccatggagcctgtttggagattcagtggtttccagtttatattatgttttcttttttgttgtcaagggtcacagcaataatgaagcctgcaatttccttttgtacctatgatctccaataa

SEQ ID NO: 33985 - DNA, 416 bp, Setaria italica
  Peptide Sequence Number=SeqID_99959
taagtagtacaaataagctaactcttttttccatgcaattgtcaaccccatttcaaaagaggagagggccttgagtgaaacattgttctaagcttgcttattcacttgcatctgttcagtatgggaccttgtcacatggcgacatggtcagcaaccaagtttatatgactatctgaggccatggtttgatcctttagtttgattatgttagtacttcagttaccagaatatgtataatgataggtgcttctagaaatctgtagtgaacactctttttttcaagttatccatatgaaaacccaggcatttgtatatcatactttggatggatctttttaacgcctcttatgtacttgtcatgctgtctttatactttgggattgtcatttttgatgaccgttatgtacttgttatgc

SEQ ID NO: 33986 - DNA, 711 bp, Setaria italica
  Peptide Sequence Number=SeqID_99960
catttatcctttgagctactgatacagcttcattttttgcttcctcaacatcttttccaatgcttcttgcaggattaacaatctgtacaaggacaaccttccccctaagcttaggtgttctctccaaaagaagctccaagccaagcaatttaagactgatacctttaaagatatccatgtcatctacacctaagattaccaactttcccctatatctattctcgatttcttgaaccttgctaattgtaacaggcaacttcaacatagactcaagccggccaacatgtacacctgcagcgagaatcttgaggttcactgttcgaccgaagtactctataccaatgtgaccacgttttgactcataattaaggcctaacagcctgctgcaacatgaaaggaagtgacgggcataatcaaatgtttgaaagccaataagatcagcattaagaagtgactttaggatttcatcccgcactggcagtgttttatatatctcagaagagggaaatgggctgtggaggaagaaaccaactttgatcctgtgcagcttctttcttaaaaaggttgggacaagcataaggtgataatcatgaacccacacacagtcatcatctgaattgactgcctccataactttgtcagcaaagatttggttggcccgcacgtaggcttgaaaaagggagcggtcaaagagttcacctttgtcatgtg

SEQ ID NO: 33987 - DNA, 488 bp, Setaria italica
  Peptide Sequence Number=SeqID_99961
agcctccagtccaccaccgcgctcgacgtctcgacgcttccacccgccgagggccgggcgccgcacagcctcaagttccccgcgcgggcgcgcgagagcgtcttcgagcctcgccccggcccttacacccgccgcgaggtagggagctagctccggcgtcgacgcccgttcgtacgcacggcaccggggccgggcgagggcggcgcggcacggcgggcggcggaggaatgcggatggggaagtacgagatggggcggacgctcggggagggccacttcggcaaggtgaggctggcgcgccacgccgagacgggccgcgccttcgccatcaagatcctcgaccgccagcgcatcctcgccatgaagatcgacgagcagataaagagggagatcgccacgctgaagctgctcaagcaccccaacgtcgtccggctctacgaggtttcagcaagcaaaacaaaaatatacatggtccttgagtatgtaaat

SEQ ID NO: 33988 - DNA, 269 bp, Setaria italica
  Peptide Sequence Number=SeqID_99962
ttaagtgtgtaggggtgctgtaaaggatattagattggtatttttggtagcttgaagattcgtgttcggatgattcaagtccatatatgatgtgttgttggtccaattggacctcagtccatgtcttcctttggagatttatagacacagactttcatgttttgtattgtacctgttgttcagttcacctctaacagctattattgttaagttaaacttagttaaattttgttttgttttttgtttagttttgtttaaaaaaaaaaact

SEQ ID NO: 33989 - DNA, 662 bp, Setaria italica
  Peptide Sequence Number=SeqID_99963
ggtgaaacaaatgatcaaataaaatcaattatgccggattttgcgcaagtgtacagcttcttaggtagtgtttttgatccaagcacaagtggtcatctgcagaaacttaaggagatgaatccaattgatgttgaaacggcattattgttgatgaggaatctctccatcaatttgaccagtcctgattttgaagatcaaaggaagctgttgtcctcatatagcacttctggtggacttgagctagggagttccaggagttcagctctagcaacgagtgctcctttcatgatcaaaggcgaatagtgagaccaggtctctcggcatataatttcagttcgagagactctcaggatggtgctctgccatagcaccgatgagcaatgaaggcgcttgcacctttgtgcttcctgcgcttcaagccttcggctgaagattgtgtaagggtgcagctgtgacccatgtacactaggcttccgaaaggtgagattggtctgtggccggatgtgtatatataatttttgccctgaagcgtgtacccttcctatcctattggtacggtggtaccccaagctcggtcatataggttcctgaatgctccttcagttaaagaatgtccctgtccttagtaatggaaagaggaatggaaattttgagtaattgca

SEQ ID NO: 33990 - DNA, 469 bp, Setaria italica
  Peptide Sequence Number=SeqID_99964
cctctcacccatgcaaagcagcaacaacagccagctgttttgaattcagttcgtgttcctgcaacctgtaataatatacttcgattaaccagataggtacacaaaatatacttctgtgcactttagaacgagtggataaaccgaggaagcagcattcaaacccatatatgtggagataggatgtatctgtcagcagctccttttcatagaactgtaagcaaatttcattactgcgcttatgaacctctagaagaagatcattttcaggtgtcgactccctttgtagtctctgtttcattaagtcgtatatgtacagcaggtagtgtgtatcttctctagcatacttgatcatttcatcaggaagtggcctcgacctccagtctgcattttgatattccttctttgctgtcactccacaaaagcgaagcaataggtattctaggctgtttctctccatctgtaagaccct

SEQ ID NO: 33991 - DNA, 920 bp, Setaria italica
  Peptide Sequence Number=SeqID_99965
gctcagctattccttcaaatgcataagaatattcaagcgcattccaaacagtgtaagcaatttcgtcgagactgcgctcaacaaatggatatttcgattttactattctttttaaatgcccagtatctgtaggcatctgctttgctatctcaattaaagccttatttggcaatacatagccagtgctctcatcttcttgacgagctaaacgatctctccacccatgcaaagcagcaacaacagccagctgttttgaattcagttcgtgttcctgcaacccatatatgtggagataggatgtatctgtcagcagctccttttcatagaactgtaagcaaatttcattactgcgcttatgaacctctagaagaagatcattttcaggtgtcgactccctttgtagtctctgtttcattaagtcgtatatgtacagcaggtagtgtgtatcttctctagcatacttgatcatttcatcaggaagtggcctcgacctccagtctgcattttgatattccttctttgctgtcactccacaaaagcctagaataggtattctaggctgtttcactccatctgtaagaccctcgaagcctgtcctgtgtcaaaaagattgcatatgtaaatgtggaaatcccgttggagccacattatatcacgatccgcaccatgcattacctttctcttggttggatcttaaaaggttcttgcaagtagagaccaatgtatagtgcgaagcttaagagtgtccacaataaagtcttctgttctggttgaaatctgcatcaagcaggtcaaaccttgaaatgacctatattgattgtgctccaaatccacagcaaactcagttacacttctttctagtcttttttagtcttaatttcctattctaagtccttttgttgtattccttctaacctagt

SEQ ID NO: 33992 - DNA, 391 bp, Setaria italica
  Peptide Sequence Number=SeqID_99966
cgttgacttgttatttacaaaaatgatgtcttaattgtggcttcactaaagtcaaaacatccaaaagttatcaaatctagcaaaaaaaattctgaacaaaattatcagtagtccatagcaagatttggattctaacagccacaaatccatttctagggaaaagccatgttgcatgctaggcttgttcaaggcagaataatcatgcgataatgtataaagtatgctcttagttcttacagcaacaacagccagctgttttgaattcagttcgtgttcctgcaacctgtaataatatacttcgattaaccagataggtacacaaaatatacttctgtgcactttagaacgagtggataaaccgaggaagcagcattcaaaccatatatgtgga

SEQ ID NO: 33993 - DNA, 2637 bp, Setaria italica
  misc_feature (1)..(62): n is a, c, g, or t
  Peptide Sequence Number=SeqID_99967
nnnnnnnnnnnnnnnnnnnnnnnnnnnnnnnnnnnnnnnnnnnnnnnnnnnnnnnnnnnnnntttttttttttttacagaacaaagctgtttcttccaaagtcttctgtattcaggtgctacactataccagttttacagtataccactttgtgcaatgccagtattcacaagtgaaccacaacacatgtttgtctgtccggtaacccgttacatgagccaatgagatggcacttctcatacctgcatctaccgtcaatgttgggattctcacctatgagttagtcgaatgccaaaaattcagggaggcattcagagggctaagtaaaacagcccaagtttttgttctctacagacaatttctgcacaaggatggatgatcaatgctgggcgaccatattttcctttacttctgttatacatctgagcagctactggtatggtctatcatatctgttactagaaggcgggtaagattgccgtctcatcggattctggaaatttccttccttatttctaccaggaagtagtcctgttcctgtactttggcttattgattgaaaggtgggctcaaaaccagacaggtagctggacatctgcatgccttcaggttcataatggttccctacaacttcagtgctatatcctggaagctgtgggtagtaagtagcgttgctcagctgcatcgcttcattcatctgagttgattgaatccaaacattgtcactgtgcattccagtatttggataaaatgattccgtggggccaatagcagctgaatgtttcaccccatcagagaactgctggaaaggaaggacagaagatctaaagttctccacattgctcccaccctgaaactgctccttagaaaaccctccaaaaatttctgtctgtcttccaggttctgaatttcctaaagctcctaaagtgggtctcttcagttcttgagtagcctgctgatatctattattgctcaggacatccttattaattggtctggtaaggcctgacaaggtcttgaagttcttagttgatgtggttcgagtattgtcgtctaggtggatgctgtcgatcatggctgtttcattcataaaaccagccccactgccagaagcaacactgacatttgcagttgatgaaggagccacagaagactgatcagctgtaccaatattactcttatcactgtcaacatccaaaagagttgtttcatcactggcctgaacacttttcagtgccaactgttctgaccgttccttctttagttgctcagctattccttcaaatgcataagaatattcaagcgcattccaaacagtgtaagcaatttcgtcgagactgcgctcaacaaatggatatttcgattttactattctttttaaatgcccagtatctgtaggcatctgctttgctatctcaattaaagccttatttggcaatacatagccagtgctctcatcttcttgacgagctaaacgatctctccacccatgcaaagcagcaacaacagccagctgttttgaattcagttcgtgttcctgcttacagttctatgaaaaggagctgctgacagatacatcctatctccacatatatgggttgcaggatgtatctgtcagcagctccttttcatagaactgtaagcaaatttcattactgcgcttatgatcttcttctagaggttcataagcgggtgtcgactccctttgtagtctctgtttcattaagtcgtatatgtacagcaggtagtgtgtatcttctctagcatacttgatcatttcatcaggaagtggcctcgacctccagtctgcattttgatattccttctttgctgtcactccacaaaagcgaagcaataggtattctaggctgtttctctccatctgtaagaccctcgaagcctgtcctgtgtcaaaaagattgcatatgtaaatgtggaaatcccgttggagccacattatatcacgatccgcaccatgcattacctttctcttggttggatctttaaaaggttcttgcaagtagagaccaatgtatatgcgaagcttaagagtgtccacaataaagtcttctgttctggttgaaatctgcatcaagcaggtcaaaccttgaaatgacctatattgattgtgctccaaatccacagcaaactcagttacactcttcagctttttagctaattccatcaagcctttgtgatcctcaaccagcgtaaatggtgtatcctctaaatcagctggcttcaatggttcactctcaggaacatttctgtcaacaaactgttcaacaggcagtttttccagcgggtgaacacaccgggtgccgtcctcgctgcgctctagccagacatgctcgaacggtttgtagttatccactatgatcttgtacacctcctgcggccgggggatggtcggatcgtggaagggcaccttcgccttcgtccccggcgcgggcgcgcctcccttgtcctgggtcaacgcccgcaccgaccccgcaccgagaaaggcgccggagccagcactcccgccaccctcctggccgctggccctcttcttcttcttgtcatgcgagacgagctgggacccgtccccgcctcctcggggtcgccggcctcgcggcccggcgccgcgtcctctct

SEQ ID NO: 33994 - DNA, 156 bp, Setaria italica
  Peptide Sequence Number=SeqID_99968
cattgtattttctcctctacttttagttttgagggtattttgaaacttaccaaatgttcttatgtctctattttgtcaacggatgaccacctttgataatgactcttcactctggtcatacttcagaagatgccaacaggacaacagagcagcagg

SEQ ID NO: 33995 - DNA, 533 bp, Setaria italica
  Peptide Sequence Number=SeqID_99969
gacctgctttgtgctacagtccactcgtggcgtcaatgggagtagctataaactgcctacaatatacaccatttttgacgccacgagtggactgtagcacaaagcaggtcaaaaagaagcttgccgttgcgcagtacatggaacagggcaagcagggaatctacgcttcctgatcaccccatttctccttgggtatctcaccagagtcagtgattacaaccttcttcctcggcttgccgttgtaagtgccagcacccccttcaatggcgtacacggtatccatcctggatcaccctgccgaagacaacatgctccccatccaaccagcttgtcttgattgtagtaatgtaaaactgggatccattggagtcaagtccagaattcgccatagcaacaacgcctgcaacaccatgaggcagggatattctgaagacttctcagacagatgcttgtcagaagctcaaacaaatactcaagctttagccaaatttagtgtctagtgattagtgagtggcacctatgtaagagcccct

SEQ ID NO: 33996 - DNA, 382 bp, Setaria italica
  Peptide Sequence Number=SeqID_99970
acaacaggaaaaacactggaatggtagcatttggtgctgacaaataactcagaagatgcagctatacagtctttttgagctacattgtaactacatagtgaatcaaaccactcttttagtccctgctgtaaatctaaaatgtcattgacttccttattcttcgaagttgctgattctttaatatggtgtgatcaacactgaagaaaataatggtagttttccttgaaaataaaacagaaacttagtggatactcataaataaaagcttcacgcaaactggacaatgcaaatactagccaaacaacctgacctggatgagtatgttttacagtgaaattctcatctgggaagatgccacttagggtaaagtaattagtaccta

SEQ ID NO: 33997 - DNA, 491 bp, Setaria italica
  Peptide Sequence Number=SeqID_99971
cgtacacggtatccattccctggatcacccgaagacaacatgactgctcaatatcaaccagcttgtcttgattgtagtaatgtaaaactgggatccattggagtcaagtccagaattcgccatagcaacaacgcctggatgagtatgttttacagtgaaattctcatctgggaagatgcctccatatatcgactcacttcctttcccatcacctctaactatgtcaccaccttgaatcatgaaaccagggatgatgcgatggaatggggttcctttataatgaagaggtttgccattggacccaacacctttttcacctgtgcaaagggccctaaagttttctgcagaatgtagaataaagaaaattagttgccaaacgataactcatgaagaatatttttcttcggatacattactaagaagttcactttggcaggataattggaagaagttgtgaaacagtgaggtcattcttagcacaaaaagaattt

SEQ ID NO: 33998 - DNA, 1153 bp, Setaria italica
  Peptide Sequence Number=SeqID_99972
tttttttttttttttctacttcaaaaaaaaaacttcaagtcaccagaaacgtaattcctgtgtaacagcagaaaaccccatcaaggtagcagttagagcaggctaaaaccttttttgaaagacgtgtgtgttctcaccctgcagcatcacaaactaaccgatcagcgtcaatgggagtggctataaactgcctacaatatacaccatttttgacgccacgagtggactgtagcacaaagcaggtcaaaaagaagcttgccgttgcgcagtacatggaacagggcaagcagggaatctacgcttcctgatcaccccatttctccttgggtatctcaccagagtcagtgattacaaccttcttcctcggcttgccgttgtaagtgccagcacccccttcaatggcgtacacggtatccattccctggatcaccctgccgaagacaacatgctccccatccaaccagcttgtcttgattgtagtaatgtaaaactgggatccattggagtcaagtccagaattcgccatagcaacaacgcctggatgagtatgttttacagtgaaattctcatctgggaagatgcctccatatatcgactcacttcctttcccatcacctctaactatgtcaccaccttgaatcatgaaaccagggatgatgcgatggaatggggttcctttataatgaagaggtttgccattggacccaacacctttttcacctgtgcaaagggccctaaagttttcaactgttttcggaacaacctccccgtaaagaccaataacaattctgcctatgtgttggccatcaatttctacatctaggtagaccctatgagtaactgctggtaactgaacctctgcaatgctctgacgacggaagtaggcggagaaggagaaataaattgcggcgcaggcgaggaaggcgacgaccaccttccgcagcatcgcgaggcccaggtggcgcaggcttctacctcatcagaatcgtcgcgagctcctggcgaatccggaagaggttgctcgggatttgggggttccacggcggagacgagcaagatcggcgccgaaccagatttccagaagccccaccggctggcttcgctccgctagtccggtagaacggcctcggcttcattctctttcttttaattt

SEQ ID NO: 33999 - DNA, 503 bp, Setaria italica
  misc_feature (413)..(503): n is a, c, g, or t
  Peptide Sequence Number=SeqID_99973
cggagaacagtgagatcagcctgctgaaagcgttggctcatcagcctgtcagcgttgggatagctgcagggagcagggacttccagttctacgaaaggggggtgtttgacggggcttgcagcgacgagcttgaccacgcgttgacggccgtcggatacggctcatcgtacggccaggattacatcgtcatgaagaactcatggggaagaactggggagagcaagggtacgtcaggataaagaggggcaccgggaagccggagggcgtctgtgcaatctacacgatggcttcctaccctgtcaaaaatgcaacacgctgggggtgggggcctaattttgtaaccaatcttgtaatctgcacgaaagcaacgcgctactcaaacaatatgttaatcaatcgttggttaaaccctnnnnnnnnnnnnnnnnnnnnnnnnnnnnnnnnnnnnnnnnnnnnnnnnnnnnnnnnnnnnnnnnnnnnnnnnnnnnnnnnnnnnnnnnnnn

SEQ ID NO: 34000 - DNA, 371 bp, Setaria italica
  Peptide Sequence Number=SeqID_99974
ggggtgatttatttttgttcaagagaagaactatgtagaacaaggatcaaggaatagagtttggagaaaaggaaataggcgtgaaatgtgtgtggtccaacagaatgggagtaactgatgggaaaagccaaataataagcagacgtggagcaggtagtatcaatatgaatgggaagaacatgcatccaggaatgaagcatgaggatgactggcctacgaagcagactggcgccggagcaataatagaaacagagcagcaacagaaatagaaaaaaggggaggactggagaaaccatccaaagaaggattttgattagccgatgctttagtttcaaagaaagcattggattatgtagggctaatggctcatt

SEQ ID NO: 34001 - DNA, 442 bp, Setaria italica
  Peptide Sequence Number=SeqID_99975
aagaactggaaatcaaacatatatttttttccttcaatcttcaaaagagcactatagagcacaaagtatgctgtctgctacctaaaaatgctgaaactgtgtgcaaaacaaggattttgtttgctaacttgttacaagaagtaccagaactatcacaatttagcatcagcttatgaacacagtggaaacccagcacaacaactactatcactacattactactgcgggcagctactattactacattactattgttaccgcagctagcaagaataacaagttgatatacacatacacacccaattcaaatgggggctgctataatagcccctgctgcacctccactggcaaggagcatgcacgataccagcacaccagcggcaatggtgcaggaaaccattggcaccggtccgtcctttggtaaccttaatttaaaacttaa

SEQ ID NO: 34002 - DNA, 247 bp, Setaria italica
  misc_feature (218)..(218): n is a, c, g, or t
  Peptide Sequence Number=SeqID_99976
ctgggagcggaactttacgtatgatgggaggagaaattctgggaaaatctgctcttttcatccgtgggctcgtgaatggaatccagtggcggtgataagcccaccgcaacagatgctactgagtcggtgctgggtttagatggtgaggagactctgtctgagagggaatctgttggtgcacggcaaggccctgtcttgcctaatgggggtggaaaggnggctccttcaagcagttcatctgcgggga

SEQ ID NO: 34003 - DNA, 217 bp, Setaria italica
  Peptide Sequence Number=SeqID_99977
ccgcggctcggcggtgcagccgcggaggagctcggcgccgccgagccagacgccgaagatgcggtcgaattggacgccccggcacgtggcacgccactcgagaacggcgagcgagatcgccgacgcgcggctgcccgcggccgacaggcatggcggcggcgtgtaggcggccgtggcgggggcttgttgtaggtgtaggcgaaggagtgggagagga

SEQ ID NO: 34004 - DNA, 257 bp, Setaria italica
  Peptide Sequence Number=SeqID_99978
aaccggttcaccttgttgagctgcgcgtccagccgcgcgaagaactcccgcgtcgccgccgcctcgttgtcgtcggcggccgccagtggctccagcagctccgtctcgtactcgtccccgccgcctctgctcgccgccggccccgccagcttccggcggtgcacgtgtatgactccgtgatccttgggcgtgctggaggagccaaagagaccggcagcatggagccattgggacagggaagcaacaacacgttccgc

SEQ ID NO: 34005 - DNA, 296 bp, Setaria italica
  Peptide Sequence Number=SeqID_99979
caaagttccctttgtatcgaccaataaaacaaggctcccaggcctcgtagaaatcccagttttgaagatcataactatcttctggcacagccttctcccaccatgattcgcccttcacgtttacggcgactaccgtaaaatcaatggtgatgaaatgcagaaggccatcgaagaagacactcggtgaaccttccaataagtgtgtttcttcttcccactcactctccgagtaactccatgctccagtttctgacgaatagatctccacccctgccacgcacccatacccctgctca

SEQ ID NO: 34006 - DNA, 648 bp, Setaria italica
  Peptide Sequence Number=SeqID_99980
tattctattctaccttgtctatttggttttcttgttctagtctattcctaattaccaataccaaatccaatcgccgggcatcctggcgttagttcattagggcttttttcaatcgggggttatgttattttatctttcctttttgtctattggttaattggttcccctgaatgttttttgtttgtatagagagagaaagagagaggagggtgagggaggagggcaggagaaatagatgaatcagagtggttgttgcattgcaattgcagttgcttgcaagttaggtaggtgagaaggagagctaaaccagcagcagagggagacagatttagagaagaaaactttgcagctagtcagtcagtcaattagaagaaaagtgtttcagcaagtgaaagcggagtttgttggtttgctaattagaaggaagattctgtcaggtcaggtagtagctatcacccatcaggatttgaaacttgaagagagggggacagccatcatccatcatagtctgtatttggagcttggtgtactgaactctgaaaattctttttgcagttcatctatgtttagggattgataagtgttgtttggtttcttctatactagtagtgctacattttagtcaataattatatgagaatctctttt

SEQ ID NO: 34007 - DNA, 852 bp, Setaria italica
  misc_feature (800)..(852): n is a, c, g, or t
  Peptide Sequence Number=SeqID_99981
tcgcgggcttggtcgtccttctccttcctgccgtcgttcttcacgggaataatagaggggagaaggacgccgagaaggcgatgaggctcaaggaggagctcctcaccgccatcgcgccgctcgaacgcggcgccgaggccacgcccgaggacaaggagcgcgtcgagcagatcgttcagcaattggaggcagtgaaccaggtgaaggagccgctcaaatccgatctcctcaacggcaaatgggagcttctctataccacctccacaagcatactgcaaccacagaggccaaagtatcttaggccatttgggaagatttaccaagcaatcaatgcggacaccttgagagcccaaaacatggaaacgtggccttactttaatcaggttactgccaacttggtacctcttaatcctagaagagtggcagttaagtttgactacttcaagatatttagtttgatcccaatcaaatcacctggaagtggtaaaggtgaactagaaattacttatcttgatgaagagctcagggtttcaagaggagacaagggaaatttgtttgtactgaagatggtcgacccagcatacagagttccattgtaataatcttaaacgatgccgctttttgcagtactgtcctaaaaaagtacatcactatatatttactaggtgtcagctctatgcgtaacattccctgaggcaacgtgatgcatgtaaatattgaagattctatttgatacgtacataggaaacccagttggaaacggttgcagggcccaatacttaagcatagctcaaaaaatnnnnnnnnnnnnnnnnnnnnnnnnnnnnnnnnnnnnnnnnnnnnnnnnnnnnn

SEQ ID NO: 34008 - DNA, 1191 bp, Setaria italica
  Peptide Sequence Number=SeqID_99982
aacaacaaacgtcggctccgcgtcctcctcctcatcctcggcgtcgtcctcgtcggagccttctccgggagcggcgggcacgcgtggtcggcgcccgtgtcgccgcgccccgagccgccggtgctcgtcataccggcgcgcgcgcggagcaagcgctcccgcccgtccgcgttcactggcgccgcccgcgccgcggaggcgcccaccatcctcgtgccgacgcccatgtactcgtccacctcgtcgcactcggaccccgagagcattgccgagtccaacccgcaccaggcgccacccatgaagaagaagaagaaggccaagaagccggcgccccccgcgccggccgcctctgacgcggaaggtgacaacgacggcgacgccgactatgaggaaggcggcgagcgctcgcagcctcagggcggcgctgtgaggaggtgcacgcattgccagatcgagaagacgccgcagtggcgcgcaggtcccctgggccccaagacgctctgcaacgcctgcggcgtccgctacaagtccgggcgcctcttcccggagtaccgccccgcggcgagccccaccttcgtgccgtccatccactccaactcccacaagaaggtggtggagatgcgccagaaggctgtccggaccggcgatccgtcgtgcgacctcctgcagttcatccgccgccgggattaatcggcgtcgtcggtcggtcggtctcgtcccccttagctatatatgtatacatgttagtatgtatgcatgcatggttgcttcatcagtcgtcagtcgtcgtcgtcttcatcgtggtcatcaccaccaccgccatggatccatccatcatcacctgcattggtttctgtcagcatccatccatccaatccatcgccgggcatcctggcgttagttcattagggcttttttcatcgggggttagtgttattttatctttcctttttgtctattggttaattggttcccctgaatgttttttgtttgtatagagagagaaagagagaggagggtgagggaggagggcaggagaaatagatgaatcagagtggttgttgcattgcaattgcagttgcttgcaagttaggtaggtgagaaggagagctaaaccagcagcagagggagacagatttagagaagaaaacttttgtctagtcttagttcttagtttcttagtttcttaaa

SEQ ID NO: 34009 - DNA, 569 bp, Setaria italica
  misc_feature (10)..(10): n is a, c, g, or t
  Peptide Sequence Number=SeqID_99983
tccatcatcntagctcgacgcctcagtcttatcaggaatgctgattatatagcagtaatggaggaaggtcaacttgttgagatgggtacacatgaagaattgttaaacctcgatggtctttatgcagaacttcttaggtgtgaagaagcagcaaaacttccaaagaggacaccaatcagaaactacaaagagccgacttccttccaaattgaaagggattcgtcagcaagtcacagctttcaagagtcatcttccccaaatatgtcaaaatcgccgtcacttcagaaaacacatggctttctcacattccgaaattcagatgccaatcataactcgcatgaatcaccaaatattcaaagccccccttcagagcaaatggcagaagccagacttccaatggttgcttctgagagagctccatccatcaaaaggcaggacagttttgaaatgaaattgcctgatcttcccaaaattgatgtcccgctgcaccgacagtcctcaaatacatcggacccagaatcaccaatatcgccattattgacttctgaatcccaaaaatgaacgccccc

SEQ ID NO: 34010 - DNA, 266 bp, Setaria italica
  Peptide Sequence Number=SeqID_99984
gcaaagcaggatctgcaaagatcatcgggacgctcatgtcgttcggaggggtgcttctactaagtctctacaagggtgttgccgtgacacaacagagcactgctgctgcactgagctcatctcaccatgcagcttcctctcaagtaggtattgacaagaagagctggatgctgggaactgtatcattgctggcaaactgcctgttcttctcctttgggctgctgctgcaaagccggctgacaaagaagtacccggcgctctactcc

SEQ ID NO: 34011 - DNA, 260 bp, Setaria italica
  Peptide Sequence Number=SeqID_99985
ggtacatcgacccggagtactaccggctgcaggagctcaccgagcggagcgacgtgtacagcttcggcgtcgtgctgcttgagctcgtcaccggccggaaggccatccaccggaccagccaggacggcagcgggtccccccggaacgtgatcgagttcgccgtgccggcggtggagacggggagcatcgccaggatcctcgacgaccgcgtgcccccgccgcgcggccacgaggtggaggcggtggcgcgggtggccaag

SEQ ID NO: 34012 - DNA, 473 bp, Setaria italica
  Peptide Sequence Number=SeqID_99986
tcagcgagcaccaccaccaccgcctcgggggccacggacaggcgcccctgacgtcgctgtcgctgcacgagcccgccgaggccgcgtcgatggcgctgcaccaccaccagctcggcggggcgctcaggcagcagcaccaggcggcggcgtggccgccatcgcagcagcagggcgcgtggcacctgcgtggctccaggttcctgcgcccgacgcagcagctcctgcaggagttctgcggcctccccgtggagaccgccggcacggccaccgctcccaagccaccgacgacgaagccggcgagcgaggacggcgccggggagggatcatcggccccggcaccgtcggcgcagatccaggccaaggacgccgccgagatgcagcggctcaaggccaagctctacgccatgctccaggaggtggagaggaggtaccggaggtaccgcgagcagatgagggcggtggcggggtcctta

SEQ ID NO: 34013 - DNA, 332 bp, Setaria italica
  Peptide Sequence Number=SeqID_99987
tgtaaatgatgtggcagactcagttgcatcatgtttaaatattttgctgggaccatttccagaagaaaacaatgatggcaattgtggcgaggatcataatctcaggaaaaggtggctggaggtctttttatttaagagatttggctggaagtggaaagatgaatattcccttgatctaagaaaatatgccattctccgtggtctctgccacaaggacttgagttactaaccaaagattatgacatggatatgccacatccattcagaaagtcagatattatcagtgtcgttcctatctacaagcatgttgcatgctcatcagctgatggccg

SEQ ID NO: 34014 - DNA, 4671 bp, Setaria italica
  Peptide Sequence Number=SeqID_99988
atgaaaataatgatcacaaaggacaaagcagatgcaagtttcaagttagatgttaagttggatggaagtcaggctccagggatgtctcctgatgagcttgctaggcgaaacttgttgaaaggcatcactgctgacgagagtgcaacagtacatgatactgctactcttggtgtggttattgtaaaacattgtgggtatacagctgttgtccaagttccagtagatcctgatctgacaactacttccctagcacagcaggacatccacattgaagaccagcctgagggaggtagcgatgctcttaatgtcaatagcttaaggatgctgctccataaatcatgtgctccatcatatggaggagttcagcggttgcagggctgtgatcctcaagacaatgagactacccaaagttttgtgcggaagatactgacagacagcctggagaagcttgaaagtgaggctccaatggtaacaagaccgatcagatgggaacttggtgcttgctgggtacaacatctacagaacccgacttctgagaagacagaaactaagaaaagtgaggagactaaggatgttcctacagtaaagggcctgggtaaacaatttggtcagttaaaggagataaaaaagaagactgatgacaagagtggaaaaggagcatatgcaaaagaaaacacttcacctaatacagataatgcatctacagacaacactaccagtgcaaaggaggataaggagactgttcttcagagactgctttcagaagctgcttttgaaaggctaaaggaatctgaaactggacttcatgctaagtcactggatgaattgattgagatggcgcacaagtattatgatgatactgccctgccgaaattggtagcagactttggttcacttgagctctcccctgttgatggaaggacactgacagattttatgcacactaggggccttcagatgcggtcactgggacgagtggttgagctttctgacaagcttccacatatacagtccctgtgtatacatgagatggtagttcgagcatttaagcacatacttcgggctgttattgcagctgttgatgatgtaaatgatgtggcagactcagttgcatcatgtttaaatattttgctgggaccatttccagaagaaaacaatgatggcaattgtggcgaggatcataatctcaggaaaaggtggctggaggtctttttatttaagagatttggctggaagtggaaagatgaatattcccttgatctaagaaaatatgccattctccgtggtctctgccacaaggtaggacttgagttactaaccaaagattatgacatggatatgccacatccattcagaaagtcagatattatcagtgtcgttcctatctacaagcatgttgcatgctcatcagctgatggccgcaccctgctggagtcatccaagactttcctggataaaggaaaacttgaggatgctgttaactatggcgcaaaggctcttgcaaaacttgttgctgtttgtggtccttatcacagaatgacagcaggagcatacagccttcttgcagtagtgctttatcatactggcgacttcaaccaggcaaccatctatcaacagaaggctttagatattaatgagagggaacttggacttgaccacccggatacaatgaaaagctatggagatcttgctgttttctactatcgtctgcaacatacagaactggccctaaagtatgtgaatcgtgccctatatcttttgcaccttacatgtggcccttctcatcctaacaccgcagcaacttacatcaatgtcgcgatgatggaagaagggttgggtaatgtccatgttgcactccgttacctgcatgaagctctaaaatgcaaccagcgtttgcttggcgctgatcacatacagactgcagctagttatcatgctattgctatagctttgtctttaatggaagcatactcgctgagtgtccaacatgaaaagactactctgcgaatacttcaagcaaagcttggatcagaagatcttcggacccaggatgctactgcttggctggaatactttgagtctaaggcactagagcagcaggaagcagcacgtaatggtactccaaagcctgatgcttcaatagcaagcagaggacatctgagtgtatcagatcttttggattatatcaatccggatgatgaactcaaggttaaggaaatgcaaaagaaacaagcccgtgctaagatcaaaggccgcactgggcaaaacccatctgacctagtcgacgatgaagatcaaaggagccctccacctaacaatgataatttattaactgagaaggaagactctggaatcaaagagaatggaacctttgttgagcatgtgaaagtgaaagatgaaataccaagtgacactgcaaaccacatacctcaagatgattttactgaagagtacgcatctgatgaggggtggcaagcagctgttccaaagggacgatctacagggagccgcaaaactggtccaggcacaaggaagcaaaatctggcgaaaatcaatactaatgtgtttcacagtgagaatggaagatataaaggaaggggtccatccaacttctcttcccctcgagtttcccctaatgagactgcagctcctgttgcttctggtcctcttgcaaagaaattagctaagaattcgagcttcaattccaaagcagttagccctgctgtctcatcaagcagtggtgagaattcttccaatcccaactccaagccagcaagccctgccattactgcagctgctgccaaggtgataccatccacagcaccagctgccagtcaaactgtgaggaagtcactttcatacaaggaagtggcaatagctgcaccaggaactcttgtcaaagcattaagtgaggtacatacagaagaaaaggatacaattgacaaaggtgcaagtgttgagagtgctaagcctccaaaagaaagcaatgataacccttctggagagaaagatggagcaacagaagtgtcaaaaaagggtgacacttcccaagtatcaaaatcaacagatggaggtaaatctgagccaactgatgttttgcttggttcaaatcaaccagagacagaacacaaaaagacctcagatgcagcagagacatctgtagtgaagaagaacacagatcttgctgcctcagtcacatcatctgcaacacaaactgaggctgacgtcccaaatgcaggagcgccaactgtaattgaggcaaacgattcttcctccaatgatgaaagagatgtaggagaggatacaccagaacagctgtcaagtggaggggaaaatgagaaatcttccgcatctgagagtgaaaagaaagagacaactagtaaactttctgctgcggcagctccattcaatccgtccaccgtaccagcttttggttcaatggctgtaccaggtttcagagaacatggtggactattgccatcaccagccaatgtaccccctatgttgtccatccctctacgtaagcaccctcaccaatctgcaacagcaagagtcccttacggtccacgtctggctggaggttacaacagatcggggcatcggggacctcgtaacaagcctatgttgccaagtggtgaagcacctacagaaacaaacacatctgcgcccagagttatgaaccctaacgctccagagtttgtgccaggccaatctcggagtcctaatggacaaccagcatctccaaatggtcctttaacatcaccaggtggtattacatcttccccacagggccttccatcctctccagatagtactgtagaatcaccggtaactgcatccccacaagtttctgaatgtagccagaccagtcctgaaggaaatgatgcatcttgcggggtcaatgttgaggctgggggtgaaaagcagaacacagacgacacgaaccacacagaaagtaaagatggaaaagtggagcctgaacagaccacagctcctgaagttgcagaagaagcagtgacagcaaaagatgttaccgaagagccgattgcaaccgagcaacccaaatcctgggcagactacagcgatggagaggttgaggctgttgaggttgcaagctgaggaaagtaaaattttatttcttaaacagaggagcctttcttctcctgaataaagcatgctaatgcaaaccgagatgctgcctttttggatagagacttaattgcctttttttgacccatttcatggtgtctagtatctgctgaattcttctgcagttcttctaatggcattccatgatctttggaacttggaattttgaagattttccagacgtccatcatggtgcccttgttttgtcctgcttttttgctgtgaagaatcttgggaagaacacctcgaagtatcaacaagagagatacattgttaacatgccgccgtttccacagcttggcataatttttgttccctttgtgaatgtactgtcgacttaacatcttaatagttattttttgataaattagacttgttgaactacgtaataatatgtaaagaaagatgcgttaccattttaaaaactgtgtacttggtaatcccagactgtaataagacaacaattacaagaataggaaacaagaaagaaaagttttaccttaatttagtaaattaccccta

SEQ ID NO: 34015 - DNA, 1506 bp, Setaria italica
  Peptide Sequence Number=SeqID_99989
gccgttgaagaaggcaaggaggaacggggaggtcgagaaggggggagttggtgccggagcggcagaggaaggaaaagtcttctgggaacagcgccaggaagtcgagcaaggatgaggcttgagccaggggagattgcgctgccagaaaaaaggcgggatggcaagtcccaaaggggcgatgataatggcaggaggccgagttcatctgtccagaaaggctcattgcgggattctgatgaggagcctggtgaaattaagccagagagcagcaacactggcagtgtgaggaagagccggcctgcagagcctcagagcattaatcacaagcaccaagctgatggctctgatcaatcaggctcaaaaagtcgcaggaagggagaagggaggagttcgtctgctgggagacatttgtctggaagaaatcgtgaggtctcaccgccagcacgggatcggcatgataggcacgagaggagcccgggcatcttgggccgttttcctcatgatcgctttcgtcatgacaggtacgacaggagcccgagccgcttggagcgctccccacatcgagagcgtgttcggcactatgatagcagagaccgcagcccatatatttcacctcgacatagagctcgtcagccccacttcagggataacacgccaagtcgtgttgaaaattcccctcgtgggaggacccagcatgaggatttcagagaccgtagcccatttcgtcatgacagatctccttctgaacgttctcgggctactgacaaccatgaagcaatcaagaagaacagaaatggcagcaactcagaaaagctacagcacaaaagcaaatcagtgaagcaatcttcaaagaccaagagtggtagcaatgggaagactgaggagaaaatctccaaagaaaaggcaattgagagcgctcagtacactgagctgccacccccacccccactaccacctccaccaccgcctccgccaccgccacctccacctctgccaccggtcgtaccgcctcccttgcctccaccaccagaaccggagccaaatggagttcttgccgaagatatgatagaagacatggatatctgtgacaccccacctcacactagtgcggcacctgaacccttggaacaaatttgtgatatgggtaggtggttttaccttgaccacttcggtattgagcaaggaccttccaagcttgttgacttgaagaaactggtggaagatggatatctcctttctgatcatctgataaaacatgctgatagcgatcgatgggttactgttgagaatgcagcttcaccacgggtcccatccgacatcccctctttatattcagatgcttcaacacagctggttagcccaccagaagccccaggaaatttgcttgatgaagctcttgaggcagcttctaacttggcatcaggtgctgaaggaaaaacaaatggaggaagcttctgcagaagatagtgaagatttctatattgatgatagggttgaagcactgat

SEQ ID NO: 34016 - DNA, 354 bp, Setaria italica
  misc_feature (290)..(354): n is a, c, g, or t
  Peptide Sequence Number=SeqID_99990
agtacctagccccaactgcaagttcgtgcagccgctggcgccaaccacgccgcggggggccatgccgcagccgccagcgcatcggaggctccatgccgccgtcaagccgctggagaccctgagcctcctacactaggcgcgcgcacgccaccgccagcagatgattgtagaaaggaaaaccctagttgagtagtggtgcatgggttagtacctggcaacctgggcatgactggctaagcagcatgttaatcatgttataagcataaaaacggtgagatggccagttgacnnnnnnnnnnnnnnnnnnnnnnnnnnnnnnnnnnnnnnnnnnnnnnnnnnnnnnnnnnnnnnnnn

SEQ ID NO: 34017 - DNA, 158 bp, Setaria italica
  Peptide Sequence Number=SeqID_99991
atcatgcttgatcagtttcagtatggcagtctgatctgtgacatacccgcccctccaagatttgataacaatggaagacaagggtgcctttgctttgcataccagctgtgtcaatgccttggtacgtgaggttttgatgcatattgactatttaagta

SEQ ID NO: 34018 - DNA, 127 bp, Setaria italica
  Peptide Sequence Number=SeqID_99992
atggttacaagagtcaggcaatctattggtactcttcgaggaaacaggggagaccctttgcagatagttttggtgtaatgagcctccagcgatatctgaaaagggtctcccctgtttcctcgaagag

SEQ ID NO: 34019 - DNA, 646 bp, Setaria italica
  Peptide Sequence Number=SeqID_99993
cggacttcatgcatgattcaaggcttcaagcacatagcacataactctaggtgactatgtgcaagacactagcacctagtggacacagcatgataaagagattttgaatgaaaactttgttataggaagactgtggccttcttatatctataacgtagctcataagtaaacagtatgaatatacacgagtgaacagaaatgaaagcaaaagcatctgaatcacaacaaaaaaaaatgtagaagaggctgaaattcaagcttcatcatgtcataagagttaaaaaaatcaataacactagtcacttttacctgatatgtccaaagtgaattagtgaggtctatatccccatttgacaaaccagtgagttttacttgacctctaaatccagctccatccttctccaagaaagcaccgtaattcttgcggatgtccaatcattatgaaacaagaaacattttcacatctcatgcctgatgatcaagcatacaaacataacaaaaaagaaatgtggacagagaacaaaatgaaatgatgtatcatattagatatgattaattagtttgtacattattcaattgagataatcaacataggatactctcattagtgtaaacaccaaacaagttgttaacaacgaataactat

SEQ ID NO: 34020 - DNA, 2099 bp, Setaria italica
  Peptide Sequence Number=SeqID_99994
aaacgaatagtaatttgagactgagggaatactatctatgcataaacatcagaactatgaaaatggctgatgcctgagaatataatgatacgcagctcttctgcgtattcgaggaaaaaaaggatcggaactattgctaaatgctaatctattaaagttaagggtcaatgcctcaatgccagagtagtaagcgattaatcatgtccacataggctttggcatgctagaaactacacattaagctcaaaagacaaaggaccgtagattacctgcaagccaacaatctccgacaacagtgtcaactcattaggtccttgaaccaattgaactggttgattcagtgagacccaatgaccaaccttactacctgcaagcttcccatttacaaatacacgtgctacatcacgaatttggtctatggttattgatggaagaacgcctttggaattccaatatgcaacatcctcatcagaaatgttcacactcgtagtatatgaaaggtagtcagagatgtcttttgtcacatttaagtgctctaatatcccctgagcagcaaagctgccttcaccccatttaccaataggctctttagaagtccaccaagtacttgagagatatggaccaccaataaggggtagactcctacgcttatgtctacttgaataactgggggaacctgattccacagtaaaaattgaagtctgtgtaccaaccctagctgtattaaaagccacattttcacagtctggtagtatgctcacagaccatggtggtagactataagattttccaaaaatccagactgaaacatatttatgttcatcaatgttggccagaaaagctgagcaaatctgtccatttcctgaaatgcttccatttgtgtggacttttgcactggaatatacatgagcctcttgcatgggccctaacttcacatattggggtgaaccatctactgcagtaagagctggttcacaaagtttaatagccgcgtgtagatctttcaaatgcccccacttaggttgccttaagataccatattcatcaattggcgcatcataatcatagcttgttatctgacgtggaccaccagctgttcgctcaaaatttgttccaccaaaatacatgtaataattttgcaagcttccaccacgttgataaaatcgagcaacagcaaaagcactgtcttgaacaggcctatgaggcaatggttcaccccagtctgcataccatccgtcccaatcctcagtccatattgtcggcttgttgtaggaatttggtttaaatccatcgcagtaaaaggcattgcatgtatcgagaatttgttcgggtgcatctgtttgcctacacatcacccaaggaacaccagtatcaagtgcaagtgccatctgagctgcccatagcatgtatctcttccctgcttgaccatagcgtccttgaatgttaccgtattcattttcaatctgctgtagtataatgggaccaccttgccatgaataaagtttctcctctttcatgatatttacaatttttgtcacaaaagtctgcatttcagccttgtacggttcattgtcagtacggaattctataccaggaatgtcacgcagccaaactgggaaacccccgaaattccattcagcacaagcatatgggccgatacgcagaaaaagaaatagaccttcagcagcaaccagcttggcaaacttgacaatatcaaatcttccttcgaagtaatactggcctttgaccggctcatgcccattccaaaagatatatgtctcgattacatccgcgccgccctccttgcactttgcaatcagactcggccacatctcgggcgtggcgcgcgggtagtggagccccgcggagacgagcatcctccgctccccgccgaggatcacggcgcggtggtcgtaggtgacgttgaacggctcgaagaaggtcccgccgccgccgccgccaaccacaacctgcctcagcacccccgccgcccgtaccgaggccggcgcggcgaggcagccgaggcagaggaggatcgggagcgccagaaaccgcggaggcagcggccaccgcgacggcggggagggcgagaaggcgac

SEQ ID NO: 34021 - DNA, 1524 bp, Setaria italica
  Peptide Sequence Number=SeqID_99995
tagaaaaaggaagcaactttattctttcccttctttcttttcaatcccccaagcaggtgattgtctttacatacatgggtgcaaaagaagaggtcacatacaacgacgcagaaatgctccgccaaggctgtagaaacgctccctgcaaccacagttctcagggccaaactacagtatcctgatcacatatcatctcgagattctttggtagccaatggcggggagcactcggcctcaactgccaaatcctttacgacttttcggcatggatcgccaaatacatcgttggtgacactgatggaacatttgttctggccgacacatgcctctgtaaccaaatccagagtagtcgatgcatggcaattcccgacagagaagttctggcaactacctgaaggggttccgtaactcgcaaatgtaatcttcgagatcacatgcccctcatcacactgtaagtgaagctccggtgctgccgtattcacagaggcacgaccgttggcagcacgtgaccaggaataaagggggggataataagtctcggatatttttgagcagatagttttggtgtaatgagcctccagcgatatctgaaaagggtctccccctgtttcctcgaagagtaccaatagattgcctgactcttgtaaccattcgcgtggtatatggtaccagctttgcgaagccattccacaattcgatcggcacttgctgtcactgtatgctcctgcgtagttgcatgaggatgggcacccagactctggcgctactatcgaccagtagcgcccaatgagatgcccattcacccaagcctggcccttgcccatgctcccaagaccaatggcaacagggtcattaccttccggtgcatcaaacattgtcttgaaccatgtgaagggtgtctgcttgtcatcattctgcatgctactccacttagcatatccttggttctcagaagaatagattctcgaaaactcacctttcaaaccaatctgatatgtccaaagtgaattagtgaggtctatatccccatttgacaaaccagtgagttttacttgacctctaaatccagctccatccttctccaagaaagcaccgtaattctgcaagccaacaatctccgacaacagtgtcaactcattaggtccttgaaccaattgaactggttgattcagtgagacccaatgaccaaccttactacctgcaagcttcccatttacaaatacacgtgctacatcacgaatttggtctatggttattgatggaagaacgcctttggaattccaatatgcaacatcctcatcagaaatgttcacactcgtagtatatgaaaggtagtcagagatgtcttttgtcacatttaagtgctctaatatcccctgagcagcaaagctgccttcaccccatttaccaataggctctttagaaggtccctacctaagttactttgtagtagtattattggtaacctaaccaaataaaaggggtaaagaactaacctaaacgaacttaaattaagttaactaa

SEQ ID NO: 34022 - DNA, 417 bp, Setaria italica
  Peptide Sequence Number=SeqID_99996
ggtggattgaatgggctggcattgaagggttacaagggctgaagaggggcggcttagaggaaaggtggtctctagggacactgttctattcccggatgtgccaaaagggtcaacgatcacgcattgcattgcgttggaattgtgatacggtagctgcagatgtaaagcaggtaatatgcacgctttgagaaatttaaaatggtctttcttcttgttgtaagctcctttgtatgagttctgtgcttgcttaattcattgaattgagtaactggcaatcgtaggtggtgtcatctgtgattaatgtttctactagtggtatgatgtgaattgttccttctttacaaggatcagactagaggtcagtagattgctaagggataagttgctgcattaaatttaactactcacactgagtcg

SEQ ID NO: 34023 - DNA, 497 bp, Setaria italica
  Peptide Sequence Number=SeqID_99997
cttggggcaggttaagggctatgatccagactctgattcgtggagcgcagtggaggggctggagagagagctgccaaagtttttgtgcggtgccacacttgccaatgttggaggattgctgtacttggtttgggaagggaagtggaaagggaaaggaaaaggtaagggggaagtgaggagcatggtggtgattgaatgggctggcattgaggttacaagggctgaagaggggcggcttagaggaaaggtggtctctagggacactgttctattcccggatgtgccaaaagggtcaacgatcacgcattgcattgcgttggaattgtgatacggtagctgcagatgtaaagcagccaaaaagttgccactcagtcgctgttatctcgactgaccctccaggactccattcccaggctcaaggagtaggtcgcccaaatccacaactgcatcaggttccaccaccaccagtgatttcaagcgatatggtacatacttct

SEQ ID NO: 34024 - DNA, 806 bp, Setaria italica
  Peptide Sequence Number=SeqID_99998
tatatagtggactgatgatgttaatgtttgcaactatactggcatcatttatccagcatccttgagcaagaaaggcagaaacaaagtatatttctgtttgatttctcggatgactggatcacagagccatagatgaacctatttatcttcccttgcactgaatttgcagtcttcggcaaaattccaatagatcggtacttctaaagttctgatttcttcagttagctgcactgcagcctgcatgctagaagttagctagttctttttcactgacatgtccttcatgcatttctgagccagccaaaaagttgccactcagtcgctgttatctcgactgaccctccaggactccatccccagcatcaggaagtagtgcccaaatccacattactgcatcaggttccaccaccaccagtgattcaagcgatatggtacatacttctattggcttttcagacatgctgggtagtgctacttcaagagctactgcttcgccaggaacacaattataagtgtgatctctttatgcgaacgggtttactgcaatgctcatatggtatttagatttaagctgttttgtgctcatgggtttatattattggaccattgcaacatagtaagggtttcagtttgttggattagataggtcttcagttaatccaggtggtgttgattatgctggtacactcgtggcatggttgtatgctgattatgagaataattcaacagttgtatagcagctactctgttagtatggatcttgttcccagttaaactcatttattggcacagaaagattgtgctct

SEQ ID NO: 34025 - DNA, 423 bp, Setaria italica
  Peptide Sequence Number=SeqID_99999
gaggacttctcttgatagattttatatggcttgagacggatcttaagattaagggtgagagagggcaggacaagatacttagcaaggggttgcctgagattgatggccgattatcatctattctggaaaatattaaggttagggatatcacttgtgatagcaggcttagcaccgtggaggtgaagtacgcggttgttaaaagtgcagtggaggctaccgttgaaattcaggtcatccatggaacattttatggctaaatcacagctcacaccaccagcatccttcacagaattgtcctttatgatagcaaagctggtggtgtggcgacctctgatggtagcggaagactaataccaaactagtaggacgaccgtagtacaaataagaactaagtaactaagaactttaagaaaacgaaagaaa

SEQ ID NO: 34026 - DNA, 506 bp, Setaria italica
  Peptide Sequence Number=SeqID_100000
gcccctaccaccatgcgccgccacagccaggggaatcgtgtgctgcaacaccaactctgtccggccctacctccatctggccccaaccttgatgtcaacgcccatctgccaccccctccgtcacccatcatgggtaaccagaaccggaccgcgatggtgccatcactgtgcatcaacgagtgcacgggctgattggcttggcgttggtggcctcgtgctgcaggtcctggagagtcggtagatgggtggctaccatgggcaagcaccgcaaccagcagctcggtgggatgccttctgtatctggcttggccgaggggttgtctcacccatggtggtctggtggggtcaaagcgtaggcctagtcggtgacgcctatgggtgccgttccctccttggaggcaacatcattgcacctccgtaatgcaatgtttggcttcttcaggtgaaaacccatcccattctcgagctagcgatgacagcgtgttggcgtcgtggtccttcttgaa

SEQ ID NO: 34027 - DNA, 363 bp, Setaria italica
  Peptide Sequence Number=SeqID_100001
gagcaagcaatgactccagggcctctacaacggctgacatctggggccgggatttggggctcacatgcaagcacttgtgtgctatcgctgcagccttttgggcagctcgagttgggtactgcccgttcagcctcttgtccatcacgcggttgagcctgcgagagtcgttcaggcacggccgcgcccattccacaaggttttgctctcgtggtggcctgttcttgtccaccgccttccgccctgttagcagctctagtagtacaacgaccgaagactaataacaacgtacgaactaactttaagttaagtttaaagtaaattaagttaaacctaaagttaactaaattaagtaaattaagttaa

SEQ ID NO: 34028 - DNA, 554 bp, Setaria italica
  Peptide Sequence Number=SeqID_100002
agctaacgaaaaattaactccttgcattctaattcagagatcaccatggaaggtttactgtcttttctagtatttataagattggaacttgaacatgaaattctatgttgtgtgtaaatcactttactgattctctactgatctatattatgtgtacaaatcactttagtgcttctctaatctctactgattgctttctgggaaaaagatcccttcgaaaacttcacagttagttcatctgtatgtctaacatatgtgtgttttcatttaagactcacctgcaggctgaaagaatcccagtgcaaaattgccatcccgagagatcagcttctggttcccggagagctgctggttcgaagtgagggtatcggaggcatgcaatggagactgttggagagaaattagaagtaaaagtaaggatatggtgcatgaagaaagccaggtagccatacaagaaatcaaagggaaaaaaggatggtcttcagtttccagttaaatccatgctgtgacgctctcctgatgttgaagccgttagtaagaaaggcccttttgtt

SEQ ID NO: 34029 - DNA, 1304 bp, Setaria italica
  Peptide Sequence Number=SeqID_100003
tcaccgccgcgcgccgctgccgccacttcgccaaggccgtcgagtggttcgagcgcatgtacgccgccgacggcgtcctccccgacgaggtcacctactccgccgtcctcgacgtctacgcgcagctcggcatgaaggaggaggtgctcgcgctcttcgaccgcgccaggggcagcggctggaagcccgaccacgtcgccttcgccgtcctcgccaagatgttcggggaggccggagactacgagggcatccagttcgtcttcaaggagatgcaggaggtcggcatcaagcccaacatcttcgtctacaacgcgctgctcgaggcgctgggcaagaccggcaagcctggcctcgcgcgcaacctgttcgacgaaatgaccgcccagggcgtcgagcccaatgcgcgcacgctcaccgcgcttgccaagatctacgggagggcgcgctgggggcgcgacgcgctccagctctgggagcagatgagggagatgaagctgccggccgataacatcctgtgcaacacgttgctgagcatgtgtgctgacgtggggctggtggccgaggccgagcagctgttcaacgagatgaaggatccagagtgccgggacgtccccaagccggacaagtggagctacacggccatgatcaacatctacgggagcaacggggacacagaccaggcactccagctgtttacggaaatgctaaagggcgggatagaacccaacatcatgagctacaccattgtgatccaatgccttgggaaggcgcagaggatacggcaggcagtggaggtgcttgaggcggggctggagaagggcctcaagcccgatgatcgcctctgtgggtgcttgctctctgttgtcgctctgagcagcggggaggagacggaagtggtgctttcttccctggaaaaggtcaaccagaaccttgtcaagctgatcagaatgctcggtgaagaccaagtgggtgttgacgatcttacaaaggagctaaagggtgtgttgaacgctgcggcccctgaagtacgccggccttactgcaactgtctgatcgacatatgccagaaccatggcttccctcctcagagggcaagagaagtcttccagcttgcccacacctacggtttgtactccaagcttcatagcagaaaggatggagagtggtcactggatctgcgatcgctttcggttggtgcggccaagacagcattcgatgattggatgcagaccatctcagagctcttggtgctggacccagtgtacacgctgaaggactctggcaaagccttttgctgcaccaag

SEQ ID NO: 34030 - DNA, 586 bp, Setaria italica
  Peptide Sequence Number=SeqID_100004
ccgctttggaactcgtagcctcgtgcagctaaacccaattgaaactacattcagtcatccagcaacgaccgctgacgaactgctcatctgcagccatgagaccagatcatcccttgaactgatgaagcttccaacatgagactcgcttggacggaatggcgccgccatttgttcaaggtgagtcgcgaatgcacttgccagcccctgtgcaaacttgtgggtgctggacccagtgtacacgctgaaggactctggcaaagccttttgctgcaccaagagctctgagatggtctgcatccaatcatcgaatgctgtcttggccgcaccaaccgaaagcgatcgcagatccagtgaccactctccatcctttctgctatgaagcttggagtacaaaccgtaggtgtgggcaagctggaagacttctcttgccctctgaggagggaagccatggttctggcatatgtcgatcagacagttgcagtaaggccggcgtacttcaggggccgcagcgttcaacacaccctttagctcctttgtaagatcgtcaacacccacttggtcttcaccgagcaatttcttgtattct

SEQ ID NO: 34031 - DNA, 960 bp, Setaria italica
  misc_feature (900)..(900): n is a, c, g, or t
  Peptide Sequence Number=SeqID_100005
tttccatcgatgaagtatttaacttgcttgcttacatgaaaatgaaacgcagctctcttttttcatgcatccaaccagtgtggtcctaaaacggtatgctttagggtcatcaccaaattatctgggtatctacagtaataaaacatgctaagatggctcctgtgaagaattattgggaaaactaggatcgaatttgcactactttaattcagttgatcaatatttaggtattctgatagtgacccattgctcttactagtctgattaatgcatgcttgtgtgaatgcaaattaaataaatttaataaaggccttggtaagttagagtgtattgcaagttatgcaattatttgtcttttgcttgaaagggatcccctagtgaaattacgggccattggttaaggtctgcttgcaactgtttcaatttcacaaaatggctatatgtagaagatcaactttcttttgtcttttttagcttagttcaatcaattttcattcgtccagtggtgtttcatatatgtcagattcaatctccagaatcttaatgctagtgtttctttccactttggggattctgtatgattgcagacaactgtgaatgatagtaacatcaagatgcaaaccagggggtgggacctttcaatactgtattataatcaacacggtagctggtgtcttacctgctaacgttattcagagggtaaaaaatgcttgtggttctatcgttcggatgatcacttttttcctgagaacacattataatccggatgttacatgtttgatgttactttcttagcaattatttctccaccgcagcaaccattagaagaagagacgtgttgcggatttggaagaatcagaacggaaatctgctatgtgtcattgtgtgcatggataaagntgggtactgtaaagatgttcgttgtatgatagcaactgcttatctgagctggagactagg

SEQ ID NO: 34032 - DNA, 774 bp, Setaria italica
  Peptide Sequence Number=SeqID_100006
agagactgactcgctagtcattctattgccactgattggctcatcaggtatcagtactgcctgcctgcttggcatcactgggattttggcaccaattctggaggaaactgtgtttcgaggatttctaatggtgtccttgactatgtggttctctactccatatgctgtgcttatcactgctgcagtatttgcgttcgctcatcttacaccaggagaatttccacagctttttgtacttggtgttgtcctaggattttcatatgctcaaactcgcaatcttcttactcctattacaatacatgctgtttggaactccggagtaatattgctgctaacctttcttcagctgcaaggttatgatataaaggagctgttgcaggcatcttgaagatttcacttgacaactgtgaatgatagtaacatcaagatgcaaaccagggggtgggacctttcaatactgtattataatcaacacggtagctggtgtcttacctgctaacgttattcagaggcaattatttctccaccgcagcaacgattagaagaagagacgtgttgcggatttggaagaatcagaacggaaatactgctatgtgtcattgtgtgcatggataaagatgggtactgtaaagaatgttcgttgtatgatagcaactgcttatctgagctggagactaggattggcagatcagttacagtgacctttcttgtaagttgtagcattgatgttttatgtgactccttgtaatcaggtatgttcaatgagatgaaaat

SEQ ID NO: 34033 - DNA, 387 bp, Setaria italica
  Peptide Sequence Number=SeqID_100007
agttgaactgcgaatgttatcagctacagaatctacgtggactaataagatgcggttagtactagaaaaaaaaaaaaaaaaaaaaaacaagagaaagtcgtttccgttccggcgtccaatcagagatgtataaatcgtagcgacttcgttaggatttgcgcggttccacagtttattaggctgtaaaatttgtatctttcgttgtacaggcaagaagagcaagaccaaagggagaggagtttgtagacacgaatacacgatgagccgagtggaggcagggtatgctcgatcagcttgcaaagttttgatagcaatctgtacgagtggagttgtgtacatacaaaattttgttcatgatcaagatctagttttggtccccataccata

SEQ ID NO: 34034 - DNA, 414 bp, Setaria italica
  Peptide Sequence Number=SeqID_100008
gttacaaaataggttagaagaatgagtccagtgcccgatagcccagctaggattcatgctaggaacttagtaccaccaccactggtttcgactgggagcttggcttgtgcaaaggatgaacatgattatgtttttttgcgaaaaggctacagtacatttggtggatgcattctattcttcagctgtttatgtgcagtccctgtggttctactaccgaggtgctatcctcagaactttttactttctgtcgcaatttgtgactcttgaggctattcaaccatgtgcattcagccttttgctttgcctggcttggtgacattgtatccacttttccgttgtattcataatgctacattgatgcatgatgcataccatatgtgcaatgtattctaattcttatacttaccatcctat

SEQ ID NO: 34035 - DNA, 679 bp, Setaria italica
  Peptide Sequence Number=SeqID_100009
aaatggttgcagagctggtgctttctggagaaaccattgtctcatttttgctggtgtccttactaaaccagatagtaaaggagggcaccgaagatgaggtcttttcagtgatcagcgttatcgctgaaatcctcatgatctctccttgttcttctgatcagtttatatcatgcggcattgtcgattcattccgtcgcatatattgcttaccttactcttcaaggatcaaaacggtttgttcctatttgatctttaacatcttatgttcagcaagtgcatcgacattttctgaggaagatgaatggcttcctcttactgtgaagttattggaatttatcaattctggtattgattatacatctagtaaccaagaacgtaagatattgattgggatattatgctttgttttgcatcattcagtaaacaaagttcttgttgagcctgcaaaggccataatcttgaacagttctttggtttctttaaccgatgttatagtacacacagcatgtgcaaaaggcccatctttatttcaacacgatcaggagacagactttggagaatttatgatccttgtacttctaatggtgtttttctctctaagaagtttgcatacaattctagaggcaagtattgactggcaggacttccttcagcatccagatgatgcccaatctttttc

SEQ ID NO: 34036 - DNA, 446 bp, Setaria italica
  Peptide Sequence Number=SeqID_100010
gcggtgaagctcagattccgggccgcctgacggcggcgcggtgtcctacagattttacaaggagaggaacggaagggaggaaccctagttaggtgttaactctgtacagagaaactacgcgagcacccttgattagacctcgcaggctcgcgcactctctaacccaacagaatagcccattttgaacccagtagaggtccgctagaaagtttgcatgcaagaatgctaggcctaacaagacgatccttctgttagttacgaaacctaagtgcctcaacctcaaatctatgcccttgctagtgcttttctcagtgaggaagcgccggcagacatggttgtgacgtggatttcagagccctcatacatccatgaccattttgccttcccaagtccatctaaggccatgtttagttactcccaactcccaactttgacactatgcaaaa

SEQ ID NO: 34037 - DNA, 256 bp, Setaria italica
  Peptide Sequence Number=SeqID_100011
gatgtacgccagcccgcgcgccacgccgcgcgcgatccgcagccgcgcctccaggctcaggtgcagcggcgacgacgacccgaaccgcctgctgaacgcgatgttggcgaggctgccgttgggggcgtagtcgtggatgaggagcttctcatcggcgccccagtagaagccgcgcagccggaggatgttggggtggcggaaccgggccacggcgcggacctgggactcgaagtccttgagcttgtcggcgccgccg

SEQ ID NO: 34038 - DNA, 1600 bp, Setaria italica
  Peptide Sequence Number=SeqID_100012
agggacctgcgcgacatcaagtcattcctcgtcgccgcaggtgccgcctccaccactggcaatgctgatatgctatcttccttatccctctattcgcccctctaccttcttcatctctggatatgggagcgcttccctgcgctcaggcctggaagggagaacctgctgggggatggtgagcccatggccgctcgctggcatgatctgagcagaaaggccaacccgacactcatacgcgaggtcctcaattcaagggacaactttctatggcagcttccttatgccactgctctcaagaagtacagtggctgggtttgcagcagcgatctcactggaaatgatcaactgagattgctggcacactgcttgcggccttgtgagcttgtggggatggattgcattgagcagtacctcccacaccgcgttgcaaggcagtttggactggaccaagatgtgcctatggatgttcgccgtgccaatcaggattgggcggttgcttggcagacctatgaactggaggggaagaatgtgagtttattcatccctcagtctgaacctgggatcacggcacggtatgcgcagtggtggaagcagcaagtacaaccttctgatcttcgtgcaggggcaccaagcattccactggagtcaaagacttccaaacgcagggtgaaaaagacgccagctgcaatggaagctgaggcagagaaggagcgcaggatgaagaaggcccgtgtctcacctagtgacaaaaaacgcaagcttgaagagttgtatgatccaaagttctcaggttggcttgcagctggacgaagtgggataagtgatgctgctggcagcagctacaaaaagggatccttgccaaaatatgacatgggatcagatgaggcgttgctgcctaatgttggagctaccaatgatgatgttgtgctacttctgccaaggctacaaacagcaagtcctgctgtagttgtgcccaagaaggatgatatcatgaatccggttataggtgatggaggaaactccatagtagatatttccccagaaatctccactaatgaacttgaaggaggtgctactgcaatgcagaaggaggaaacacttaataatcctgtagtcaggtctcttgatatcacagataagccagaaggagacactgcggtaatgaagtcagaggaggaagctatggaaatttctgtagctaggtctcttgatatcaaagataggccagaagaaggaaccactttggtaatggagttggagaaggaagctatggaaacacataatattcctgaagacaatactatgaaagttcctcaattaggatatgaaaagttaagagatacagcaccagcaccgatagaggaagataccaaggaaaagccctgtgcagatgacaaggatctagcagagaaagatgtagatgagtccatggaggtttacaaagtaaaacaagccgaaggggagggatgcgacctgttgatggagaaatacggtgataatgttgctgatgctcttggagagggatgtgatttattaattgagaaagatggtgctaatattactgatgctcttggagggtagttagtaactaggtcggtct

SEQ ID NO: 34039 - DNA, 302 bp, Setaria italica
  Peptide Sequence Number=SeqID_100013
tgcacggtgaattcttaggtgatccataaactgcagctgatgatgagaacactaacttcttacatccatgagctgccataatttccagaagatttattgtaccaacaacattatgatcataatagagcaatggcttttgcacactttctccaacagctttcagtccagcaaaatgaataacagcatcaaatcttgctgaagcaaaaaccttttccagtccatctttttcacggatatcaaccttgtggaagacgaggtttctggcgtggtcccccgcgagcgcgcgcacgcggcgttagcgc

SEQ ID NO: 34040 - DNA, 417 bp, Setaria italica
  Peptide Sequence Number=SeqID_100014
catgcttcctatgggacttggtgctgccgtaagcatacgtgtttcaaacgagcttggcgcagggcggccagaggccgcgcgcctagcaacgcgggtggtcatgcttatagcgttctcccttggcatatcagaaggtcttgtgatggtgctagcgcgcaatctactggggtacgcctacagcaacgagaaggaagtggccatgtacaccgctaggttgatgccgatcctcgcggtgtccacattatttgactgcctgcagtgtgttctttcaggtgtagttaggggctgtggccggcaaaagattggtgccatcatcaacctctctgcattctacatcgttggcatcccagcggcatccattttcgccttcgtttgtcatctcagaggaatgggtctctggtttggtatcttgtgcgg

SEQ ID NO: 34041 - DNA, 600 bp, Setaria italica
  Peptide Sequence Number=SeqID_100015
aagaaaggaacgaccgacgactagactaggacgggacctaccggaccgactgaagctggaggccgtcggcggctccggcgagcaggaggaggtgctgagcagcctcacccccgcggggagctcggcggtcgccgaggccatgcggaacgccgccgcgacgcctgggccggaccagggggacgtcacctccggcctgcagcactgttacggtgacggcttcgccgacatggcgcccttcaattacgacgacgatggcacgttcgacctcgacgaccttgttgtgttcggattcgatcaagggcaagctgattattgaccgatcgatcgagctgtggatcggagaagacgatggaagaccccttgatcagtcggcgcgtacgcaagggaataatggctgcgtggatctttgatcgtatttagctgcaatgcctagtttaatttgtgcatacttgctggtgtatactcttaagaattagctgcagttttacttgttgcaggtcgagtagatttatgttaattagctacgacctacttggagcagaggcttaatttggttgcttcagctgtcagcgtcacttcaacaatgttaatttatgtgtc

SEQ ID NO: 34042 - DNA, 224 bp, Setaria italica
  Peptide Sequence Number=SeqID_100016
gcccccgtccgtcgccgccgccggagcagaagcaccaccccgcaccctccctccacaccctcattgctcccctcccgcgctccgagccgagcccagcagctagctaccgttgcagcggcggccccaccgctcctcgccgcattcctctgcgccgcggcggctgcggcggagttggtagcctcccgtccgcctcggcacggcggcttccactggctgttccgttt

SEQ ID NO: 34043 - DNA, 489 bp, Setaria italica
  Peptide Sequence Number=SeqID_100017
caagtctcggcgaggtcttgattcttgaggtactagaaggaaaaatttataaaggtgatttaaatattcttcaggttcaagacacttcatgtcagagtaggtcagctcaacagcttctggatcagttcttgaaggatagtagatctttgactcatcccatttattagatatctcagcatcatttgatctagcaggctctgcatcatcatcatcatccaagagaaccacatcctttataaatgaagccgaggccttatttttttgcaaggttccaattccttttactccaaaaagtggcaccttcaagaaatttgctgcacgtgccctttgaatcaacagtgttacttttctgtgaatttctggtgcagctccttaaagttggtttctttcttctgtcaatatctgtatttaaacattcacgatccgtactctttgaacgacgtgcacaagtcttaaattgatgacttgctgaatcttttgctattttac

SEQ ID NO: 34044 - DNA, 349 bp, Setaria italica
  Peptide Sequence Number=SeqID_100018
gcggcttcccgtcgacgaggcggaaggaggcgtcgtccgcggacgcgagcccgacggagtcctcgagcccagcgaagtcgaagacggtgtcgcgagcggcggcgaacgccccggggcccggcgggttgcgggtccagtcggcgatgcggcccagcttgtcggagcgggagaagggggcgaaggggacggacacggagccccccgcccagggaggccggcgcggcggcggcctccggcggaccccatccatcgggattgtaggggacgaagcccacgtcgaagcccatcgtgatgcggcggcggcggcggatgggggtggctcaggcgtcttcaggaattggttagatcg

SEQ ID NO: 34045 - DNA, 377 bp, Setaria italica
  misc_feature (316)..(316): n is a, c, g, or t
  Peptide Sequence Number=SeqID_100019
ccatggaaattcttggttttaggtctagttctagcgcggttagctcacctattggtattcaggcaggatgaccattcagccttatcctgttacccacccaagacccaactaaccagataaatcccaaacgaatttagttttctgattgcatttttcccgttactaccatttatgtgttctgaatcagtgaatctctatgtaatgcatattaacaatcttccaaaatccacagtagctcagatttagtaaggagtaacctcattctgcagttgctgaaagaaacctgaaagctcagaacattatgtagttttttccnctcctgttttcaggcctaccagcaccaacaggatgtggagctgagcggcggcatggaggga

SEQ ID NO: 34046 - DNA, 464 bp, Setaria italica
  Peptide Sequence Number=SeqID_100020
cgtagaagctcagctcaaaaagaaggaagaagaacttgaaaagaagaaggctgaatatgctgagaagatgaagaacaagaaggcaatcatccataggcgggctgaagagaagagagccatggttatggcccagcgtggtgaagaagttctcaaggctgaggagatggcggcgaagtatcgcgcaaccgggctagccccaaagaaatttcttgggtgctttggggcgtaaggaaacgtctgaagttgatgctccgcggaaatttggcaacgtgtttaagttatttgcttctttgtgcgctgcaagtatatggtgctgcttactcatattcatatcatgtaattatatatgtaactgttccctctatttattctctgtaaatcctacccttcatgttccaaaatgtgctctatatatggagacagaaatctgttggtataatatagtagtactatgatttgttctt

SEQ ID NO: 34047 - DNA, 220 bp, Setaria italica
  Peptide Sequence Number=SeqID_100021
tgtcgcccgcgacccggaaccggggtcgtcgggcgcccatatcccgcccccgcgcagccgctcgacacggagcctcccgcggctggcatccgcttccgcgtcgccgtcgtcgccgtccccggggccgaggcggatgccggcgcggagggcggtggtgaaggtgacgagcaggcccttggctgccaggcgccggccgaggcggaggagcgggttgacgtgg

SEQ ID NO: 34048 - DNA, 477 bp, Setaria italica
  misc_feature (1)..(46): n is a, c, g, or t
  Peptide Sequence Number=SeqID_100022
nnnnnnnnnnnnnnnnnnnnnnnnnnnnnnnnnnnnnnnnnnnnnnatttggatgttgatccaggaaattgtcagatgagacgtaggtttcttcaaacaattaacagtatctcagtgtgtacataagagaaatctctcgttccttgataatccctccagttacaaaaagatggtctgaataaaacgccttttgctacatcatctaagagctattgacagaagtgatgggaggagcaaaaaagaggacccaatcctttggctagtcaagaacacaagaagataatccagggcaatgcactctagagcatagtactctggtagcttcaaaacaatgctgcaattattacttatcaaggctgctttagcagcacaggccaggacgggtacagaactgtataatctaagaaaaagaacaaaatatgatggtgggagtaggagcatcctccagccgaacacaaaccagatcaaaacttttga

SEQ ID NO: 34049 - DNA, 450 bp, Setaria italica
  Peptide Sequence Number=SeqID_100023
aaggccaatgccaccaggggatattgtggtagtaccactccatgcgtccataggtgagcttcttgtcgaggcagagcatgcgctgcgggacacatactgcttctttgatggattcaaggctgagtcactggatggcattgctggggagaagtgggatccggtgatgcttggtggagcagagtctggtgacacgatcagtgtgcatggccatggagtggacatggagactgggctgcgttgccagggaggtgtggatgcatgggaggtccagtgtgtctgtggtgcacaggatgatgacggggaacgcatggtggcatgcgatgcatgcaatgtctggcaccacacacgctgtgtcggtattgcggatggtgtgcccgtgccaccattatttctctgcatgtcctgcggtggcgcgctcatggctgctggaccgatccttggattgtaggt

SEQ ID NO: 34050 - DNA, 541 bp, Setaria italica
  misc_feature (473)..(541): n is a, c, g, or t
  Peptide Sequence Number=SeqID_100024
aattccgcaggcaccggcgcgacggccgtggcgacgatgagggtgcgcgggtgcgggcggttcggcgcgtactgctcgcggaggccggcgaggtgcgtgctggacgcggcggaggtggagttcggctacgacgccgacacggggctcgtcaccgtcgacctgcccgtgccggaggaggagatgtaccggtggacgctggagatcgtggtgtaggccgaggcgtgacgccggacgctcgtctgatcgatcgccgcggctgagccattctcagcgggcagagacgatcatcgccattggtgacgtgcgcgagagttgtataattagtgtggggagacgggagagtggagtatgctttgctatgctagtatcagtatgctgtgttcttgtaccctgtgacatgaatgttgtattattatactactgggtaataaaggatggtgctccttcaaataaaaaaaaaaaaactaaagagnnnnnnnnnnnnnnnnnnnnnnnnnnnnnnnnnnnnnnnnnnnnnnnnnnnnnnnnnnnnnnnnnnnnn

SEQ ID NO: 34051 - DNA, 469 bp, Setaria italica
  Peptide Sequence Number=SeqID_100025
ctttcagtatttttaaatacgatagctgtagagagttcatgtctcattgagtcattgataactctgtactccagtgtattgctttctggagcagcttttctggatgggagtattctagaaatttggaatatgaataactctgggaaatcatttgaagatgtgatcgagtcgattgagaaggctaaaaaggatgcagaaaggagataggtagtagaagttcgggcgttccatcgattcttggtacatcagtacatatgctgacttgcgaggcaatgtgcatatttctgtccagatcctaatgtatagttgtgaatgtctttcacgaagttgtgcttcagccttgtaaaaccttgcgtggggtctctgtattctcccctcacaggaactgtactcgcactatgtggttctacttccatggcgtctgatctggttagactgtaattcatttgttgatggaaataagtaatta

SEQ ID NO: 34052 - DNA, 287 bp, Setaria italica
  Peptide Sequence Number=SeqID_100026
gcccgccgcgccggcgcctggcgcggggaccacggccgcaggggcgaacgcggctgcggtgacgcccagacgctcctgcaggtggtccacgaggccccgcgcctcctcgagggtgagccccgcgatggcgtccccgagctcgagcaccttcggggaggccgtcgaggtgcaggcgacggcgaagcggccgccgcgtccgcgggcggggaaggcaaccgccttggggagcgaggaggaggaggcggtggagacggtgaggcggggaaaggaggcggaggagagggcgg

SEQ ID NO: 34053 - DNA, 334 bp, Setaria italica
  Peptide Sequence Number=SeqID_100027
atcgcgctcgtcagcagcttcgatcccatcggttgattgttgttttctccctcccaggtcagcaacaatgaaaggtataaatttacatacatttgcgaggaaagtattctgttggaaattatccaggtgattattgggacgtcggcgtctcccgtcgatcgaggtcgttttctggggcaagcagtggccaagttctcgagttgcagccggaccttggactgcagaatggaggcttcatcttccgatattccccgtctgtgtgactcgtttagtttgcggggccgcctgcttttgcttgcttgtaatgtgtgccttgtggtcttctgctcgaatt

SEQ ID NO: 34054 - DNA, 272 bp, Setaria italica
  misc_feature (265)..(265): n is a, c, g, or t
  Peptide Sequence Number=SeqID_100028
accgtggctcaccaccgcgttggttgggaatctgcttgccgtgttggcttgtggcttcatgggtgcttcgatgacatcaatggcatgagatatggtgcgcattggcctggacacacaaggagtgattctcttggctatttcaacagatgaatcttttactgcgccaacagcacatttactgctaggtttctccaagattccactccccatgctgagaagtttcatcgtagacgcggtgaggtcatcacctggatctgcagaaacngtctgtt

SEQ ID NO: 34055 - DNA, 582 bp, Setaria italica
  Peptide Sequence Number=SeqID_100029
gcacccgcctcttagtggaaggcggggccagcgttgagggcggcaggagcgccggcggcggcaccggcgccgccgggcgcgtgacgttgttgcccgcgaacgcggcgtcggcgaacctgaggagggagccgggcaagggccgtcaaggtggttgtttgagaggttgaggaactgtagcgctgggaggccgaggtccgggacgcggccggcgagcgagttgttggagaggttgagcgcgacgaggtgggtgaggttggagagcgcgccggggagtcccccctcgaagcggttgtaggagaggtcgagcacctggaggttctgcagcgcggcgagccccgcggggagcgcgccggagaaggcgttgcgctggaggtggagcccggtgagcgcggggaggctgaggaggtccgtcgggaaccggccggagaggttgttggcgcggaggctgagcagctgcagcgcgtcgaggcggccgagggtgccggaggggacggcgccggagaggcccagccccgggaggtgcagcgccacgacgcgggtggcgtcggcgctgcaggtgactcccgtccagccggggcctgc

SEQ ID NO: 34056 - DNA, 2221 bp, Setaria italica
  Peptide Sequence Number=SeqID_100030
accagttcattgtagctttttgcatgcccctcattgaagtctaggaaggttatcttctttatgcaaggaggaatatttttcagatcagcttttcttgcactaatcatagtcctctgaagcagctgcacaagacgaactcgtccctcttccatttgcgcctcaaaaggcctatggattccagagtcccacgactggtagttttgaccgtaaacttcatcatgaagaaacttaagcatggggtgaagatgagcaacctgactagttggtgtatttggtgtaggtgtaccagttaatatccacctatttgatgcaaccaaagcgacagccatctgtaatttgttcgtcagggcaaggctcgaacctaatgtgtgcccttcatccagtataaccctgaaccagtggacgtgctttagtgcacttctcttctgtggaccccattctgcacttagtctgctgaatgtggttatgacaatgtcatagtcccaagcaaggttgtgagcagatggcttcttgtggtctccccacacaaaaacattaagggtgtccgaggacacatgacgctgtatctgtgttgtccagtgatcaattaagttagcaggtaccactatcaaggtagccctagataaataaaacctagtagaatccagcggtttttcaagagcaactccaagtgcagctgaatcaaaagctaaatcgtcaagcatagggggatagtaccaccgagtcacacctttctcaatctttctcacaagaccaaatgcttgaaatatcttgtaatatggacgggcacccttgcctgtagttgcacgtgtatctagaactgggcgagtcaaaccaaccaattccatctccacaagttttgaaggagaaagttttgctaaccatatcaaagccttcttggtttctgaattgatcatagcaacattatctttcaatatgtttgtgaaaaacgacacattttcctcatttccaggcaaagagtttttcttgtaaaatcctggcaaattggttatctttttcacaaaatcccatgattcctctggggcagtgcatttctgccgtgttggatcagtgttcatagtgcaaaaccatgctgtggtagaatcaagaactgttgcatctgataaccttcgccactttctgcaagcatcacactgaacccaggtctcatttgtttcagaggtggtgcctctcttccttttattgccaactgatccattgctgtatgcatccatgaggtttttcctaacttgtctagaatttttagtgaacttcagtacatgagttgctggtgttggatgcactttgctgtgcgatgacgatggagacttctcactcgtagcatgaaacatgaccttagttggatcagggctcagtaacctgcctctctttcttgaagatctggtactgcacacaggatcatcatcatgcgatagtccactagaacatggatcatctgttgtcacatcctccctcaaaagcttttttgacacagacgaagagctgtttctattagaagagcaactgggacttaattcataatatccatattttttatctggcttatgcatgcaccaactcacatccacgccttgaggagggtatgcaagtgttccatgcgtttttagaataagagacagcgttgttactgtcttccctaacccaggttcatcacaaaacatacctccacggaaatcatttatggttggagaatttccagtagatacttcaccagaggtaacatttatgtagaaagggaaaccatcctcagtgcagaaatccttgtacagaggatgcgccaggacttgcgtgttctgctctcgcctcaacatccattcaacagcggcctcttgatgaggaaaaagcttaagcttcatgcaaggcataatagaggcagcaagactccttagatgatgacaagttgctgccactcttatcaaatccctgggtttaagtagaatcagtactttattcaatacatcatcagggacagaccaaatacccagttccagtgtttctgcatctggtattattctttccgtctgcatgcccttctccatcctaacaccagggagggtttttaaagatttcgtgcaagtcaaatgacttctctttatttgatattgacgctatctgatggtcctcgcaaccaagtacgtgacaatcggtgcagctccaaatgcaatggtcatcacagtgtggaccatcatgtgcagcccag

SEQ ID NO: 34057 - DNA, 517 bp, Setaria italica
  Peptide Sequence Number=SeqID_100031
acaatacaaaataattctagtaacacaacttcaaccaggaggaatacctcgcaacatggttattccagattctctgacaactctttcggagtacatggaacgcgtggaccgagtattacagaataatggtactccaccatccagggattcagaaggccaacaacaaccaatggcagatgatgccaatgtcaacccaagatttccaagtcctgaggttttggcttcagttattgagagagcccaacaacttcttagtggcagtgcagcttcttctctttctcacattgcacaacgtattcggcaagatggtggcactggggatgcatctattcgtcgcgagatccaaactgaatcagttcagctgggaattgcaatgcaacatttgggtgccatgttttttgagcttggtcggacaatgatgatgcttcgcacagggcaatctccttctcaagcttttgtaaattctggccctgcagtttatataaactccacaggaccaaatccaatcatggttcag

SEQ ID NO: 34058 - DNA, 238 bp, Setaria italica
  Peptide Sequence Number=SeqID_100032
cctgggaatcgaggtgcaccaggatgattccaggatcacgcttcgacagatcgcctacgctaagcgcgtcgtggagctagccgggctcaccgactgcaacccagctctcactccgatggaggagaggctgaagctgagccgcgacagcacgacggaggaggtagatgctacgcagtaccggcgtcttgtagggagccttcgctatctcgcccacacacggccggacttggcattctcc

SEQ ID NO: 34059 - DNA, 492 bp, Setaria italica
  Peptide Sequence Number=SeqID_100033
gcaccagctcatcaggtgcgaacagattgccgcggaggcgtgccaggtggactacgacggcggcggcgcgccgctcctcgagtcgaagaagaaaggcagccggcgacggaacttgtcggactccggccggtggaacgacgacgacgaggaggacagcggcaacttcgtggtgcacgtggtgtagtcagacaagcggcggctttacaacttgcaagagcaattcaggtgtgctggagcatggaggctgcaagctcatccatggtggaatttcgcctctgctaaccaagtaaccaggcagctgaagacgcccggtcctcaatggcgcaaggacgaataacgaagtacagtacatatgaatcatcgaagaggctgtaatgtagcagcaaaaccataagtcgatctccaatcacacaagaacgaagttcgttgggggtgttggatcggcacggaagggctttggtttggttcgtgaccacacttaacaagtgccaa

SEQ ID NO: 34060 - DNA, 1371 bp, Setaria italica
  Peptide Sequence Number=SeqID_100034
atttgcaacttccagatgctcctttgatttttctaacatttctgcagtagcctgggctttgagttgctcagtaagattcttcaaatttcctgactgttctttctctagcactaaagccacccgcaaggactcgagttctctatcacattctgcaatcagcatatccttgaaaactctatcatgctcttgtatgatattaagtgaattcagagtttctgcaaatcgataaagttgattaacctcgagctgaacttctgtgacttttgctgctgcagtttcaagaagtttctcgatgtcaactttaacagattcaacagttcgttgaatgtcagaaatagcaatttctttctctgcaattagtgtataccaatatgcttcctcttgatcaaacatatccatgatctcctgctccctggatgtgaatttctgctcaaagaaactaaccctttcttcaagctccaaaagttttatgtcatagacctcaacaatttcagagtaattgttgttcacttcttgaatagatttctcatactgcatcttgataagaccgcctaagtcaagtttttggcccaggttttcttcttctagtacagcgatgtattgctgaagctcatcaatcacctttcctttctcgctaattataccacataacttctccttttcttttgtatgacactctttcgtactccattttggcaataagagcaacatccaaatctctcttcagtacacagttttcatccatatatgttttgagttcagtttccatatcaaccttcagcttctccaaatgctccaatgcttgcttttgctgatgaaaattgttctcaatttggctcagctcactgctcctctctgagaggacataatttgcctcattgagggcacctagtaacttcaccttttcttgtataagcacctcctcagcttccatcttggcaacaagagcagcatcaagatctctcttcagtgtatggttgctatccatatagcctttgagttcactctgcatatcaactttcagtttttccaaatgctcagttgcttgcttttgctgatgaaggttgatttctaattggctcagctcattgttcctgtcagcaaggcacagttttgctttcatcaagagcacctaatgcctccctcaatttctcctgcaggttgttttccttctctgaagcttcatcttttatgcagtgaacatccctcgatgtgtcttcaagcatctctttgtatgtatcaagctgcctctgcatcttctcatgttcttgttctgtacgttctagctcctcaattcttccctgcaattttgctattacctcagattgctgtttccgttcagcttgagattgaacaattgtgcaatttctt

SEQ ID NO: 34061 - DNA, 246 bp, Setaria italica
  Peptide Sequence Number=SeqID_100035
gcctggctgggttcggccgtgtcctggccacgagcggccgtggcctggacgcgggcggtcgtggcctggccaaaggtggctgtggcctgggcaggggcagccacaccctagctggggttgaccccgaccttgaagagaccgttcttggtgctgaagatgcaagtgtcggccatggccgtggaaggaagtgggcaggaagaggccggggccaaggacagagcaagaaaccctcgaaggcagacaaaa

SEQ ID NO: 34062 - DNA, 833 bp, Setaria italica
  Peptide Sequence Number=SeqID_100036
attactcatctcaaacatgaacgccaagctttccttcagaatgaagaagttgcagaagttccatatcggagtaaaccgttgctcacttaacctccggatttcctcttcataaaattgtacccgcctatctaatgtgtttctgatgcagtccaccattttagagtcaaaatcatcccagaattctgcatcgggtccatggagatcaaatttgcagcatctttctctctttttggtattgaaatcagcctcaagcctagcatagactttctttgccatcttagttgcttgatcattgctaggatgggccttggacacaaacacaataaaccattcacgttcatcattttgcacaattaatttgaggcgaggcttaagaatggtcttgaattcatcaagatcctcacaagtgacaagaacaacagtagcatatggttcccggaaccagaacaagtattgttcttgtggaaatcgactccgcaaccttgaatcagttgtttgtataaactcagctggtagattatcaacaaaaacaggattcctcgccttgttgttgagacaggcctttttcactggcactctctgctcaaaactttccttgacattgagccacaagtcgcttacatcctcaacggcgatgacgatgcggtcgcaggaggacttgatggtctggaactgcgcgaggtagttcgccatggccgccgcaggagtagggggatgagagatctcggggaatacagcttccacgcagtccctacagccccattaagcgctgtccgccgccggggaggtcgccggagacgagggtccggcgaggcgggctcgcgagatgcgga

SEQ ID NO: 34063 - DNA, 312 bp, Setaria italica
  Peptide Sequence Number=SeqID_100037
acgtcggaggagacggcgagcgcggtgcgcaggcgcgggtggtgcgcccgccgcggcgcagtgccctggcgaaggaggaggacgaggcgccggcggggagcgggggcgccctctcgccgccggatctcgcggccaccggcgccaggaacttggcggcggtgaaggacgcggccgccatctctcctgcctctctcccggtgtctcctggccggacggcgcggggaacaatgcagtgaatggggaggaggacagggagatgcgggaggcggaggcgcggaggcgtataaagagcgagggagggagggaggtggt

SEQ ID NO: 34064 - DNA, 400 bp, Setaria italica
  Peptide Sequence Number=SeqID_100038
ttttttttctttgtctaagcaaatttttggcaaacaggttgcactcgcatcacaaagaatatacatcatgacactgctgtcggttcaatggtctggacacgcccaaggctacaatggttctaccctacattgacgagtggtaaactatggaaaaagagcgtcgaatcacacctacactacagcacacaaaatacacaagctaagaccacctcacctcagcaccccgcacccccctcctcctaactgctaggaaatgctgagctcgtctatagttctggagagttcaatatccgcagccaggccattggtcccgttcatcttctgctccgttggggcatggttgctgtcacttgagtttgcttcgcttccatcagtaagtttagcaggactagcaggggac

SEQ ID NO: 34065 - DNA, 574 bp, Setaria italica
  Peptide Sequence Number=SeqID_100039
taaaagtcttattgtattgtaaaagtaaactagtaaattaacctggtatagtacattgctgtagtccctagcactatccatgtactgtagcttctgtagttctgcacattttatgcttgcgctgtatgacattcttaaatgagaacactactggcagtggcaggtgaggatgctatgatttgcttattgcagaccttttgctaacagagttccacttttgaagagtctgtaagcaatattgtaattgttagccttataacacacaagataaaattatgatgttacagggtctataagaaattaccaatgttattgttttcatctttactgttctataccttgtgaacttgtaccgaggacatcaatactgcattactgaacttattacgctttgcaggtcaaattcggtgtactcttcaacgacgatcgctgtgcaaacatttttgaagcactagttggcaccttgagggccgccaagaagaggaaaattctgacctatgatggcgagctgcttctgcagggtgttcatgacaatgtggagataaccctattgccccctcctgcagttgctctt

SEQ ID NO: 34066 - DNA, 654 bp, Setaria italica
  Peptide Sequence Number=SeqID_100040
ttccgttcttaggccgcacgctcctctgcatctgaaatatcctgccaggtgccagcggccgcggacaagatccaagaactcgcgccacgcacggacagggccggagatcgagagtgagagtgaccgacagcgcgaggcgccatgaacgtcgaggaggaggtcgggaagctcaaggaggagatccagaggctcggccagcagcaacccgacggctcctacaaggtcaaattcggtgtactcttcaacgacgatcgctgtgcaaacatttttgaagcactagttggcaccttgagggccgccaagaagaggaaaattctgacctatgatggcgagctgcttctgcagggtgttcatgacaatgtggagataaccctattgccccctcctgcagttgctgccgcttgaggcgcacagaaccaccattcccctattctgtatcgttgatatgcttgtactgttgtgcctatattttcatgaaccatttggtatttccagaagactgctattgtgtgatgtatgaagttgtgacgcttaaaaattggcttgcttgcttatggctgtgctgtaacattctagatgacttttctttctccaagaaaataaccatttagttattacctacattaatagtttcttgcgattaaaaaaaaaaaa

SEQ ID NO: 34067 - DNA, 362 bp, Setaria italica
  Peptide Sequence Number=SeqID_100041
taaggaacgtaacttaaggtaacggaactaccgaagacctacccaatacctaccctacctacggcgcgtaacctgagccaaaacagtattaacgttgcactagcttgaggtacccccttcaagaggtcaagatgttgtggcgcacaatacgcactatggatgtaatgatgcattcttcgtgtttccttcttccaaaactgcatcaacctgccaacaaaccagtcatgaactatgctttagtcgttcttaaccagcaacttccacgattcatgccccgcctctgggctcaagcaaacttgaggatctgcgctgatggaggagctaatcgtatttttgatgagatgtttcatatgaccaatgat

SEQ ID NO: 34068 - DNA, 646 bp, Setaria italica
  misc_feature (544)..(544): n is a, c, g, or t
  Peptide Sequence Number=SeqID_100042
tgtgaagaggaaccaacgtaagcgccaaagagaggaagatctaaagaaaggataacgcaacccattctgtgttgaagcatttcactgaacgactcagcaaacaaagaaagctcaaacaccgactcctctatatccttggcagtatagtctaggaggccatccaacgaaagggatgttgaacggagtttagattcgttattactccttttgcctgaagatgaatcctggatatttcgtggttccatcagacttcttcttttctttcatttcattgagtggcttttgctttggatccatcttgaggtctctattcttctctttatcatcctttgtcttctccttctttccatcctttttcgtatctttttgttcaatagcttccttgtgattaaccttatccccatttggacttctgagatcagtctcctttcctctggtttctcttctttcttcagatttgagatatcttccatagaagtttttgacccttcttgcagcttagtctgagaatttccagcatcagttgaactatcaatttttttcnctggctgaatttctgcttcagggtctcagttgactgcctctgctacacctgctgaaacgagtaagcaagaagcagaagcagtcaactgagaccctgaagcag

SEQ ID NO: 34069 - DNA, 439 bp, Setaria italica
  Peptide Sequence Number=SeqID_100043
ctcaaacaccgactcctctatatccttggcagtatagtctaggaggccatccaacgaaagggatgttgaacggagctgcaaaacagaaagctttgataaagatctccagggcaattcatacgagcatgtttgaatagaagcattatatggaacaaaaaggaaaattatgtagcatgtaacccatactttagattcgttattactcctttttgcctgaagaatgaatcctggatatttcggggggtcatcagacttcttcttttctttaatttcattgagtggcttttgctttggatccatcttgaggtctctattcttctctttatcatcctttgtcttctccttctttccatcctttttcgttgttttgttgtttccactatcttctgcagctacttctggcttagcctctttgtctttgtgttatcttcgttctgtt

SEQ ID NO: 34070 - DNA, 4701 bp, Setaria italica
  Peptide Sequence Number=SeqID_100044
ggcaccaataagcattatttcaaagttctttttccctcaggtgcacgcatttatgaactgcgatttcccaagatgcagctactccaaccataaacaagtttatgataagataatttcacattaaaaaaagtagaaaataatcattcaaccataaacaaaatagttctattcaaacaagaaatcagaaaaacagaagtcaactcctttataagtaatgaaaatagttcatcacagctgacttctcaggtgatcgtcatcgcatagttaacttcaaaaatgcagataggtgtcaaagcagctccagatcacaggtcaactatcttcacaagctttggatagattatgcggttgtcccttgaagaattgctctcaataagagcaatttgaaccaagtccttcacatccctgcttgataaaaacttccccaagttgtgaagaatgcattttaaatcatccaccttgatatatcctgctctgttttggtcaaagtacctaaaggcctgcaataggtccttatcaaccacctcatcttttgctggcttaacctccttactaactaccttttctccaccttccaccgagtctcctttctctgctgtagtctgcttttcctccactgaagcagttttttcatggatattagtgatattttccgattcaggctccttcgttgttttgttgtttccactatcttctgcagctacttctggcttagcctctttgtcttttgtgttatcttcgttctgttctgcaattggtgcttcagcatgagcatcatccatgtcctcatcatcttcatatatttctatttcttcaggatcttcctcatattcaggatcttcctcatccatctttgtatcagcttcaggttcattgggagcagcttctgaagtgctcatcttttcctcaccctttttggctggttcatcatggttagccatcggatgatcggcgcccactttaacctgaccctcttttaactgttcatcatggacacttgctgaatgatctgggctcatcttttcatcaccctcttttgtcattttaacatcccccgctggattatcagcactttcagttacagtctcttgagttgtcttgggtcgcttctctgaggatttcttctcttctttctttagatcttcctctctttggcgcttacgttggttcctcttcacaatatgacgcttgtacagtttctcaagaaaagacaggataacgcaacccattctgtgttgaagcatttcactgaacgactcagcaaacaaagaaagctcaaacaccgactcctctatatccttggcagtatagtctaggaggccatccaacgaaagggatgttgaacggagtttagattcgttattactcctttttgcctgaagaatgaatcctggatatttcggggggtcatcagacttcttcttttctttcatttcattgagtggcttttgctttggatccatcttgaggtctctattcttctctttatcatcctttgtcttctccttctttccatcctttttcgtatctttttgttcaatagcttccttgtgattaaccttatccccatttggacttctgagatcagtctccttttcctctggtttctcttctttcttcagatttgagatatcttccatagaagtttttgacccttcttgcagcttagtctgagaatttccagcatcagttgaactatcaatttttttctctggctgaatttctgcttcttgcttactcgtttcagcaggtgtagcagaggcagtcaactgagaccctgaagcagaaacttttcttttaacaacccttcgaattattttcttcttaccggttttctttgcttcaggctgctgattgatgccagttccctcctgttcttttccagcatcctcacttttttgttcattcggccccacttctgcagttttgcttgcagattctgctacaacattcttgtcttcaatagaagatttatcagctgaagttgaagctccagcggctggctttttccgtacaactttcataaccttttttattactttcttttttatgggctttttatccccagctgcatggtcaacagaggagccacctgtagtttttccttcaacatccccacccatcttctcaacgggttcctcaactttatcaaccttaccctctccatccttatcttgccgatcagtatcagcatcaactttctcatttttcatatcactggagccaacgtcaccctcttttaaaagatcagcatctatacttttacccttgttcacctcccctgaaacttgcgcttctgctctttcaactcaacagggctcttttcctttttcatagtgagctgttccctttctgcctttgattttctgtatgcaatccagttattcttccatatatcgactgaaggcacgcattccgacagatttggcacaaacagtacagtaatttctttatgactcaagagtccatctttgccaattctattgtagtggacctcaacaaaacgattccagtgggtgcagttagatagatcaacttgaaccagctccttaacgcatctaatggcagttcgaatcaagcaagaacagtcaactgacggatcaccaccatctattgctgcattccaagggcccccaattgcaaaaagagaacgatccttcttgaatacagcaaattttaagatattgttcaagttcacaactcgttcctcgttacttctcaatgaagttatgtcagcgtaggcacctttgctcatgccactcatcaatagtacctttgcattccaaatggtggctggggtattggagcttgatgatttctcagaagatattgctccttcatcagcactatcatcagcatcatggatatcatgctccagactcactggtgtgtgcagagaaagatttaagttttctttagcccagttcaagacaatctttgaaaattcgggagtaattgctagtctgggatatcgttttgtcaaggacagataatccctttcatcatccacgaagcgaaatggaagaaccttgcaaatatattctcgctttatttctttaacaggtgaacgatgcctatgcacagcttcacgtcgaggggaaattcgccgcacaggcttctcagatctaacagaagaagaacgccgtcgatcaccagggacctctaatgtacatactgtaatgatgaaacctagaacagaaacattcatggctgcatgatcatttcgactcaatgatcgaggtggagtgtgctcccgccttggatcagctgcgtgcttcctatcccgctctctctccttctcccgccgctcgcgaaggcgttctctttcacgctctctttcacgttcgcgttccctttctctttcacgttctcgtagtagtctttcacggtccctttccctttcacgctctctttctctttcacgatctcgcaagtctcgtaactcgcgttcccgctcccattcaagctctttctctctttccagcattaggtcccttctacgctcttcatctcttatatctagttcacggcgataaccaatccgatcaactctacgttcatcaaccatggagatgcctgggtgcacgcggggtaagatgctatctcggtagtccggatccgaagatggatggagcaggcctttccctgaggaataatcacgaccaggaggcagacctgcaccatagccagtgcttgacgatccttgtccatagaggctgtcaatgtttgtccttggagctccttccaacaatgagcctgcctgttgtcttccatacggagcagtcccaagaatggacacgttgcgactctcagcttcaactcttccatatgcaccaatttcctgggatgactgatggattggagcggaccttcctgcaaagtaatcggcttgtctcgtatcagatccaggctgcagctgacctttcaggagctgctggtgacgcatcgatgaaccctgctccatatggtcatgtacctgatgaccagctgatatatgatcaggataccttctatccaaatcactgagaccatctctcctaccaagattagtagaatgttcaccatacatccttctctctagtgtataatcagtgccatattggtctagcttctgtgcatatccacgcacagccatatagtcatcatttggtcttgccaggctagaccccacaggtgcagacgagaacttggatgactcggagagcgaagttggacgagttgtcaagctaggaagacttgaagaagctggaccttttccaccaagtccaccaacctgttgcgcgccatacactgaagcgtaaggcccgctgtactgcgcagcagtgccctgtccaggacgggcaccaaaccgaccaccatcagcaccacccgccgctgccggggctgtaaatccagtgctaccagggatttggccgtacggctgctgcccgccatatggcggctgctgcccgtagtgattgggccctttcgaaggaaacatggcagacgcgcccgcctaggggctcctgcgcggccacaggacccggccgaaacactccgcgcccacgaacaagcgcctggggatggaagaggaggaagcctgatggcgtcggatggaagcgggtcccccgcgcgccgcggctctggggcgagagcggggtcggcggccggaggcgagggcgctccggcggaagggcggcgagggttggcggcggcgacgag

SEQ ID NO: 34071 - DNA, 424 bp, Setaria italica
  Peptide Sequence Number=SeqID_100045
acgcgccgccgttcatggtggtcaggtcgggatcgggatcagtagggccgccgccggctcatcagtgccgcccatcgccgtccctagagcggcagtggagatggtcgcccgatgacggcacgattctttcatttgttaatttgttggttcatattctaggagcgcaattcgttcccggttaattcttggtgagccttttgcgttcgctgctgattaagcgaggttcgtatcgtgttctacagttgtactcgtgtcccgccggtgtgtgtagtacttgtgtgtgcaaagcgattgcacgagatagttgggtgtacagcatttccttttttttaaggattcggagtcgaacgaacgatgaatgtgtaccctccagccctggttagacaatgcaaaggcggttgactgaaaaaaaaaaaaaaaaaaa

SEQ ID NO: 34072 - DNA, 327 bp, Setaria italica
  Peptide Sequence Number=SeqID_100046
tatgggctatacttgcttaacaaaaatgagatctgaatacgtcctaaaccttccaaacaaaatatgccttttcagatgcagtctgacctggtaggctaacttttccagatgttgccaaattggtaacttctgtttgttcggttcagttgagttactttgttagaacctggttctgtatgcctctgttatttcagttttgctttaatgttcaggatcttgtgcttttgcttgtgaatcctgagggcttcagttgacttgaaatacttgtatgtcatgtctgatctgtgtattctgttttatacaatccacttaagaagcaccttttga

SEQ ID NO: 34073 - DNA, 435 bp, Setaria italica
  Peptide Sequence Number=SeqID_100047
gatcgtcgaggacgccgaccgccgtcgtacgcgcaggtggccggctgcgccgagagcctcgaggccttcaggtgggtgtccggggtgcggatcctcctcgacctcgtcgagcagggggcgccgccacggcgagggccagggagaacgcggcagccgcgctgctcaacctcgtcgtggccggcggcgatccggcggtagaagaggtggtcgctgtcggtggcgccgaggagaccgtgcgggagctggccgaggacaccacggccagcccgagagggaaggcgaaggcggaggcgctgctgcgggcgctggagggcgccggcgccgccgcgaggaggcgcgagcaccggctcgccgatttcctcaacgggctggtgcagtcggacccgtacatctcgtcgccggcgtcggcgtcgacgcacggctagtccaacaaag

SEQ ID NO: 34074 - DNA, 880 bp, Setaria italica
  Peptide Sequence Number=SeqID_100048
cccaccaactcgcctctcaccgccgccggcaggttgcgccgtccagtggcagtccccctgtctccgcggcgccacccaacccgtgcgctcgccactgccagccgcttgtcctcctccgcgaccgacgttgcgcgcttcactgctccgttagccggtgccgggcggcgctcctgccccaacggcgaggtgcgatccagtcgggaggaggaatttgcctttccatcgccgtctccccattccccaaattacacccgccgaccaatctccactgatgagcggcgaagcaggcatgtcccatcaatcagacacttcgtcctgctctgatgattccgaagatagaaacaccgtcaacccaacaggcatacacactatggaagatcattgctgagcactgtgtcctgcacaatttacttgagcggatcagtgtgaagattcatgccaaaatcaaagcacggcaagctggtaaaactggtacgtctcgccgccggactggttttcataggagagtcatagagagagatcacggagagggtcatcaacggcttgtcactgatttcttttctgaagatccagtctatgatgaaaaggtattcagaaccggcaattcgtatgttagcacgtggctgcgcggcagatgctgtggacgaatatgtgcagattggtacgagcacagcaatggagtgtttggagtggtttgcagaaggggtgattgacaagtttggcggagaatacttgtgaggccctactagtgctgatatgcagcacctactacaaattggtgaaggccttggcttccctggcatgttgggaagcattggttgcatgcactgggagtgggaaaattgccctcctaaatggatgcgtcgtcttaatcatagtg

SEQ ID NO: 34075 - DNA, 503 bp, Setaria italica
  Peptide Sequence Number=SeqID_100049
gcaatctcgtttccccattgttcgtggtccaattcgctttttccaacgagcaactcttgggaaaattctgcaagcttgtgtcatactccataacatggcagttcaggatgagaaagacatggcaagtacttgttctgaaccaaatgaagcttcaggtatagcagctgttttaccatcaaacatcaaaactgggcctgccaattgcttaactaatgtactccagagaagtgcccctgtttgtagtcaagcaacacatggccagctaagaagggatttaactgagcatatctggcagcagtttgggccatttggcgacaagtaaaaaagatctagtattagtgtacgaagtcatgtcgcttggtgggtcactggctataattagctgtataaacagcttttttgaggggaaaaaaaggctgattggcaggatacaatcgtagagagacttttgaattgtgaggtaccattacgagctcaatatatacgagtgttattctgttcta

SEQ ID NO: 34076 - DNA, 2175 bp, Setaria italica
  Peptide Sequence Number=SeqID_100050
gtccccctatttcaccaagaggactgatatctgctatcgccaagggctgtcacctctgcagaaatgcacagcggcaattcgtatgttagcacgtggctgcgcggcagatgctgtggacgaatatgtgcagattggtacgagcacagcaatggagtgtttggagtggtttgcagaaggggtgattgacaagtttggcggagaatacttgtgagaccctactagtgctgatatgcagcacctactacaaattggtgaaggccttggcttccctggcatgttgggaagcattggttgcatgcactgggagtgggaaaattgccctcctaaatggatgcgtcgtcttaatcatagtgatcacggctttgccacatttattcttgaagctgttgcttcacaagatctctggatatggcatgcttctttcaatgctgttggctccatcaatgacatcagtgttctcaatcaatcaccgtcgtttactcaagtcttgaaaggacaagctcccccggtgcaattctccatcaataagagtcaatacaatatgggatactaccttgctgatgaaatttacccagaatgcactgtatttgttaagacaatacccttccctcgaactgaaaaggaacgattgtttgctaaacatcaagaagaggcaacgaaggatgttcagcgcgcatttggagtcctgcaatctcgtttccccattgttcgtggtccaattcgctttttccaacgagcaactcttgggaaaattctgcaagcttgtgtcatactccataacatggcagttcaggatgagaaagacatggcaagtacttgttctgaaccaaatgaagcttcaggtatagcagctgttttaccatcaaacatcaaaactgggcctgccaattgcttaactaatgtactccagagaagtgcccctgtttgtagtcaagcaacacatggccagctaagaagggatttaactgagcatatctggcagcagtttgggccatttggcgacaagtaaaaagatatagtattagtgtacgaagtcatgtcgcttggtgggtcactggtacgtatcttgtcctagttatctatttaaaattcatgttgtttaacttcatttataagtagctaagctatgttgaattttttgcattcgcatcttgaaaaagattaggtttggaaattaattcaaactggaccttgaaactggataaatttaaataactttaatgctgatcattattcaagcaaatcaggtcaaattgttctgtcaggtgtgctcgatctctaatttgagtattagtgccccttctcggatgtagagaaacacattcaaccaaagcacactagcttatgttgatatctttgatgcttccaactggggaaaaggaagatacatgtttatatattattattatgtcctgcagtgctggtgatccatcaatttttttgacatctatgtgctgcatcatatataagacagaaaaggctagattacttcttcagtaacaataataatcttttaaaaagtgtagcctttcactagtctttcatgtgctgtattatcaaagtgtgcaagagagcattacgttgctcgtattatgaaatggccactcctcgttgttattgccattgtcttgtgcaggctacaattagctgtataaacggctttttggggacaaaaggctaattggcaggatacaatgagacgtggcatctgactgaactatcaattctgccaatggaaattgggtggaaaaaacaaatgtcttatttttctgtaagagatagcgttattcttcaaaggaatcttcagtctgcacaaggaactctgtacccttgctgtagtctattctataaagatttcactaaagcatcatgcttctgaagtaaaggatcctcttcttctcctagctgattagcctgccatacctgagttatctggtacaactgaacattgggataagcctgaagggtacaggtctgattttgttctcttctagctagacaccaaaattatgcatgatattttgttagaacttgtagtggtatctagcccctgtggtcacatattttgttgaggtctgattttggttctcttctggcttgtatcacacgaaagatgctgtattcgtacatctcgtccaagagcagaattacacacggctcatttcacggtaaaaa

SEQ ID NO: 34077 - DNA, 355 bp, Setaria italica
  Peptide Sequence Number=SeqID_100051
caaaatgattcagctcaaggaatatgacccttcatgccatggtgaagaagttgtcagcataatgttcgaagttttgatgtatcctgttcttttagatgaccaatctttggctaatcagtttcagatgttcattgaaacaattgatgaatcatatgaattgaccctttcaactaatcagcaataccctggtgtctatgcacttgctttacttccaacccttaatgcaaaagtatattaactttttggaagcggaagttcttccatctacttcagaacattcaaggcctagggtgcagctgaaaagagctgacatatggcttggatttaaatcactccttggatttcttgaggcgcc

SEQ ID NO: 34078 - DNA, 330 bp, Setaria italica
  Peptide Sequence Number=SeqID_100052
ttgcaagtttgtgaaaaaccttttatttgaggttgccttggtgatcatgtgaactaacaaacctgacttgtcccgttttgttcaaatggatgattgcttcatttttattagatgtttcatcaatttagctgatttcaggctaggcatatctgtagatatctaactggagttgtgcgctgattgttttttcctattatttaatactaacttgcctattatcctttccagtttgaactgtattgctaagttgtttgctgtctcatatcattatttttggcccttttttctcgaacacgcgggagtgctgtgcatcattatatatgaagaaac

SEQ ID NO: 34079 - DNA, 352 bp, Setaria italica
  Peptide Sequence Number=SeqID_100053
caccgtactccagaggtcctgccaccagaacagtggccgctgccctccactgcccgttcctccacccggcactggcccactggccatccaataccagcccacggccagtggaggccctgccacctcattgctccacccctgctcctgcctccaccaccgggccttccctactgcatgcagctcccctataaggctgtagggcccaattccctcgacagaaacccagaaacctaaccacgccaagttcacacttgttcacacagattgactgcaaaccttcaccattttcaggcgtccatagtataggatgtgtggaattataaactattcgatcagattactaaccatagag

SEQ ID NO: 34080 - DNA, 689 bp, Setaria italica
  Peptide Sequence Number=SeqID_100054
ggtaaggatgtcgacctcacttgtggtctgaacaaccaccctaggctcccggacagctctcgaggctgcagttcccatgtcaatggtactggtgggggtcgcaacagcagtagtaatagtagaagttcctaatgcatccagcttccttcttttagattcagtctcatcctcatcaccctcacattctatagaagcagtgccatgtgttgccctctcatcctcctcattagatagcgttgatgagacatcaactgcatcttgagactccataagagacgcgtcacagtgagttgatacaggaacacaagcagctgctctaatgtcaacaccttcgctttgcgcattttggtttgtctcatcatcttgctgttggccagctgaatagtgactgttgccgaacatggagtctgatgccttagctttaacaattgttgcattagtgttatccttgactgcagtaaagcttgactgaagactggattcctgccgatgaatattcgacaaggactggttttgaaaatgagcaccgtagtccttttctgcagtacagaagctttgctgcttagaacccaagtggggttggaaggaaaaaaacatcattatcaaatgtagaatcttcagttatgatagcagctggtggtactgttgacttatcattcgtagccatcaaaaatggcaattgttgtcct

SEQ ID NO: 34081 - DNA, 590 bp, Setaria italica
  Peptide Sequence Number=SeqID_100055
tgaacaaccaccctaggctcctgaaaagctctcgaggctgcagctcctatgtcaatggtacttcttttagattcagtctcatcctcatcaccctcacattctatagaaatggtgcagaaaagcttgacctgccgtgccttgcagggcatgtccatgtctgtagattctgcagcaagctcaccagcttccttgggctgatggccaccatcttgttctccagcccaggctggccggcgccaagctccttggccagctcctccgtatcaccctatgcctccggagaagcagagttgccttctcggcctcctcgtcaagccccgccgcagcagcaaacagatcaacttttcatacccagcgaggcctaaatagcagatctccagaggcttctgctctcttcccatacatgcagccttcttctcaggagtcgtaccccgctggccggccagcccctcgagttgcttcttaagatcagagatctccaaaccccacctggttttttcatcaaggtaatagaggacctgcgcctagttcgcggggagggctggtgtgtgtcagcgggtggcgtcggcgcccatctcctccgcctcttc

SEQ ID NO: 34082 - DNA, 1404 bp, Setaria italica
  Peptide Sequence Number=SeqID_100056
ccagaaaaacatacattttaaaaatatcaatccaaggcctttacctaacagataaagttcattacaccaagaattgaaaattattctaattctgcacataactttctaatattgcaaatagtaagaaaaagtatgcactatagccttccttcttccgaatcagttatacattgcttcctccatcacccgtgaacctacaacaaaaaataatatgttaagcataaatgagattactgttgtcacataagagaaatgcaacttacaattgaaatatattcccatgcaaatataatcaacgaaaaatgcaagctttgcataactacactcagcaagttaagcataccaaatgaccattatctgcagtatgagggatcctgtaaaccagtaaagaaatagaccattacccatgtcttaatgaaatgtaggtgttagcagttaacctcagtcagaactgccttgcacattcattctaactctttaccatactgactgaaacattgttaatatggatgaaaaagttgatactaacaggacagctgaacagtcaaccccagtcagaactgccctgtgcgttcagtctaagtctttaccctactgagtactgattgcaacattgtttatattgatggaaaagtctatatgtagcagttcagtcactgcaaaggaatttgtcaagtgaacaaaggtggtgagtgtattctggctgccggaacttcatggttgtgcttttcctcataagttgtgatgactgacttcagatcatgcttgcggactgaacagccagggtgtgtacatttgtagtaactccttggatttggatttcctttaatgaccttctgaccatacttgcgccaccgatacccatcgttaaggatgtcgacctcacttgtggtctgaacaaccaccctaggctcctgaaaagctctcgaggctgcagctcctatgtcaatggtactggtgggggtcgcaacagcagtagtaatagtagaagttcctaatgcatccagcttcctgccgtgccttgcagggcatgtccatgtctgtagattctgcagcaagctcaccagcttccttgggctgcgacagaacaccacaaatgtgcagattacgcttgacaaaacctgatggccaccatcttgttctccagcccaggctggccggcgccaagctccttggccagctcctccgtatcaccctatgcctccggagaagcagagttgccttctcggcctcctcgtcaagccccgccgcagcagcaaacagatcaacttttcatacccagcgaggcctaaatagcagatctccagaggcttctgctctcttcccatacatgcagcctgctagttcaaagactaagaagcaagttcaggctaaagtcatcaaagcgcaaatcgtaggttaatg

SEQ ID NO: 34083 - DNA, 538 bp, Setaria italica
  Peptide Sequence Number=SeqID_100057
taaacagtaaccgcataggctgaacagctggagtggcacattaaaagcatgaacccactggagaagcgaaggatcaggatcgatcaatcaacaaaggttcttgaatgaggatcttcattttctcaacaagaaagtcaagcacatccttctcctcttcaaaagcagctgcctcagcttgccaaatgtcgaaccaggaggtctaatgcccttctctatcatatcttcaagcaggacacaagcttggctaacctcacccttgtcacacagaccattgatcagcacggagaatgtgtgcatgcttggaagaaactgcttcaacctcatgtacttccataccttcagtgccatctctattttatcattctcacagaacatctttatcatcatggtgtaagtatcagagtccggttggcagcgtttaatcatgctgcggaagaccctgtatgcctcatcatccttcccatggctaatcagagtatttaggatgatgttccaggtccttgaattcggtgtgattccatggctgacaccggttctt

SEQ ID NO: 34084 - DNA, 377 bp, Setaria italica
  Peptide Sequence Number=SeqID_100058
acccgtgcaaattaattattcatacacactacagccacgaccaatccaagttcaacaaactctggcgaccgacggcgaaacgaatggctttagccgctcccgccgaatagcgccttgagcttcttgacctccaattcatccaggacggtgaccttgctaacgatgtccgagggcaggttgttggcgaagagcgcgaagtccaggatcatgagtccggggttggcgctgctgtacgaggagagcgccaccgccgtgtcgttgccgaggttgtactggaagtgcagcaggccctgcgggaacaccatgaggtctcccttgtacagcgtcttggtgtacacctggttggtcagggaggtgatgaagccggcggccatggc

SEQ ID NO: 34085 - DNA, 347 bp, Setaria italica
  Peptide Sequence Number=SeqID_100059
ccccgttcaccagtttctcttcattgcagcgctacctgtcaagcttcaaatggcagcagccatcacggtcacagcaaagccgcagcagcatcgcccaagcccaaattggcgttccttgttcttgcgcagtcaaggtcgcagttctagcagccgtcctccatgcctaccagttcatcgaccggctgcatctgtacatgcgcctggctctgtacggtgtccacatctactgtttcttcgatctcctgctcccctgcatcgcggccatcggtggtgcgctcggcatggagatggagccacagttcgaccggccgtacctggcgtcgtccctgcgcgatttctggggggcc

SEQ ID NO: 34086 - DNA, 189 bp, Setaria italica
  Peptide Sequence Number=SeqID_100060
cgggaacgaggcgaaggcgttcttgaagttggcgtcgccgacgcgcgggctcgcgtacacgaacgccgtcacggggcacggcggctgggaggagtcggcgggcgcgttcaagccattggcggcgaggtccacggcgttgagggtggccagcgacgcgcccaggctgtggcccgtgacggtgatgctggt

SEQ ID NO: 34087 - DNA, 845 bp, Setaria italica
  Peptide Sequence Number=SeqID_100061
tgttcggtattccttgtcttggttcgttttgtattagtttacttggtagtaaccttgtagcaactagataacccatggggtgtcactccattcaagaaggtcattagtttgccttcccgcattgatcctcaccaaacctctgcagttgtcactctccatgggcagctatttgtgcgtgcaccatttgagcaatcaaaataacgatgccacatgaagcacaataatacaaagtttgccttatgggtgagattatgtggttgtgacatgagcttagaagttctcaccctgctcttcatcgaaaactagttccttgctgattctaatgcttcagactccttccttgctaatctctcatgtatcaattaagttaaactcattagttgacatagttctgcctgtattgggttgtctccattggctgtgatttgtagctaaagctaagttactaaaaagccttttagtttagaatgttaatatcctgatgctcaatatgttcatggtttctttcaatttaacccgcataaagtgtactgtttgtagcaatgtagccccagtatttgagttctcagaacatgtagacaggttactggtagattcattgtatgtaactgttgccagatgcattggtattcaacatgtatggtcaaacaatctaaactttctgtccgcctttgaaacctgcttctctatgatgtgcctcagtattatccgaaaaacaggtagcaccagggaagactgcgttgaggaccatggttgttggtttgtgttgcttccaggacaatgtttttcacagattcaagattctgtaagaaaagattgtaacattttcttgttctgatgggcca

SEQ ID NO: 34088 - DNA, 1528 bp, Setaria italica
  Peptide Sequence Number=SeqID_100062
acaatagggggaagggcggcgcagaacggggcggccggcacctttgattccgtggaggtttcggtgaagcccgaagcggcgggcgcggaggatggggacggggaggagctgaacggtgacgcggcggcggattcggttggcgaggctgagaagttggagaacggggatgagcttgtgacggtgggcggcgagaaggaaggctcgccagagggaggtgctgcggagggtggtgacgataagggcgtggatggtcagaatcagcctggtgagaaccagcttgtgctggtgtcggctgaggaggaccctgtgatggccaagctctcaaaaaattccttcatgttcgattactccactggcggtgatgactcggggactgaggaggagcaggctgccttcatgaaggagctcgagcggttctacagggagaagatgatggagttcaagcccccgaagttttatggcgaaggattgaattgcctcaaattgtggagacaagttactggattgggtggctatgatcaggtgacgtcatgcaaactgtggcgccaagtgggggagtcattcaaacctccaaagacgtgcacaactgtttcatggaccttccgtaacttctatgagaaggcactccttgaatatgagaaacacaaaattgaaacaggacagttccaagtagcttcatctactttagcagatcgaattggttctgagagccaggtgggtggaagccatgtatctggctctggaagagccagaagagaatcagcaactcgtgctatgcaaggctggcattcccagcgtctactgggaaatggtgaaattgctgatcctataattaaggataaaggcactattgtcttgaagaaggataagactcctaaaagcagtggttctgccaagaggaaaaggatgccatccttggaagatgacagggtgatgccatataaatccgataagctacaaaatgactcaatggttattgacatgggccctcctgctgattgggtgaagataaacgtcaggagaactaaagattgctatgaagtctatgcattggttcctggccttctgcgtgaagaggtgcatgttcagtcggatcctgctggtcgtttgatagttactggagaacctgagcaactagataacccatggggtgtcactccattcaagaaggtcattagtttgccttcccgcattgatcctcaccaaacctctgcagttgtcactctccatgggcagctatttgtgcgtgcaccatttgagcaatcaaaataacgatgccacatgaagcacaataatacaaagtttgccttatgggtgagattatgtggttgtgacatgagcttagaagttctcaccctgctcttcatcgaaaactagttccttgctgattctaatgcttcagactccttccttgctaatctctcatgtatcaattaagttaaactcattagttgacatagttctgcctgttagccatttccccctatgatacactactaattctatgtcgtttcactctgaagccgtc

SEQ ID NO: 34089 - DNA, 639 bp, Setaria italica
  Peptide Sequence Number=SeqID_100063
cactgctgttgaatttccaacagagtttgtccacgagtacatcacaaattgtatccaatcatgtcaaagcattaaggataagtacatgcaaaacagactggtgagactagtatgtgttttcctgcagagtctcatccgaaacaagattataaatgttcaagatcttttcattgaggtacaggcgttctgtattgaattttcacggataagggaagcagctggtttattccgactacctcaatctttggagtgaaaggaattgtatgttattacttacctcctctgtagtctgtacaatattgcatcctttttcctaattctgtacatcttcattgccatggttcattcaatgcctcaaggttgttggatgcaatcatgttctgtactgaaattttccatgaaacctttttggaactttatggactgtgatagcatgatgtgatagaattgtgctgattgtttgaaattccaattgtcagatagaccggttgtatcgacatcgaatgtacttttcttgttctggatagttctatggccactctgggtgttcaagatcacttgttacgatatgcacatcatttctcgtggaatccgtggcaccctttactaattaccgtgcatacccttgaaagagtggtg

SEQ ID NO: 34090 - DNA, 931 bp, Setaria italica
  Peptide Sequence Number=SeqID_100064
tttcgaagctaattaactctcctgacattgcaggttactttgaaggtcttgtgcatatggacatgagcctgcattctatggaagttgtgaacaggcttaccactgctgttgaacttccaacagagtttgtccacgagtacatcacaaattgtatccaatcatgtcaaagcattaaggtttgttcttcttttgattcatttaattgaagttgatgacaaaagacattgacccacaatttgtctaacatcacaccctaattgaagttgatggttaaagaaattgaattttaatactttgtgaatagttatacattccagtgggggaacttaaccttgactgtattcccatgggaatgtgagacctctactatgtgcctgttgattacaatgtttgtagaaataagtgatttactgctactattctgtgaacaaatatcagtgcttttatgattagttatctaatcactatatgtaagagtgtgagagatttacagttctgttacatgttttacattattgcaaaacaaattcctggtggttgattaaaatgttttgcttcacttatttaaactgtgttttgcgtattggttaatctgggacttttcatggtaatgcttgagaaatgttttatcataatgattctttttatgagcaggataagtacatgcaaaacagactggtgagactagtatgtgttttcctgcagagtctcatccgaaacaagattataaatgttcaagatcttttcattgaggtacaggcgttctgtattgaattttcacggataagggaagcagctggtttattccgactactcaaatctttggagtgaaaggaattatagaccggttgtatcgacatcgaatgtacttttcttgttctggatagttctatggccactctgggtgttcatatcgtaacaagtgatcttg

SEQ ID NO: 34091 - DNA, 617 bp, Setaria italica
  Peptide Sequence Number=SeqID_100065
tttttttttttttttttttttttttctttttaaactaatcagcacaattctatcacatcatgctatcacagtccataaagttccaaaaaggttcatggaaaatttcagtacagaacatgattgcatccaacaaccttgaggcattgaatgaaccatggcaatgaagatgtacagaattaggaaaaaggatgcaatattgtacagactacagaggaggtaagtaataacatacaattcctttcactccaaagatttgagtagtcggaataaaccagctgcttcccttatccgtgaaaattcaatacagaacgcctgtacctcaatgaaaagatcttgaacatttataatcttgtttcggatgagactctgcaggaaaacacatactagtctcaccagtctgttttgcatgtacttatccttaatgctttgacatgattggatacaatttgtgatgtactcgtggacaaactctgttggaagttcaacagcagtggtaagcctgttcacaacttccatagaatgcaggctcatgtccatatgcacaagaccttcaaagtaacctgcaatgtcaggagagttaattagcttcgaaaggacctcaacagcaatgagcggat

SEQ ID NO: 34092 - DNA, 1636 bp, Setaria italica
  Peptide Sequence Number=SeqID_100066
ccgcctccgcgtcggcggcgcgctctgcttcctcctcgaggacaagaagatgctccatcctactggccgtttaattgcatttgcaattcttcatcagagctattccccccagacaacaaatccatatgttcctatattgttaaatgcagcctgcgatgaaacatcagagaaatcagaacgggcatttgtccaactattattgacttcatccagtggaaacaataataatgaggtcctgaatcagtcagctgtagattacataaatgggtctgtttcagcatctcaggccttgttgccacgggaacaacttgagaagcaatattgcagtaacggtgtacagtctcaacatcagattagtagtttcagggctgctgctgttagaagtgctataccagatccagatgtgcctcaaagttgtgcaaattcatcagagtctgcgatatcattacctggaagcaaacagaaatctgcttctgatgatagagattctgctcttgctggtttactccatgaaaaatcggggggaagattgggtcctcagtggattcggccaacacccccaagacttcctgtactagacggggagctacaatggctgaaccctgacaataaccacgagctattatgggattatagcatgtgtgctgatacgagtcgaggggctgctatccgagacttgattgcaagagccttaaaaggtccacttgcacctgcccaacaggagcaagtcatagtagaactggcaaaggatcctaaactggtttattactgcgggatgactccacagaagcttccggatcttgtggaacataatccgctcattgctgttgaggtcctttcgaagctaattaactctcctgacattgcaggttactttgaaggtcttgtgcatatggacatgagcctgcattctatggaagttgtgaacaggcttaccactgctgttgaacttccaacagagtttgtccacgagtacatcacaaattgtatccaatcatgtcaaagcattaaggataagtacatgcaaaacagactggtgagactagtatgtgttttcctgcagagtctcatccgaaacaagattataaatgttcaagatcttttcattgaggtacaggcgttctgtattgaattttcacggataagggaagcagctggtttattccgactactcaaatctttggagtgaaaggaattatagaccggttgtatcgacatcgaatgtacttttcttgttctggatagttctatggccactctgggtgttcaagatcacttgttacgatatgcacatcatttctcgtggaatccgtggcacccttactaattaccgtgcatacccttgaaagagtggtgaaagagaatgccaagagcagagtcagccagctagtcagataacatgtggtattaattgttggtgcaaatttagatcagtttgtactttgtaggctcatttgtacggcgatgaataatgcatgcatgctttcttcaaatcttctgtatttgcatcgtaactgaaacaatgttgcaatctgttctcttgtagtctatgagtggtgcaagatagttggatacgttacccagaattgattttccgttgtgtgtatattacatgaggcatgtcagccttccacca

SEQ ID NO: 34093 - DNA, 266 bp, Setaria italica
  misc_feature (245)..(245): n is a, c, g, or t
  misc_feature (263)..(263): n is a, c, g, or t
  Peptide Sequence Number=SeqID_100067
taggaggcgtgggtgaggagcgtgttgggctggtagcaccggccgccgggctgcagctgggagcagtcggcgccgccggggccgcacgcccagtccagcgcgttctggaggtcctcctgggaagcgcccggccgcgccacgcaccacgtcacgccgttgatgaacgtcatgttgccttccggcggcgacagtgtcgggatcggcgtcaccgactccgccttctcctgcggcgtgatgcggccggntgcagaggctatgaaccntcc

SEQ ID NO: 34094 - DNA, 795 bp, Setaria italica
  Peptide Sequence Number=SeqID_100068
tccctcagcaagacgataaggaggcaaacaaacatgcagatgatggagttaataaaactgctggagcaagtactgaagcttcaggtgaagccaataacgttcctggaaccgagaagaaccagcaagcaggttcacaggattctgtatcacaatctagcaggaggagagctactaaacgaactgcattttctgattcagattcagaagacctagacctatcaaaggaggacctcgtgaagctacttcttgagaaagatgaatcactgaagtcgaaagatcaagaggttaaagacatgaaggataaggtgctacgcagctatgctgagatggagaatgtccttgccagaacaaagcgtgaatcggagaacaccaagaagtatgccatacagaacttctccaagagtttgttagatgttgcagacaatttgtctcgagcatcatctgttgtcaaggaaagtttctcaaagatagatacgtctaataactctgatgaagctgtaccactctaaaaaccctgctggagggtgttgagatgactgagaagcaacttggagaggtcttcaagaagtttggagttgaaaagtttgatcctctgaatgagaaatttgatccaaataggcactatgcacttttccagattcctgatccttcaaagccttcagggactgttgctgcagttgtgaaggtatggatttcttattggttgttgttattattggtttactttaataatgtaatcatagcttgttgggactcagtggttggcgttgcaattgtttgtattaaatttgtaag

SEQ ID NO: 34095 - DNA, 960 bp, Setaria italica
  Peptide Sequence Number=SeqID_100069
acggcggcggtcgcgtcctcggggcggtcagcgctggcggcggcggcggagccctcgcgcttcgatcaaggtcatcctttgttaaatcagccagcacgttactcaacatcggcatttcaaaggtttgggttttcaacttcggcccctcagcaagacgataaggaggcaaacaaacatgcagatgatggagttaataaaactgctggagcaagtactgaagcttcagattcagaagacctagacctatcaaaggaggacctcgtgaagctacttcttgagaaagatgaatcactgaagtcgaaagatcaagaggttaaagacatgaaggataaggtgctacgcagctatgctgagatggagaatgtccttgccagaacaaagcgtgaatcggagaacaccaagaagtatgccatacagaacttctccaagagtttgttagatgttgcagacaatttgtctcgagcatcatctgttgtcaaggaaagtttctcaaagatagatacgtctaataactctgatgaagctgtaccactactaaaaaccctgctggagggtgttgagatgactgagaagcaacttggagaggtcttcaagaagtttggagttgaaaagtttgatcctctgaatgagaaatttgatccaaataggcactatgcacttttccagattcctgatccttcaaagccttcagggactgttgctgcagttgtgaaggttggctacatgttgcacgatcgtgttctccgccctgctgaagttggtgtcactgagggcggtccagttgaagaagaaccagaggagaaatctagcaagtcagaataaactttgggatgcctgctgcacgcatctgactacccttctttttgttggataatcatacatcatatcataggttgtgttttcacaaggagatttgtaacacaaatcgccatttttgtagtggtgagcatgttcaacgag

SEQ ID NO: 34096 - DNA, 723 bp, Setaria italica
  misc_feature (702)..(723): n is a, c, g, or t
  Peptide Sequence Number=SeqID_100070
ttatgtgcacttggtgatgctgtttctatgcttagtgagtcctcaatgcagaacactaagcattaggcaccactcccaggcctggtctcattgtgtcaccagactaccagagcagcataagatgcaaagtgcaccattcaagtaacctgcaacaccggatattggttttggattctttgcttgagatttccaagcaaacttaacaaaatttgcaagaatgcgacgggcctcaacggaaggcaactgtcagtatctgtttattgcgtttgtaaatttgtgcggcattactattcatcatcttgagggcctaagggtctgtacagaattaggtgccctagggctgatgaaatatttccgagacaggatgttctttcgggctagaggctgacgtgattatacatgtactagatcagtatgtcatgggaacttaactcagttttgatatgcgctggctggagtttgtatgatggttagatcaaacaattagaaaacaaaacagggtgatcttgtagcttgaagaagttgatcatgcaatgtgcatgttgtaaggaggatgtgtctgaggtctcccgttcattattgtacatatatttaggactgcctaccgaaaggccttgtaactagagtaaaatgttcaaagcactcgagtcatcagctcattataattaaaattaatggtattctgaaaagtttgatggaacnnnnnnnnnnnnnnnnnnnnnn

SEQ ID NO: 34097 - DNA, 581 bp, Setaria italica
  Peptide Sequence Number=SeqID_100071
actcgtttatcatttcttatggtttggatgtttctttgctgttcccttgatactataacaaagagcaaaagcctgtctgttatgaacatcagtcctggagatggactgcgtgttattcctgtgttccctctttgtgctattagcttaattattattgtgaaatgcagttatggaatgccagctctggtcaaggattcacacagtttacagagcaccggaaaagagcttggtctgtgagtttttcagaagtggaccctactaagttggcaagtggaagtgatgattgttgcgtgaaagtatggagtattaaccagaaaaattgcattgatacaatcagaaatgtggccaacgtatgctgtgttcagttctctccatactcctcccacatgctagcatttggttcagctgattacaagatatactgctatgacctgaggaacacaaggatcccttggtgtactatttcgcgacatggtaaagctgtcagttatgtaaggttcttggatccagaaacacttatctctgcatcaattggtactaacgtctatttgtaagtattattgggtattcttaaccggact

SEQ ID NO: 34098 - DNA, 2864 bp, Setaria italica
  misc_feature (44)..(44): n is a, c, g, or t
  Peptide Sequence Number=SeqID_100072
ctatggccagagtggacccgttgcttaatggtgctggtggaaangtttcaaaatctcactgtgagggcgactcagtgagggaactgattaagcctggtcggcaaacattgagcaagtttgagaaaatgaatttgtttaagcagatccttgatcttgtggataagtgtcatgcacagggttatactttacaacatttgcgaccatcatattttacaattccatcttcaaaccaagttaaatatattggttcttacactgcacaagatttgccaacatcaatcaaacaagacgtcactagagaagatcttgggaacagaaaaaggtgtttgggccagaaaattgatcaccaagagtctaatggccacagaaattcaatgctgaagtatcaaaaggttggtgaccaaggctcagttgctgtcaggcgaccaacacataccttttggactgaccaaagaggcgacaatcaaaatgaagatgtcaatccaggtgttttgaggccagaaaattatagttacactgtcagagaacgttttaagtttgtcgaaccttatggcagtaatacatcttgtgctcaacatgtatctagttctggcaaccaacaaccagcttttgaattgaggaatctagaggaaagctggtacatgagcccagaagagctcagtcaatttaaaggcacattcccatcaaacatctacagccttggggttcttctatttgagctcctttgctgttctgagacatgggaggtgcactgtgctgcaatgtcaaatcttcgccaacgcatcctgcctccaaattttctttcagaaagtcctaaggaagccggcttctgcctttggttactgcacccagatccttgttcgagaccaaaagcaagagacattcttggatgtgacttgataaatgagggtcgggatttgtccttgttagagcagacaccagtttccatcagtgaagatgacactgaatctagtttgctacttaatttcctttctcaattgaaagaagaaaaggagatgcaggctgccaagttatcagcagatcttggaagcttacaaacagacatcacagaggttgagagaagacactcagcaagaatgggatttagtttagtggacacggatgtgctggcaagttctagtgctttgtcaggagcttctgtgagtgcctctcaagatgcattgctgtcaggtctggtaccatcattgtgcaagtcaagcatatacgaggagagggtaatgaggaatttggagcagcttgaaaatgcatattattcaatgaggtccactgtggacacctgtgaaactaatgcaatcaaacgaccagataaagaggctttgagggtccgtgaaaatttctatcaagtttgcagtgattctgatgctatgggtgagcaaacagaccgtcttggaagctttttcgatggtttatgcaaatatgcccggcacagtaggtttgaggtgcgaggaattatgaagaatgcagatatacttaactctccgaatgtgatctgttcgttgagtttcgatcgggatgaagaatattttgctgctgctggagtttcaaagaaaataaaaatatttgaatttgatgcactcttaaacgatcgtgttgatattcattacccattgatagagatgcctagcaagtccaagcttagctgtgtctgttggaacaactatataaagaactacctggcatcaacagactatgatggcactgttcagttatgggatgccagctctggtcaaggattcacacagtttacagagcaccggaaaagagcttggtctgtgagtttttcagaagtggaccctactaagttggcaagtggaagtgatgattgttgcgtgaaagtatggagtattaaccagaaaaattgcattgatacaatcagaaatgtggccaacgtatgctgtgttcaattctctccatactcctcccacatgctagcatttggttcagctgattacaagatatactgctatgacctgaggaacacaaggatcccttggtgtactatttcgggacatggtaaagctgtcagttatgtaaggttcttggatccagaaacacttatctctgcatcaacggacaacacattgaagatatgggatcttaaccggactaattgcagtggattatctactgattcttgcagcctgacactgaatggtcataccaatgagaagaattttgtagggttatctgttcacgatggatacataacatgtggctccgaaaccaatgaagtattttcttactacaaatccttccctatgccaataacttctcataagtttggttctatcgacccgataactggacaagtgacaaatgaagacagccagcaatttgtgtccagtgtttgttggagagggaagtcaaacatggtagtggctgccagctctagtggtagcatcaaagtgcttgagcttgtgtgaaagatccggtgagagttctgttgaaggaaaaaggttatagggttgccatgtgggccccgtgatgcttatgtgcacttggtgatgctgtttctatgcttagtgagtcctcaatgcagaacactaagcattaggcaccactcccaggcctggtctcattgtgtcaccagactaccagagcagcataagatgcaaagtgcaccattcaagtaacctgcaacaccggatattggttttggatgctttgcttgagatttccaagcaaacttaacaaaatttgcaagaatgcgacgggcctcaacggaaggcaactgtcagtatctgtacattagtagtacaaccaagaactaaccaagaaagaacaaagaacaaataaaagaaataagaacaaaaagtaagaaacaaaaccaaaattaaacaaaa

SEQ ID NO: 34099 - DNA, 426 bp, Setaria italica
  Peptide Sequence Number=SeqID_100073
agcgaaacaccagccttttgcaaagagattttcattatcgcagttgaccttaccagcctgcacaaaagagaaggctattagataagtatgttgttactgtatgttgagcagcgctattatttcttttttttatctcatcttacccttagagcaccatccagtgaatggaccacgtcctgcataacattttctagaacaaattgaccttttgactggggggtataaaataacagaagccaagtaattccttgatcagatatttctttactgaaaatttgtgtagtgacatcctgaatcttgacagcaccagaatgctgaccagaagttccagtattagctctagttgaaccagctgatccaccatgctggctagcacccattgatccaccaccaaataagttagagaaaacatcactaaaatcaaaa

SEQ ID NO: 34100 - DNA, 259 bp, Setaria italica
  Peptide Sequence Number=SeqID_100074
ctggtggctgctgtgttgcctgcgttcggctgaattatatttatgttatatatttataagtaccttaatttgggtttaatctggattatctgaccatgttgattggtccattcatttgattcgccttgccgtttctccccctctaagtcaatttccatctgtaaagaggggaggattggtggcgctatttgtttggacatgaaagttggaaagtgatcaatacccatttgtttgaattttgctgttaccatttctattt

SEQ ID NO: 34101 - DNA, 243 bp, Setaria italica
  Peptide Sequence Number=SeqID_100075
ccgtccggccgccgccatcaacgccgccggtgggaggtgcctgtcgacgccgacgctggtggcgccccggccctgcttgggtccggagcgcccttccctccctcctcgtgcgtctgttttccacggcggttgggtcacgtcaaaagtctaatcttttatctgcctcccgtcgctctgacgccgccttttcttgactaatcggcggcggaattagccgactggggttggctgccttgtcttctt

SEQ ID NO: 34102 - DNA, 195 bp, Setaria italica
  Peptide Sequence Number=SeqID_100076
ttttgccagacaagtaaagtgacaaaaatccaagaccagcaaaagaccacgaagtgtggccactaggaaagctcttgcgcccatcagttaagaagcttttctcaccatggcaaatcacatcaccagtcacctgatcatataactgctttccatcaggaaagcatcgccaaaagaagtctggcctaggtctcccta

SEQ ID NO: 34103 - DNA, 147 bp, Setaria italica
  Peptide Sequence Number=SeqID_100077
gtttgatacatggctctccagtcccccactatggtggggagacgaagaaccaagatgcgggtagtagctaaccgaccccgtggcctgataaaatagcacgcagcttgcacgtgaaaggtaaataaataaataaataaacttccttgg

SEQ ID NO: 34104 - DNA, 267 bp, Setaria italica
  Peptide Sequence Number=SeqID_100078
gaagaaggctcgcagggctagcaagaagaggccgatggagataagcacgaaaatgcggccaccgaagctcagggaggtgatccaggttcccaagaaggttgtaagggatcccagatttgaacctatatatggatctgttgacaaagaagggttcaggaaaagatacaatttcttatttgatgaagactttcctgctgaaaaacagagacttcaagaaatgattaagaaatcgaaggacccaaatgccattgaagaaatgaagagtcg

SEQ ID NO: 34105 - DNA, 808 bp, Setaria italica
  Peptide Sequence Number=SeqID_100079
cttgtaaataagtaattatctggctcaatcatgaaaggttatattgtgcactttatctttgaaatccatatcaatttatgaaattgctcttttccataggttgtaagggatcccagatttgaacctatatatggatctgttgacaaagaagggtaagagttgaatgcacagatgcagtgtatttttctactgtctccacacactttttaaagctttttttatctatcagtttctgctttgctgttgtatctcgatataacttttagaagttctttgattgtgtactcagtttaaggctgttatcatgtcttatttgcttacaactgaaatgggtcaattcagaccactaacctatttcacctagttgattacttccatttcttttccttcccatggcatgattcctcaagattagtattcctacatggtcttatttgattgctcactcttgtactggctgtaagcttgatggtttctgcaacacttgctgattttgttggcatgcaggttcaggaaaagatacaatttcttatttgatgaagactttcctgctgaaaaacagagacttcaagaaatgattaagaaatcgaaggacccaaatgccattgaagaaatgaagagtcgtgtcacatggattgataagcagttgaagtcgcatcctcgaaagaatgttgaatcagagatcctgcgcgaacatattaagaaagagagggaagcagcaaaggccggaaagcgaccatactatcttaaagagatctgaacttcgcgaaaggaagttgattaataagtacgaggagctcaaggaggc

SEQ ID NO: 34106 - DNA, 1048 bp, Setaria italica
  misc_feature (1040)..(1040): n is a, c, g, or t
  Peptide Sequence Number=SeqID_100080
ccgccatgagaggccccaaaccgccgccccaccgggagcctccgcctcgacgtctagcaagcgcgaaccggaggaagacttgcccagcgcatccgaagagtcggacgaggacgaggaggtctcctcgtcgtcggtgtcggagtccgagtcagggagcgacgacgaggatgtggcgcgggagcgggagctggagcgcgcgctggccgacgtgcccttcggagagctgcagcgcgcgagggccgacgggtcgctcgccttgcggactgcctctgcggccaaagcagccgcagagaagaaggctcgcagggctagcaagaagaggccgatggagataagcacgaaaatgcggccaccgaagctcagggaggtgatccaggttcccaagaaggttgtaagggatcccagatttgaacctatatatggatctgttgacaaagaagggttcaggaaaagatacggaaagtcttcatcaaataagaaattgtatcttttcctgctgaaaaacagagacttcaagaaatgattaagaaatcgaaggacccaaatgccattgaagaaatgaagagtcgtgtcacatggattgataagcagttgaagtcgcatcctcgaaagaatgttgaatcagagatcctgcgcgaacatattaagaaagagagggaagcagcaaaggccggaaagcgaccatactatcttaagagatctgaacttcgcgaaaggaagttgattaataagtacgaggagctcaaggaggcaggaaaacttgatgccttcatggagaagcggcggaggaagaatgcttctaaagatcaccggtacatgccataccgaaggaatggggacagtgcatgatgatgtctcgaggcgaaagggtgatgctaggatggtctttttaatgctcactgaggagtcagtgttcactggtactttgttaccctagtccacaagttacattgagctgtgagttggtaatagtaacagattttgctaaatcaaattatggatataatattttgttttgtgcaataaaaaaaaaaaaaaanaaaaaaaa

SEQ ID NO: 34107 - DNA, 466 bp, Setaria italica
  Peptide Sequence Number=SeqID_100081
tacttagaggtagttgtgtgatgcatatcaacttggagtcactttatcatatttttgtcacattcctaatttgacagtagtagtgactgaaagccaaattggtccaagaaattaggattctgaagtctaaattgctgtccttcctttttcttatgttatggagatttgaaatgtcagcaacatattctttagctaggagaccatatcgaatatgttgttacatacctcatcagttgctccagattttattctggattgcaatatgcaccatttcttcatgtttacccctgttatgtgcagaaaataatgtaatattatcgtaaatatgtttcgactgaatagatttaatggaagtccagtttaactaaccaatctttatattcacttgacatgttgaactggaggttgttcttagcgaccacctgctgtggatctgtaagaaagggaagaacttctgcaagataag

SEQ ID NO: 34108 - DNA, 345 bp, Setaria italica
  Peptide Sequence Number=SeqID_100082
gcatatgggaccaagtgaaaagcctatttcaaaatttttcaccaagaaatctactgcccacgatcaatcagtgaaacctgagaaaacaaactttggagtttgcagaaacacattcttccagagcttcaaaggtggaatgcgatgaatcagtacaaaatcaaccagaggatgtcaatcaacaacatggagagaagcgaactacttctagtactgtcaaagatgaacctgtcagcttgggaccccaagtttttggaaaacctcagagcattaaggatgaagatactatgacatcaactggtattactatcgaagaaacaagatgtattttgggatcaagagaaagat

SEQ ID NO: 34109 - DNA, 2482 bp, Setaria italica
  Peptide Sequence Number=SeqID_100083
tttgcacatttcaacaactggtacatcagtccacaagcgtatacaagtgccacaaagaaaatacacatacaaatgtttcagtgttacgtaagggttgcatttctatcgtcgaaccaacatatgagtactatgttactagatggaaagtgtttatgtatgaatatagctacaaaatttgtaagaaccaaagcttgctatgtggatctttcaaatccagaaaagaatgaagacactgcagttcagtagttcacaaacccgcaagtgaacaacagctctgaacagctgacatatcatctcatggtagccctcaaggtgagggcttgtgatttcagtagtagaatctgcacttgaatcttgtgtatccactatccagtctgctatgacagtacaacaacaaaatggcgctagaatctccaagtgtatatctaattatgtgaaaaatgtgacaacatctcttgtgtatcccctaactattaacatgcgtgggacattctctacaagcaaatccatgtactccatgtagaaatacgaaggatgatttagaggtggtgggggcaggctcacaagcaccacagctgccattctggagtacctaagtatcgtggagttcaacttcaacattgtgtataggaacttgtcaaccttctgttcattcacaacgacttgcctcccattctccattagcggatgcctttctctttgtgcagtttccttcatctcgtcaaggtacatcctgatcctttgctgtgcacttgtgtaagcctcatgggagtcatcctgctgagcgacggtgctgctgctctccatgtgtgattcccatgatttcatagtcacaactatgacctcagcttgcatcctaagatcatacaagaactttttgacatcagccttcagctcctctgcatcagtgtcctcttcagatatgcagaagacttggatcttacagctctcaaagctctcctttgtgagcaggagctgagacagaagaagcatcaatcctccatctctcacaatccagtacaggtcaattgtcccgtactgtcgctggtactcattaggccactcatcgagccccttcacaatgactactgccttgttagcaataatgcaatcatttattatgctgacaaatgttgacggtatctgtgtcagattctcacgtcgccagatctcagggtaccgcatcacaacaatgttcggcttcaagtttcctaggcccatggtctgcacaatgctacggaagccatcagacatagtgggggccacaatgatctccgcaacaccctcacagcgtttgtagtcaatgtaagcatccagttgacggcatgcagtcttcgcatcctcagccagttcatgataatcaccatcaattattgagacaaaaattgacataccacggcccttcttcttcatacaattagcaaagtctgcaagtttcggatgacaaggaacattttccggaagtttaccccatggacggcagaataccaaaggaatggggtaccaattcttaggatggacttggtttgctccaagtgatctgagactccggagtgccaactgaaagtatgcactcttgaacccatctccccagtctccagccttcccttttatgctcacatagtaatagatgaggcttgcaagggcaagggagacaacagtgaaagaccaagagatcagaaacatgatcacaacacaaagtaatgcaccaacaagtgaaaggctccaatggtgaaatttccatcgagggcgccaactaggagcatcaaggaggtcaagcagaaagcatgacaggttcacaccagcatagcacagaagaaaaaacattgtgatagtgggtgtaatcaaatccaagtttccaataaccacacagcaaatacagatgaatgccgtaaataaagtggctgcatgaggctcagatccctcagaaactttaaagtaattaagaactgggagaatgtcgtcattcgctattgctgcaagtaatcttggagcccctgtcagactctgaagtgctgcacctaaagtcgacagaataataccaatgtaaatcactgcaggagcaggccaagccactgtagcagtaagaagcctatcagttagaagctcctcccttgtggccaaggctccaaatagaagcacagagaacaggtacatagcagttgttgtaagagttgcagataatgtgccgattggtatcgaacgttgtgtatctttcagtgaggcagatcggtttgagccagccataattccagtgactgctgggaaaaagagacctaccaaagcattgaaatcccaatatattgatccacttggatcaggaacaccagcattgtttgtacgttgataatctgatccccaattatctttaaatgtggttatactcaacccagtgattccctttggagcattatgccttggtgcaatgaatacaccaagatagatgcacaacaacgaaaacaggactggtaattaagaaaag

SEQ ID NO: 34110 - DNA, 525 bp, Setaria italica
  Peptide Sequence Number=SeqID_100084
gcagggcgcaaggagtacgccgccgaggtgcgcatcatcagccagctgcgccaccgtcacctcgtccgcctcgtcggctggtgccacgagcaccgcggcgacttcctgctggtgtacgagctcatgcccaacggcagcgtcgaccaccacctctacggcaagggcgcgcccctcgcctggccggcgcggtacgacgtcgcactgggcctcacgtcggcggtgctctacctccacgaagagtgcgcgcagtgcgtcgtccaccgcgacatcaagccgagcaacgtcatgctggacgccaccttcagcgccaagctcggggacttcggcctcgccaagctcgtcgagcacggcagccagccgtacaccaccgccctggccggcacgctgggctacctggcgccggagtgcgtgatgacgggcaaggcgagccgggagtcggacgtgtacagcttcggcgtcgtggcgttggagatcgcgtgcggccgacggccggcggagctcagcgaggagccgagcaaggcgagg

SEQ ID NO: 34111 - DNA, 261 bp, Setaria italica
  Peptide Sequence Number=SeqID_100085
accaccggtgccttggacgaggggacttcgaggtagagcttgctggagaggatgcgtttctgccgtagggactccccggccggcgccggcgccggcgaggcggaggaggaggccatccgccgccagcgggggagggggagggggagggagagggagagggcggaggcccgtgtggcgttggggaggagccgaatggtcgaggcgcgcggcctgcgccttcggccggggaatcctgccgcggctctggtgcgcgcgtgacgt

SEQ ID NO: 34112 - DNA, 143 bp, Setaria italica
  Peptide Sequence Number=SeqID_100086
aattgctaccattacctcgaagaagtggggggacgaagcatgcgcgagtacggtcgaatcctaacaggatgaataaccaatcggatttgtgtcgccatcagtcctactgtggcgcacatcagacagcaattaaatatgcgcgt

SEQ ID NO: 34113 - DNA, 281 bp, Setaria italica
  Peptide Sequence Number=SeqID_100087
ggttggaatcggtcgcggtatgtgaggaggcagcccgaccgctcccgccgcccgcctcctctccctccgcctgattacggtacggacgaatgcctgttttcttctgatttgggttatatcatcccgtaatctcttgcttgggttaggattggtttagaacttgttatatcttggtgtttactgcttcattcttgcggaacggagatttggtgacttggtcattgattcggacttaaaatcagagttgccgatgtaaactaacctgttgctttaggcctcct

SEQ ID NO: 34114 - DNA, 991 bp, Setaria italica
  Peptide Sequence Number=SeqID_100088
gagaagctcgcgggggccggcggcgatggggacgccgcggagctggcggacggcgtggggctgtggtacggccggagcaaggcgtacgagccgcgcacgccgctgatggtggcggcgacgtacggcagcgccgaggtggtgtcgctgctgctcggcctgggatgcgtcgatgtcaaccggcgcccgggcgtcgacggcgcgaccccactgcactgcgccgcctccggcggctcgcggaacgccgtcgccatcgtcaagctgcttctcgctgccggcgccgacccggtcacccccgactccgccggccgcttccctgccgacgtcatcctggctcctcctgcttcgccggatgccctgggcgatctggagatgcttcttggccgccgccgagggctggctgtcacgacctcggtaccatcgggttcctcatccccgccgctctcgtcctcgccggatgagggcaacaggtcgccatcctcacggtcgtcttcgttgtccccgatcaccgtggaccgtgccaagaaggagtacccggtggatccgacgctgccggacatcaagagcagcgtgtatgcctccgacgagttccgcatgttcgccttcaaggtgcggccctgctccagggcctactcgcacgactggaccgaatgtccattcgtgcaccccggcgagaacgcccgccgccgggacccccgcaagcacccgtacactgctgtgccctgccccaacttccgccgccctggtggctgccccagcggtgatagctgcgagttctcccatggtgtgttcgagagctggctccacccgtcgcagtaccgcacaaggctctgcaaggagggcgcagcttgtgcccgccgcatctgcttcttcgcccatgatgaggatgagctccgccatgtgcctcacaatagtggcgcaggtttgctgtctccccgtgcctcttcatctattgacatgactgctgctgctgctcttgggctgctacctggat

SEQ ID NO: 34115 - DNA, 632 bp, Setaria italica
  Peptide Sequence Number=SeqID_100089
ccacggtctgcaagctgaattgccatagcttcttggccaactcagcatctgaagcttgcgaggttgggctggctatattacaattggcaaagtatttcccacttatgcccttgacttgaggatgcattgccacatagcatgtcgttgcggcaccctgttctacatctctacacatgattcttccaatggagttcaataggacagagacaatagtcctgttcctaaaaaggttcgttgtgatgacaccaggatgaactgcatttgcagaaatattcactccttcctccttgaggattcgggacagttcgttagaatgaagaatgttggcaagctttgattgaccataagcaataaagtcattaaaaccggagggatcatgaattttgctgaagcatatcccttcaggataggtcaacatatgccccgaggacgtcagattaatgattctcccctcaacgccactgtccctgcaggcactcttcatgttctccagtaagaggtttgttagaagaaaatgcccaatgtgatttgttgcaaaatgcaattccagaccgtcacgggaacgtgtgcagttcctcgtcatcactccagcgttgttgatgagaatgttgaggggcaggttcagagagtcg

SEQ ID NO: 34116 - DNA, 341 bp, Setaria italica
  Peptide Sequence Number=SeqID_100090
ctccgtctcgagggatctcgatggctgccggcggcgcacacaggtgagctcctccgacttccccgcgcgccgccatgaaggggagaccaaaatccatcctcgcccttcccgttgactgcggtggaggagttcggcgatctctctctctctcctccctgaccagcgagtgaatcaccggctcggccacccacccagaccatccacccatcctcgagaccggatctcctctacgtcgatatgtagaactagatccatggaggtccgagatcacatgtgtgcttcgcatcagatccatggaggtatgagatctgtcaagggcgaggtatggcgatggcggcggt

SEQ ID NO: 34117 - DNA, 315 bp, Setaria italica
  Peptide Sequence Number=SeqID_100091
ccaaccaaactaagaaatagtaccctcgataacgagatgggtggtcttaaaatgggctagtaattgatcaaacaagcagaagtgcaaagatgggacctatattcagcgcagtggtaaatacctacattttacacagcaaaagctaccatttttggtagttcaagagctaacctgtagattaagaagaacaagtgcatgctaaagcgtaaaggacttggataatcttgagaaaaggtctcgactaagataatcctagcaattgaagagcaaaagtttctgcccatataagaaatcctgagttcaagaatatataca

SEQ ID NO: 34118 - DNA, 349 bp, Setaria italica
  misc_feature (275)..(275): n is a, c, g, or t
  misc_feature (336)..(336): n is a, c, g, or t
  Peptide Sequence Number=SeqID_100092
cccctcgtgctcctccccgtcaccatttcttcccaccctggctccctcccaacccgtcgccattcacaagcgagacggacgggacgaccaggaattcttcttcctcccccgtcgtcttctcacctgcgttcccggacagagcgaagaaaattcgggcgcacacaaacacggcatactatagtgtagcaataataaaaagaagccgtctttgcttcgcagcttcttggttggtgacacagcagagcgctggaggagtgggggaggaaaaaaaaatntcaggcgagctccgaactttgaccgctgctgccgccgccgtgcttgctgcgtagccccganagccccaggcctt

SEQ ID NO: 34119 - DNA, 576 bp, Setaria italica
  misc_feature (18)..(18): n is a, c, g, or t
  Peptide Sequence Number=SeqID_100093
gctctaaggcctgcaagngaagcggcttcgtcgtcatcggccgtggctctgacgccacgtcgctgaaattccgcgtcgacgaggcaaagaagccggagacgaagtgctgctgcgagaacggcttcgtcgtcgtcatcggcgccgccggcacgtcgccgtagccggagtactgattttccgcgcacagggacgcgcttcgcgacgccgctgcttctggtgccaagggcgccgcgccgtcgacgacgtcgggctgttgatcgagcaggaagtggcgacccgcgtcgtcgccgtggagtcggaggagcgcgttgaagctagcggtcgcttccgcagccgctctgccgccgcccacgtaggcttgtgtccaatccgccatgtggggtggatcggcgaggaaggacgatggtggcgaggccgcggcatcgacgtgcaaacctgaccggaaataatccgtcgaggtggcactcgtcgcccccggctcggcagcgtcctggtccgtggagcaggccgacgcgccgtcgccggcacgcacggagctccaccactcgtctgccatgaggagagcttgctagaggg

SEQ ID NO: 34120 - DNA, 367 bp, Setaria italica
  misc_feature (1)..(99): n is a, c, g, or t
  Peptide Sequence Number=SeqID_100094
nnnnnnnnnnnnnnnnnnnnnnnnnnnnnnnnnnnnnnnnnnnnnnnnnnnnnnnnnnnnnnnnnnnnnnnnnnnnnnnnnnnnnnnnnnnnnnnnnnnaaggttttttaaaaaggcctggaactcaattgccaactgtcaatgtgctacacatgtctgtaatctgtaccgggtaaccagtatccttgttgacggtaatatatttacaggaataggagcatcgtgtcaggcaaaagcaagagattagtgattgatactcaggagatttgaggctttcctcttcctgaatactcatccttctgttcatcagttgaaaaattaaaatggaagactgactcaccccagttaactttcaacaacagattgg

SEQ ID NO: 34121 - DNA, 323 bp, Setaria italica
  Peptide Sequence Number=SeqID_100095
ggcgcttctctcttgacacatacaccagcattggaagccgtgtatccactcctgcaaagtcaagaggtgatttttcattgatgttcccgtacatcggcatgtcacttggtggtttcagcataacctgtatgattcctgcgtgatcacctcgggcatgatcctgtgagggttggagccaggtaccaggccagtgagtgccatcagccatccatgttgccttgggaatcttcaccggctcaaatggttcatcacctccagccttcatcttttctctctgaaggttcattgcctggatctcttcacgggcatggtacgcatcagag

SEQ ID NO: 34122 - DNA, 306 bp, Setaria italica
  Peptide Sequence Number=SeqID_100096
gctagagtttcaacaactttcagaagataggttcgatatggtcaagcagaaaagtgttgtgtagaatatatatctcccaattcctaacttaaactctaagtggtgttacactgcatggaagtgtttctattctatacaggccctagtacaggacaggatatggatcgccattgccaggttgggaggatgtgggaagtttatgtgccagttgggggtacaggtataggcagagaggggcttgggttcaggctttggcctagtgtgtcttatctgcattcaccatttactggtcactaataggttata

SEQ ID NO: 34123 - DNA, 237 bp, Setaria italica
  Peptide Sequence Number=SeqID_100097
gacaagggtgcagctatttcttctgaatcgtctctctcgtctagcaatcttttattgtcacagtcaaagacaatcggtagaagtgctgaaagaagtatagagagtgtgctgagttcaagcaaagaaaaggtttcagccattgaaagcttagtgaaaggtgtaagcatgtcagataggcacaatttctctgctattcgctcaacaagcttggaccatggagttgaccatacatcctct

SEQ ID NO: 34124 - DNA, 1244 bp, Setaria italica
  Peptide Sequence Number=SeqID_100098
acatatgtctatttttggacaatatagacgagcacctatggaggtctcaagacatcgtaatgattcaaatggaacaagtacaaaattctggctgtgtgcccaaaaaaaaggcatttacagttcctctcttcaaaagttgaatgctaccagaagctaaagccctgtcaatccttgcatatgcttcttcatggcccgatctctcctgtgatgattccggccacctcctcttccagggccaccacccctgggcgctggcccacctcgagcaaagccttgtgctggatcatgatcctcattgtcctctgatgaacggtcatggttccttccccctcgtcttgcaccacggccaaaaccttcttgtctgccattagagttggcgtcttcctcagctggattgccctgatttgagccccctcttctaccaccacggccaaatccttgttgaccattagggttcccattttcctcagccaggtagccttgattccagccccctcttctaccaccgcggccatagcctcgtccactggggttctcattctccctgagggttgccttgacccctgccaccccccttcttcctcgtccacggggatttgaaattcctccgctgtagttgtttgcagcatcaacctcctcttcctcgacatctatatgttgcctacttggagcaccgaaaggaacatttccaccacggccaagaccatagattgtatctttttgagtttgcctcatgacagctgcttctcgagcactggatacagcaactgaaccagcaaccttataactgtaattcttcccatccttgacataaaactgcggtttcttctgtgaactccatcttgggccatgtgatgaagcgtcagtgtcattggcaccatcagtttcctcataacttgactctaccacactgaagccaagatcatcaaatgaatcatcatactcgtcctcatattcatattgggagtcaaggataacagatctaacagcttctttagcattttttgagtccagaattgcagtgtcaggcaaatcatcattggctttcctcgtaaatctaccttgtgggacagatgatacagatgaagttgatgatccctggaattctgatgaaactgcagaagatgggccctgtgatgctgatgaaattgcagaagaagggccctgggatgctgatgaagttgcagaagatggaccatcttgaacaacgtaacatgcctcagcaactttataaggtttcgctg

SEQ ID NO: 34125 - DNA, 458 bp, Setaria italica
  Peptide Sequence Number=SeqID_100099
cgtcgtgccggtcgtcgtcgcgctggcggctgctcctacgcgtcccctgcagcaggtggtgcgcggaggcgcttgtgctggcgccggcgctgttccagtggctgcggcccctgtcgaacctggcgtcttcctggttgctgctgctgggtaaggaatctgaacagtcgatttcgtcgtcgtcgtcgaataaatcaaactccatctgcgtgtagatcttcttgatcacatcctccatggagctgatgtacctggactttatggtcttttcagcatactcaagaatactgtcagactgaaatgaatccccttggagattgatatcaataaattgcaaaagcgagcagatctcttttatcatcttctgttttgaactttcctctatagcagatcctagttcagatttaaatatttccattctaagcaaaatctgcagctcatgtctggtacatgcttattaa

SEQ ID NO: 34126 - DNA, 902 bp, Setaria italica
  Peptide Sequence Number=SeqID_100100
aaactccaccgtcgtggtccgctcgccggcgccgtccccggggtccaacgccaccgtcctcggcgccgtgaccgcggtgccctacaacctcagcgtcctcgctgtgggtggccttatcgtcccttccggattcgacctcgcggcctccgagagccgtccgcccccgccggtgaacatcacccgggtcctcaccgacgcgcggggattcaacgtggcggcctccatgctgcaggcttccggtgtggtgagcgaatttgagggcgacgagcacggcgccggcatcaccgtcttcgtccccaccgacgatgccttcgccggcctccccgccaccgaccacctccagtccctcccggctgagcgcaaggccgttgtgctccgcttccacgcgctgcactcctactacccgctcggctccctcgagtccatcgtgaaccccgtccagcccacgctcgcgactgagtacaccgaggctggccgcttcaccctaaatataacccgcgtcaatggctccattgccattgacaccggcgtcgtgcaggcatccatcacccgcacggtgttcgaccaaaaccctgtgtcagtcttcgccgtctccaaggttctactacccaaggaaatgttcagccggggggattctgagagcactgccatggcaccaccttcagccacaatggcacccggcgacgccgggaacgagcggacaccgccgacaaggctgtcatccccgcctgacctgcacggcgaagatagtgagtcgtcagctgctttggcgacagcaaatgggatttcttggtgttgtataggattcatgtatctacagctgcatctgttactatctctggtatgagatccaggtgtgctcgttgcttgcttccttgtgctcagtttttgttcttctttaa

SEQ ID NO: 34127 - DNA, 596 bp, Setaria italica
  Peptide Sequence Number=SeqID_100101
ataaatcgtgctacccaacagctaaacactaaataagctcatggttttggcagatgtggagcctgggtgggcgcccagggtcgccttgccctaggtctgtccctggatacaaacaaatgtccttgtaccaatatagctacaagttttcgacgaatctgtcaatggctgaataaagaaaatagtgtggaagcatagtgcaggacaaatttggaagaacatgcttggaagtgacgcgattcagaagtgcctagctgggttgctctctgtattaggatactttagaaggagcctgcattttctggtttattaatttctcaagagaatgagaggaaacgtctggtttacagctactattacttaaactaccagagattatttaactggtttaatttgctaatgcaattgataattctaaacagtcagctggactctgtaagctaccgctcatgacagtgataggcaacttctagacaacccaagctcccatctagctgtcacaatctcagaacaacccatcctttttgctgtaaagacttcctatctcttagaattaaaaagttaggttagatatcaacatgcggcaacacagcttatcc

SEQ ID NO: 34128 - DNA, 382 bp, Setaria italica
  Peptide Sequence Number=SeqID_100102
ctgaagaagcgaaaatcccaatgttccgaaataataatgtatactagagaagcactacttgaaatagctggcttctgagacaacacattacaacaaaatgagcccatacattactgtgaaggatagaataccagatcctagagctgattgctactttcctgttcaaatttcacctcattgtagtttaggaaaaggtacagcattaactcctagtggcaaactcaatgcatcaacaagagaaaaatgacccttaacaagactacagaagtaacttagcagatatggtcaaatttggttacagtagtacaattgttttcaccgactgagacaccctttcacatcaaatccccttttaatttgttgtgtctcagttaaactcttt

SEQ ID NO: 34129 - DNA, 631 bp, Setaria italica
  Peptide Sequence Number=SeqID_100103
gttttttttattcatcatcatcatgatctcaaataagcaaagcaatccgtttgagaaaaagggaaagcagcaaagcttctcactctcagtatctcctcagcatcctatatgtacattgcggcaagccatctagataaacgcactcaagaactccaaatccacacgcccgatcagcaaagttttgtttaaaaaagcccgtgaaaccaagaattaatccccaagtagaaaaaaggacgtggcgaaacgtgtgtgtgtcgcgtccggggcagtcgattctgtcaccggcaccgggagatgtcgatctcgatgaggctgtcctcctccagcaagatctcgatcatcccgtcctccccctcgcccccaccgccgatgacgccgtcgtcgtcgctgtcgccgccgacgctgtccgagtcggagtcggagtcgaggtcggaatcggaggcccaggacaggcccatctcctccggccgcccccactccgcctcgaactcctcgtggatcacctccagggcgcgccccttggccacccacgacgcgaactcgagggcctccgccgggaacacgatctcccgctccggcggcggcggagaaggaggtgggggaggcggctggagaggcgggtgcgcggcct

SEQ ID NO: 34130 - DNA, 1058 bp, Setaria italica
  misc_feature (1033)..(1058): n is a, c, g, or t
  Peptide Sequence Number=SeqID_100104
taaaagtaagaaaagaaaaaaaaggtacccgagatgcaggcgctgggcctgggccgcgggtgcaccctcctccaccacgcctgccgctgccgccgcaccgccgcttcaccctctcctccggctccccgtcctcacaacgctccaaggctaaaaacccgcatcaccgccgtgcgcgctagcgccgcccagcccgcgcagatggaacgcaagcacggggaggagccggtgagggtggtgaagctacgcgcggtggaggccacgcctgagtccttcgcgcccttcgggcaggtcatcgccgcctcccccgacggcgacgagttcggcccccacgacgcgcagctcgacctcagccgcggcatccctaggttctacatcatgcgactgcaggaccggccgctggagttctcgaacatcacccaccacgccagcgtgacccagtgcctgggctccatcggcggccatgactggtaccttggtgtggccaagccatcgatcttggatgggccggctgagcagagtggtcaggaggggtggaaaccgctgcagtcttccgcgggtcactactatctgcctcccgatccagccgaggtctgcgtgttccgggtttccggccccaagttcctcaagctgaacaaggggacctggcatgctgggccgctgttcaaggcggatgccgtggatttctataatctggagctgggcaacaccaacgttgttgatcacactacacaccgtttcaaggaacatgacgggataacctttgtggtcgaggactgaaagacatcttgcagtgtgtgcggacgttgttgagcagcagatacgagtttacaagaccgctcactgatcttatcttcaaaactactactttgtaatgaagaaccaacttgtaaatgttatgtagaaagtagaaacgcacgcctgaggtgcctgttcgaacttgtgccttgtgtttctgtcagcaccaaaatgaaacgcaaaactccacatccgccttagggcgtgttaccaaaaaaaaaaaaaaaaactctacacnnnnnnnnnnnnnnnnnnnnnnnnnn

SEQ ID NO: 34131 - DNA, 613 bp, Setaria italica
  Peptide Sequence Number=SeqID_100105
agcgggagggcgcggaggccggcggcggcggcggcggcgcgcggcgccaacaccagagccaccccgaggaacgagaaagggatggagaaggaccagaggaggccgcccagcacgaagacggcgccggtggtgatgaaagcgtcagccaccaacgcgacggcgcagggcatcaggaacaggaaccaggcgcggcgagataggaaaattgcgctgcagcaagatgtggataagctgaggaagaaactgcggcacgaggagaacgtccaccgagctctggaacgcgccttcacgaggccgctgggcgctctgcctcgcctgcccccttacctgccgtctcagacactggagcttctggccgaagtcgcggtcctggaggaggaggtcgtccggctcgaggagcaggtcgtcaatttccggcagggactgtaccaggaggccatcatcacctccatggccaagagcgcgtacttccctgacggtgaccggtgcacgccggcacggcagaacaagtctccggcccaagtgcagcagagttcaaaggtgtccacctcgacgcgtcaggcttccgatcaagacgctgctgattggtcgtctttgaagcgggccaccaatg

SEQ ID NO: 34132 - DNA, 864 bp, Setaria italica
  Peptide Sequence Number=SeqID_100106
gacatcacgaacccgcggaagctcccgaacggccagagcccgtgcccgaagtcgccgctgccgcgggggctgcagccgggggacccgctccggccgaacggctgcgccgccgtcaggtcgatggcgaaccgcccgcccttggagaccgggacgccggactcggccacgcacacgcccacgccggagttggtgtggtccgggacgagctcgaagcggtagccgagggagtcgccgcctgcgccggcaccgccgcgctcgcgccagcactcgaggcggccccacggcgtccaggtcccgtcgacggggcggaggatgagccagccgcccgggttggagcggctcacgcggtcggtcccgggggaggcgacgaagggagtcaccatcgaggccagcgccaccggcgagcccgacaggtcgtgcaccgtcaccgaccacccctttcgctccttccccgcgcgctcccgctccgacccgaacttggccagccagttgcgcccgccgttccccggatcagactgcaccgaccttgagcggaggtcgctgttgctgcggcaggagaatttgcaggtgaacatgggctgtctcatccggccctgcacctggagcacctgtgggctgcactccggctcgccgtcgaactcaaacacgaacctcgggtcgggttccgcgcgcacggtcaggttcagctgcgcgtggccggcagcagcgccgccgaatgccgcccccgccgccgccggcttgcggcctgcgcggcgcttcccgatggcgacccacccgctatggaacacgacgggcttggcggcagcggccctgaggtccagcggcaccaccaccttccctagcaatctccccgagctgaccccg

SEQ ID NO: 34133 - DNA, 259 bp, Setaria italica
  misc_feature (4)..(4): n is a, c, g, or t
  misc_feature (8)..(8): n is a, c, g, or t
  Peptide Sequence Number=SeqID_100107
tagnaccncggcgccgtcgatgcagtaggcgcagcagcgcatggcggcgccgatcttctggtacagcgggtacgggtggcggaagcggaagtcgccgtgcgcgggctcccacctcgccaggttggccagcgagtcctccgacgccttggcgttcagcacggcgcggtacccctgcgacctctccgagggcgcccgcctcaccgggatctccccgttgctggcgtcggcctccgagaagtagtcctcgacgcagccctcg

SEQ ID NO: 34134 - DNA, 654 bp, Setaria italica
  Peptide Sequence Number=SeqID_100108
agatcacggtcgccagctcggtctcagtctaggtcgcccgtgcctgatcctaactatcaggcgaggtcaagatctagaagccatgaaagggaggaggaggctgttaaccgtggaaatactctatatgtgactggactctcttctagggtgactgaaagggagattaaagattatttctcgaaggaaggacgggtggttggttgccatgttgttcttgaaccccatacacgtgtttcccgtggattcgcctttgtcaccatggacactgttgaagaagctgagcgttgcatcaagtatcttaacaattctgtaatggaaggtcgaaacattacagttgaaaagtcgcgccgtggtcggccaaggacaccgactcctggaagctatcttggtcaccggtatgagcgtagagaccgtgggagaggataccgccgaggctatggtggcggtcgtgatgaggattaccgcaatggctatgggtaccgcaggtctccacctcccatgtattcctacagggagagtcgggactacccttcctacagggatactcgagactaccctccctacagggactactccccgcacaggggggacccgcgagactactatgagagcaggggtggcgcgggtactccccgcctccttatggtgggggca

SEQ ID NO: 34135 - DNA, 1775 bp, Setaria italica
  misc_feature (1726)..(1775): n is a, c, g, or t
  Peptide Sequence Number=SeqID_100109
ttttacgtaagtacgtaccgagcgcacgccggaaagggggagaggagggggagaagcgaacgcgcatccaaaccctagccccagcccgcgacggccgggagctccaccgcgtcggtcaccgccgccgcctgcggcgccatccccgcttcgcatcatggccgattccccgcgcaggaggtactcgaggtccccttctccttacagcaggggacacccaaaagcaaggtcaagatcacggtcgccagctcggtctcagtctaggtcgcccgtgcctgatcctagatctcaggcgaggtcaagatctagaagccatgaaagggaggaggaggctgttaaccgtggaaatactctatatgtgactggactctcttctagggtgactgaaagggagattaaagattatttctcgaaggaaggacgggtggttggttgccatgttgttcttgaaccccatacacgtgtttcccgtggattcgcctttgtcaccatggacactgttgaagaagctgagcgttgcatcaagtatcttaacaattctgtaatggaaggtcgaaacattacagttgaaaaggtaattgcatctaccttcactagggttgttgatactaatagtgagaccacatatgtgctgcgtgttgacctggaagttttttttggctattattcagaagatactgtgcaagctatgtgcagcaatcaagattctgagttcatcaatttcaactttagcaaatacagctccatcagtggacagcccaaagagttattatgcaccacaagattcacaacaactaaacgtagcaatttttcaactaaacctgagtgttcaccttcaactaatcaatgggcattgccaactcattagtcaagcatgtgcggtgccatgtgcatagcaacgttggatgtctgctagttggagtttgggctcttcgttattatttcctcccttggtccgttattgcagggcgtgtatccatggattgtaagagaaacttgtaattacctacatgatccaagaatgatacttttattcttattgttgcttgcttgtaatctgactaactttgctctttctgttgtttcagtcgcgccgtggtcggccaaggacaccgactcctggaagctatcttggtcaccggtatgagcgtagagaccgtgggagaggataccgccgaggctatggtggcggtcgtgatgaggattaccgcaatggctatgggtaccgcaggtctccacctcccatgtattcctacagggagagtcgggactacccttcctacagggatactcgagactaccctccctacagggactactccccgcacaggggggacccgcgagactactatgagagcaggggtgggcgcgggtactccccgcctccttatggtgggggcaggtcaagaagggagcgatcaatttcgccgtatcggatgccagagagaggctacggtggtggccgccgtgcgggtggaggcggctatgataggtaaaatgtttttggcactccatgttacaatggagaccgtatgtccaagatggatggccatggcttgctgttgtgatggtggtggccctgcctcccgtgactctgggtagattgttgtagctgtacttgcggactgtttgctgtctctctggattttttttaaaaaaaattgtatgaggacatgtttgtaggtttgcaatgataacttctaaagaatgactggggacttgttaaccnnnnnnnnnnnnnnnnnnnnnnnnnnnnnnnnnnnnnnnnnnnnnnnnnn

SEQ ID NO: 34136 - DNA, 450 bp, Setaria italica
  Peptide Sequence Number=SeqID_100110
agcctgatgttccgagctgagctattccaaatctaaaattaaaaatctaaataaatttgcacccgaatgatgcacccagtaggttcagattgcaacggttacagtcataaagcagttaacagctgcacaaactagcatccacatcagatgaatgccttttgcaaggatgatcagacgccagagaacgaacagagcaaggaaaacaaaacgccaaaagctcctgaacatctcctccgccgatgcatagcataatgcaacgagtcattccactgtcctagctactactgaaccacagccacagcagccgccggcggttgttaattagtcgacgatgacgaggggctcgtcggaggtggcgcccttggaggtgatctcctccggcaggtcgccgcggagcacctgtacccggaacaccacctcctccccgtcgccggcagcgggcgtgacgag

SEQ ID NO: 34137 - DNA, 981 bp, Setaria italica
  misc_feature (959)..(959): n is a, c, g, or t
  Peptide Sequence Number=SeqID_100111
ctggtgtgagcagaatgattttccagttcctgatggtccaccggggtcttttgatgtaaattggagacttgcttactcagacactgaggctacaggttgcgtgcctgttgaaagttttgattctaccaatgtgaagagtgtcaaggttgtcccgatggagagtatgagacaggaggagccggcaaacagcgaatcaggaacgctggatgacagctcttgtaatgatttcgatttaaacgagggctatgggaacttgctgctcttgcttcatgaaagaagcaacatgaacaagcagtgtaggttggtggagcagataaggtatcttttgaaagatgatgaggaagcaaggatccagctaggctcaaacgggtttgctgaggcgctagttgagttcttgaggaatgccgtgaatgatggaaatgagaaggcgcaggaagttggcgccatggctcttttcaacctcgcagtcaacaataacagaaacaaaggacttctgttatctgctggagttgttgatctactcgagcagatgatatcaaatcctcgcctatctggtccatccacagcactgtaccttaacctttcctgcctacctgatgcgaaggccgtcatcggttcaagccaggctgtgtcattcctagtcgactgtctgtacagccaagagggccggcgacactaaaagcagttcctgtaagcatgacgccctgtacacgttgtacaacctctcgatccaccaggccagcgtcccggcactccttaccgcaggtatcgtggatgctctccactgtcttctcaccgagtctccagcttcggagggcctcggttggacagagaaggcccttgcggtgctcatcagccttgcagccacccaggccggcaggaaggagatcatgtccacaccgggtttggtcagcacgttagcgacgctgctcgacacgggcgaactgacggagcaggancaggctgtgtcatgcctctggt

SEQ ID NO: 34138 - DNA, 1487 bp, Setaria italica
  Peptide Sequence Number=SeqID_100112
cggagcagtgccgtcgcagctcgccggaatgagcagtctggtgcagctggacctgtccagcaaccagctggaaggcaggctgggggccgagttcggccggtggccgcagggcgcgttcgcagacaatgtcgggctctgcggcagtccgttgagagcttgcagcagcggaggcggtccgtcgacgctcagctcggtgaccatcgcgctggtgtccgctgcggtcacgctgtcggttgtgctcctgatcatcgtgcttgccctgatggtggtgcggcgccggggccggcggtcaagagaggtgaactgcacggcgttctcgtcgagctcggccaacacgaaccggcagctcgtcgtcaagggctcggcgcggcgggagttccggtgggaggcgatcatggaggccacggcgaacctgagcgaccagttcgcgatcgggtccggcgggtcggggacagtgtacagggcggagctgtccaccggcgagacggtggccgtgaagaggatcgcacacatggacagcgacatgctgctgcacgacaagagcttcacgcgggagatcaagatcctgggccgcgtccggcatcggcacctggtcaagctgctcgggttcatcacctcccacgacgccggcgccggcggcagcatgctcgtctacgagtacatggagaacggcagcctctacgactggctgcacggcggcgtcggcggcgatggcagccgcaagaagcgggtgctcggctgggacgcgcgtctcaaggtcgcggccgggctggcgcagggcgtggagtacctccaccacgactgcgtgccgcggatcgtgcaccgggacatcaagtccagcaacgtgctcctcgacggcgacatggaggcgcacctcggcgacttcggcctcgccaaggctgtcgctgagaatcggcaggccgccttcggcaaggactgcaccgagtcagcttcctgcttcgccggatcgtacgggtacatcgctccagagtgcgcgtactccctgaaggcgacggagaggagcgacgtgtacagcatgggcatcgtgctcatggaactggtcaccggactcctgccgacggacaagaccttcggcggcgacatggacatggtgaggtgggtgcagtccaggatgggcgcgccgttgccggcgcgggagcaggtgttcgaccccgctctgaagccgctggcgccgcgcgaggagtcgtcgatggcggaggtactggaggtggcgctccggtgtacgaggacggcgccgggggagaggccgacggcgcggcaggtctccgatctgctgctccacgtctcgctcgattactatcgcgccggcgagaagcgttaggatttcaaagagttgggaaaacttgttctagagctgcattttctctgtatcgtgattcaactaaatgcctaaattagcttattcttcatgaaattagcaacaaaggttgtggtttcgaggtttcgccatttaaaaaaaaaaaaac

SEQ ID NO: 34139 - DNA, 301 bp, Setaria italica
  Peptide Sequence Number=SeqID_100113
aaatccctgacgagacttatccccttgctacagtatcgtcaagcgaaaggggcgatccggaggcgaacagggttcccgacggcgatttcgccggttcccttcctctccggcggccggtctggcgccggagagggagaagaacaggggaatcgacgcgcgggtgtatatagggtagatagtttagaatctatgcctagggtttcctccccgtcgccggcgatggtggagatagggttgccgggagcggcggcggagctgctccgagggcgaataatcttcttctccgacctcgaagatgagc

SEQ ID NO: 34140 - DNA, 215 bp, Setaria italica
  Peptide Sequence Number=SeqID_100114
tgaaaaaatagcaccaataatttctcagaaatcaatgagataggatctggaggatatgggaaggtgtacaaagggacactcgcaaatgggcaaatagctgcaataaaacgagcacagcaaggatccatgcaaggtgcagctgagttcaagaatgagatagagctgctgtccagggttcatcacaagaacctagtgaccttagtgggtttctgcta

SEQ ID NO: 34141 - DNA, 242 bp, Setaria italica
  Peptide Sequence Number=SeqID_100115
tcgtgcttcatgcccagggtttctttcagaacttccttaactgctttgccggcgaggttgccaggaacctcaacgctacggcctatgtcgccaaactgcgacgcgatgacgccatagatggtccaggccacggggtcacaccagtagtaccatcgccaccagataggcaacgccggtcggggtatgaggaatcccgcgaagatgttccagctggtgagagtgaatgagacaagaatacttgc

SEQ ID NO: 34142 - DNA, 277 bp, Setaria italica
  Peptide Sequence Number=SeqID_100116
gaacattttcttctttgtatttctgaactccgtggaacacatttggcgtacactagagtcttaagaaattgtgttcactctatgcttgtttaaggttctctggatgcatttatgtaaactctgtcattagttggtaaaacagaggtgggacacgtattaggcctgtttggttccacgagactaaaatttagtcctgtcacatcgaatatttagatactaattagttttataattagttttcatgtttagtccttctaatcggtacccaaacctccga

SEQ ID NO: 34143 - DNA, 832 bp, Setaria italica
  Peptide Sequence Number=SeqID_100117
ctgaagcaacgcacgaggaattgagaatcctaggtgcttttcagtatgtctacagtgatatatacctccattgcgataaaagtaatgatgccacggagttcgtcagcttggagttcctggaacttcctggggacgacaagcaagggggtttgtgtaacctactggttaaatctgcttcagaacatagaatctacagacaggccttttctggtgacactgaaccctcctcatgtcccggatcatgtcttgctcaaatggtacactagccaccctgtcccatctgtggctgccgcaaaggcttctcttgagcttcatcacattcaaggaaacagaggaatttggttctgcggtgcataccaaggttattgtttccatcaattcatttagcaatacatacagtactcacatcagaagaaataactttaacaaatttttccatgagatatcctgacttgtggcttttgctgaaagacattggaagattgtgtcttgcggaaaacatacacacttttgtagtgtccaacaaacagagatcaatttttttggcatctttcagcgaaaggcacgaagtagaagtgttctcttgcaaaatttaccaactatttctaaggatatcagcaattagagtaatgtggttaggtctgaaatgtatgtcttttctgctttactaacaggttatggtttccatgaagatggactcaaggctgggaaatctgcagctcaagatttgctcggtaataagaagggcctttctggagaaccccaaaacagatgatcccatcgtggactgaggctggagcacgtcttctggtagcaagatttcttggccaat

SEQ ID NO: 34144 - DNA, 425 bp, Setaria italica
  Peptide Sequence Number=SeqID_100118
taagttaaacggaaaacggggaaaacaaaagaaactaaggaacgaacgaaccggacggacggtaataacccgacccaacgaatgttcatccacatgccgaaagacaggcggagggcggcgctgttggagaggaattcgaagatgctgatgaagaatggcgttgaggtgaaggagctccagagccttgagctccctttgacgccgacgctgctgtcggagaggataactgggctggaccgcgtgctatcagaaaagatctggacggcgttcagggaggaaggatttgttgatgatgaagggtatatgaaggaggatggccgggcaacgccatggaaggatgcattggtgaagagggggttctggaaggaggtgtctcctttggctgaccacatccaggaggagctgaatcttgcatatgggtacca

SEQ ID NO: 34145 - DNA, 533 bp, Setaria italica
  Peptide Sequence Number=SeqID_100119
ccggtgggcctggacgcctgtggcgcagcggcggatctgagcggcgcgttggactgggtgcgggaggagccggagccgccgagcgcggagccgaggaggtcgctgaagagggcagggttgttggcctgcgggatgccgagcccggatgagggcgcggcggaggaccagctccggccgaagatgtcgccgaccatggaggtcgacccggatccgggcccggccgccgccgaagcagcggcgggggaggctggtgggtccacgccggcttggcgctggcgggctggtgcgtccacgaggcgccggtggccggcctggtggaggtgttggcggccgcgcccgggcgctggtcgcggagggggcgggagccggaggagcgggaggcgttgacgccgaagtcgaactggtaggagtcgaaggaggtggtggtggggcgggaggaggaggaggaggagcggagggggcgagggagagcaccgtccaagcccagcccgaggtcttctcttcggtgtgctcatgatttagtaccagccata

SEQ ID NO: 34146 - DNA, 569 bp, Setaria italica
  misc_feature (551)..(551): n is a, c, g, or t
  Peptide Sequence Number=SeqID_100120
ttccagccagccagcgacggaggagggaggagcgagcggagggggcgagggagagcaccgtccaagcccagcccgaggtaagaggcaactccaatggaggtccttcttgaaccctcacctcatatctgagggccaaaacataaaaaaacatatttcttcccccccctcgactctcactctcacatctaggaggcccttctctgaactctcatccggcggcgacgacggcggccacccctcccgcgcctccgcgcgcttttcctttcaccaggtcttctcttcggtgtgctcatgatttagtaccagccatattgacctccaactctagtgacacaggctgttgctagggtagcaaatcaagagctaagaatggcggattcaatggtagcgagcttctgggggcctgttacatcaacaactgagttgtgcgaggagaattatgcgcactcatcatacattgcagaattctacaataccatctctaatgtcccatgtgttcttttggcgcttattgggctagtgaatgctttcgccaaggttttgagaaacgnttcagtgtcctgcacata

SEQ ID NO: 34147 - DNA, 513 bp, Setaria italica
  Peptide Sequence Number=SeqID_100121
gccaggagagattcgatcgagcgagccaaaccaccacgggcctcgccgtcttcccccctgctccctcccatgccctagcagcgagcgagcgagcacgcgcgcggccgcagccttccagccagccagcgacggaggagggaggagcgagcggagggggcgagggagagcaccgtccaagcccagcccgaggtcttctcttcggtgtgctcatgatttagtaccagccatattgacctccaactctagtgacacaggctgttgctagggtagcaaatcaagagctaagaatggcggattcaatggtagcgagcttctgggggcctgttacatcaacaactgagttgtgcgaggagaattatgcgcactcatcatacattgcagaattctacaataccatctctaatgtcccatgtgttcttttggcgcttattgggctagtgaatgctttccgccaaggttttgagaaacgattcagtgtcctgcacatatccaattattgtattactttgtctt

SEQ ID NO: 34148 - DNA, 1457 bp, Setaria italica
  Peptide Sequence Number=SeqID_100122
aactaactaaaatagtaacccaatagtaagttaacttttaaggaacgaacttaaattaagggactaagtagaaatagactttaccgaccacgattcaatggtagcgagcttctggggcctgttacatcaacaactgagttgtgcgaggagaattatgcgcactcatcatacattgcagaattctacaataccatctctaatgtcccatgtgttcttttggcgcttattgggctagtgaatgctttccgccaaggttttgagaaacgattcagtgtcctgcacatatccaatatgatacttgctattgggagtatgattttccatgccaccttgcaacacgtcctacaacagagtgacgagactccgatggtgtgggagatcctcctatatatgtatgtcctttattcaccggactggcattacaggagcaccatgcctacattccttttcctatacggtgctgccttcgctgtagttcatttctttgcccgattccaagttgtattcaaggtgcattacattggcctctgcctcctctgcatccctcggatgtacaagtactacatacagacgaaagacgtggctgcaaagcggcttgcgaagctgtgggttcttacgttaacccttgggactctctgctggctagttgatcgcatcttctgtaagaagctttcacactggtatgtcaacccgcaggggcacgcatggtggcatgtgcttatgggcctcaactcgtactatgcaaacacattcctaatgttttgtcgggctcagcaacgtggctgggagccacggattacccatcttcttggatttttgccttatgtcaaggtccagaaaccagaaaagagggaatgagttctatttatgtcgagcactgatgctattcagtccgccaccagtaagctaatgtcccccaatgtgtgcagacaagttgtggcatttttgtaaatgggcatccaaatgattacggaatataaatgttctgatgtcacactagattttggtaacttaaactgacacctgttttgtaccatacttaatcgtcaaacagagattagttgggagtgttggtgtcctagttttggtcatcttcctttttggtttctttgcagttgcctttttggtgctaataggactgagtcttatttatttgtttgtcgttgaatggagtccagttgtattagttgctactgtgcatggagatagatccatccatatgaccattgattcttttgactgatgttaccacaccgctggaaactttcttcagtggagctgttcttgcctgtgatggttgtggtacttttttgtgcgctatgcctgcagtgaagcaagcctgttcgtggatggcattggatgtttgtttgggtagaaatctggcatgttagatgaaatctcacatgaatctcacccagtcaccctcgtattatggcttctgtgctcccattgctgaa

SEQ ID NO: 34149 - DNA, 200 bp, Setaria italica
  Peptide Sequence Number=SeqID_100123
atgtggaaaaaccttagcctccagttcatcagtattcagcccttttccagcatgcttcaggccacctggcttcgcaacagtacattttgcagcgctttcagcatgggaactctcacattcactgctatctgcagtacctagctgtatcttattatcatccttgacatgagaaatcgccttctcaatggcattgtactttt

SEQ ID NO: 34150 - DNA, 419 bp, Setaria italica
  Peptide Sequence Number=SeqID_100124
agagaggagcgttggagtcgaagagcaatgccattctcacgtgctggtggtgagcaggagaggaaaggaaacacgaggcaacagaccttcaggtggagggagcctaggaggaggagctgctggtgctggagcaggtgcttgggtccctgcgccatggacggcggcctccgcgagcaggaggccgaggaagaaggccgagagcagccgccacctccagcgacatggcggtggcagcctccacggcatccacattgctgcgctgcagctctgctgcggcatcgtgcctgtccggtccggactccggatgcaggcggctgccgtgcagtgcaggcagcgcgtgagcctggctcaaatatcacagccagagagaaacaaaaaagaaaagaacaaaaaaaaaggaacgcgctaagaatctctgg

SEQ ID NO: 34151 - DNA, 195 bp, Setaria italica
  Peptide Sequence Number=SeqID_100125
gcggcgaagctggccgtggagcgcctcgtcgtcgtgggaggcaccaacattggccagggcctcctcgtgggcacccaggtgctcctcggccgccgccacaggaacgccgtcgccagcatgatcctcctctccgacgggcaggacacgtgcctcccgcctgcgatcgcccagccgaacggtggcgtcgccaagagt

SEQ ID NO: 34152 - DNA, 502 bp, Setaria italica
  Peptide Sequence Number=SeqID_100126
gcgggacgtcttctcctggaacgtcatggtgggcgggtacgggaaggccgggttgctggaggaggcgctggacctgtaccacaggatgatgtgggcaggtgtgaggccggacgtctacacgttcccctgcgtgctgcggagttgcggcggcgtcccagactggaggatggggagggaggtgcatgcacatgttctccggtttggttttgggggtgaggttgacgtcctcaatgcactcatgaccatgtatgccaaattgtggggatgccgtgggtgcacgtaaggtgtttgacagtatgaccgtgatggactgtatctcatggaatgcgatgattgctgggcattttgagaatggtgagtgcaacacagggttggaattgtttcttaccatgctggaggaggaggtgcagcctaaccttatgacgataaccagtgtgactgttgcatcaggtttgtaactgacgtaagtttgcaatggaaatgcatgggcttgcagtgaagg

SEQ ID NO: 34153 - DNA, 548 bp, Setaria italica
  Peptide Sequence Number=SeqID_100127
aattctgtttggatgtttgcttcaaatgattctttgagtgctgagagtataagaaggtggatgggccacttcaatgatatccgttcagtctccaagtgtgcagctcgaatgggtcagctgttcagctcctccaggcagacattcgaagtctcatcatatgatgtagaagtaatcccagatattgaagtcacaactgatggcaataaatacatattttctgatggtattggaaagatctcttcgagattcgccagacaaattgccaaaacaattggattagaccctaataaccctccttctgcttttcaaataaggtatggtggctataaaggagtcattgctgttgatcctacttccttttacaatctttctctgcgacctagtatgaagaagttcgaatcaaaaagcactatgctgaacatcacaaattggagcaagtctcagccatgctacgtgaatcgtgaaattatatctcttctttcaacattgggtataaaggatgaaatatttttgtcgatgcaacaagatgacatactactcacactgag

SEQ ID NO: 34154 - DNA, 2552 bp, Setaria italica
  Peptide Sequence Number=SeqID_100128
acaagtaaccttaatgaaattctatttcgtttgaactctcttgttcccatggggaagctagtggccaggcatgttaatgctgatctgttcaaagtgctcgaagatttaccaattggtactttaaggaggatttttgagaaagtgagcaaattgaaatctacctgttatgaacctttggaatttatcagacacgaggctcacaggatgaagattagtaagaaaaccttgctgtccaagaagggtgaaggtgaaggaaaattgttgaggtgttacagaattcacatcacaccatcgaaaatatactgcttggggcctgaggaagaagtttcaaattatgtggttaagtaccattctcagtatgcttctgactttgctagagttacttttgttgatgaagattggagcaagctttcacccaatgcattgtcagctagaatcgaacaaggtttcttttctacccccttgaaaactgacctgtatcatcgtattctctctattctaaaagaaggattttgcattggcccaaagaagtatgaatttttggccttctcagcaagccaacttcgtggtaattctgtttggatgtttgcttcaaatgattctttgagtgctgagagtataagaaggtggatgggccacttcaatgatatccgttcagtctccaagtgtgcagctcgaatgggtcagctgttcagctcctccaggcagacattcgaagtctcatcatatgatgtagaagtaatcccagatattgaagtcacaactgatggcaataaatacatattttctgatggtattggaaagatctcttcgagattcgccagacaaattgccaaacaattggaagtaggatcaacagcaatgactcctttatagccaccataccttatttgaaaagcagaaggagggttattagggagtcattgctgttgatcctacttccttttacaatctttctctgcgacctagtatgaagaagttcgaatcaaaaagcactatgctgaacatcacaaattggagcaagtctcagccatgctacgtgaatcgtgaaattatatctcttctttcaacattgggtataaaggatgaaatatttttgtcgatgcaacaagatgacatgcacgagtcagatgaaatgctaacaaacaaagaagttgctttgtctgtcctagggaaaattggtggtgcagataccaagatagcagctgagatgctgctgcaaggctatgaaccaagttcagagccttacctgttaatgattctcaaagcccatcgggctaacaggctgacagacataagaactaggtgtaagattcatgtccagaaaggccgtgttctcatcggttgtttggatgaaacaagcaaactagactatggtcaagtttacattagaattacaaagaatcgcaaggagcagaagtatagtgagcagccattcttctgtaatgatgatggcaaaacagctgtaattgttggaaaagttgcaatctcaaaaaacccatgtctccatcctggtgatgtcagagtacttgaagctatatatgatcccggattggatgctaggggccttgttgattgtgttgtatttcctcagagaggggacaggcctcatccaaatgaatgctccggtggtgatttggatggcgatctcttctttattacttgggatgacaaactgattcctgagaaggttgatgcacctatggactacactgcaacaaggccacgcataatggaccatgttgttacacttgaggaaatccagaagcacttcgtcagttacatgataaatgatgccctcggtgttatctccaccgcccacttgatccacgcagaccgtaatccgctgaaagctcgcagccctgagtgcctccagctggccgctctgcactccatggcggttgatttcgccaagacaggtgctccagccgagatgccccgggcgctgaggccccgggagttccctgacttcatggaacggtgggaaaagccaatgtacgtctccaacggcgtcctcggcaagctctaccgctcagctctgcgccacgcggaaaacgcggaggcgctcctgcccgagggccctgcgtgctccgagtacgacccggacctcgagtgccccgggttccacgacttcctggacgccgcggaagagcactacgaggcctacgccgagaagctgggcaccctgatgacctactactccgcggagcgcgaggacgagatcctgacgggcaacatccggaacaagctcgtgtacctgcggcgcgacaacaagcgctacttcgagatgaaggaccggatcatcgccgccgtcgacgcgctgcacgaggaggtgaggggctggctcagggcgcgcagggaggaggacgcgtcgaagctagcgtcggcgtggtaccacgtgacgtaccacccgtgccgccgcggcgagaagcggttctggagcttcccctggctcgcctgcgacaccctgctggcggtcaaggcggccaggaggtgccgcaagcgggtggaagacgccgccgccgtgccgatggactgcgacgcctagacgg

SEQ ID NO: 34155 - DNA, 361 bp, Setaria italica
  Peptide Sequence Number=SeqID_100129
tcttattattcagtcccctccacagccgcacaccttgcaagagctgccatggggtgcgcgggctccaaggccgccacggacgtcgcggtggccgacgtctaccgtccgccgcccaccagcgtctccctcttcgacatcagcgccgtcgaggagccctggcgcatcgccaagaacaaagcagcaggcgatgacgatgaggaagatagcagcgacgaggatgaggaagaagaagaaaccgacgacgaagaacaagaagaggaagaggagaagcccgccgtcaagaccgtggtgccgctgccactcctggacaagctggagggctacgagctggccccggcgtcgtggtccgaggtgagcaagg

SEQ ID NO: 34156 - DNA, 510 bp, Setaria italica
  Peptide Sequence Number=SeqID_100130
tataggcctctagaaaaaagaagaggtaaagggtttctaaataccaatgtcccaactcccaaccctgtacttgcatgttttgatggtggcatgatgcaaattgtgtgattcctgtgtcttggctgtgaattttccctgagttgcttgtggtgttggtctcctttttccataggagcacagggaacaacatcaggcatggtctgccatggaatcttgtttgatttgcaacggtatatttgccttttcttgttggtatttactatttaggcgcacacgtccggatgtgattattcatgcactctaatttccattatccatcattattgtctgcttaggccgtaatcaacttttttcctcttgatattatcagccttatacctgtccgtatgtgagtggaagaagacattcatgatacagtatatcttatctatgtgcaatggtaggcatattaatgcctagttctttcctttcttctggcatgtgctgtctgctaatttgtgtccttttaca

SEQ ID NO: 34157 - DNA, 730 bp, Setaria italica
  Peptide Sequence Number=SeqID_100131
catgatagcctggttggcgctgtcaggatcgagcgggaggatattgtacggagattataacttcttcttttcctcgacttggttatgcgtctccagaatcgattgatcaacttcgattttctgggagacattgacggctttgaggacctcgaagagcacggcggcagtttgataggctttagtgagctgagcccggtcggccttgtcggctgcattttggagcgcctggatgtacttcttgtagtagtgctggtagaagctctgcatttctctggcgtcactctgcttgaccctgcccttgagcgtggggtcgttctccctctcgagcctctgcaggagcgcggttttgaactggcggacacctcggccgctggaggtcgggtcgaggcgatgcgccttctcgaaggcgtagaagcggcataggtaggctactctggggttgcttgcctccacctcgttggccacccttaggatgggcgcgatctcgacgagcgaggacgggacgacctcgctgtcgaagatggactcgccgaggttgcctgcggtctgggtgcggaggatcctcctgggtccagcgccagcgccggcggaggcgggggaggcggaggaggagtcacccccgggggccatcctgcgcccccccgaggaggacgccatggctctgcaatggatggggtagcagcagcaggaagagcgaagccctagtccctaggacggagtggggaaagtg

SEQ ID NO: 34158 - DNA, 488 bp, Setaria italica
  Peptide Sequence Number=SeqID_100132
aacgaaactccgactcagtcgcactagtctcgtcgtctggtggcgcggcgacgatgccggcgtcaaagggcggtggcggcggcggtagcacagcaccatgacgtactccttggccggcgcgcccagcgacgccgggaagggctcctccggctctctccgcggccaaaggtccaccagcccgtgcagcgtgctcgaggggcagaccggcttgccgtggcataagatctccacctcattttcatcacctatatccagtttcttcgcaacgtacctctgtacaaaggaaatctgcaaactgccatctttaattctcaagtaactctttgataactcaggcagctgtagacctcctttctggttaggagaagaaactaatgagaaccagacgggagtggttattggatcatgcaaagtgcttgcagaaccagacaatccttggttcgaattatcctctgttgttgcttgatctgtcgacggtgcaggttctg

SEQ ID NO: 34159 - DNA, 347 bp, Setaria italica
  Peptide Sequence Number=SeqID_100133
gaggacggcgcccgggatgccctgcgactcgtcccactcgaagttcacccggaacaccgtctccccgttcgtcttggacttgagggacaccaccgcctcctccaggtgcgcctcattccccagcttccccggcctccattgcttggttcggcggcggtggcgctgacgagccgcagggcgacgccctcgtcccagccgaggatcttgtggacgccgtcgaggagcgaggcgtggaagtcgccgacggccagcacacccaccaggccaccaccaccttgccgaggattccagatcccgagggggccaagccatggccaccgccttcgactccccacctcctccccgcc

SEQ ID NO: 34160 - DNA, 306 bp, Setaria italica
  Peptide Sequence Number=SeqID_100134
tgatcgacgtcaacaacctggagggcaacttcatctacgccacccggacgtggtggtccaggatgttgacgtcgatcaggaacggcatgaaccggtcgtggtggtccaggatgaagagccggttgccgtccagcgcctgctgcaccgtgaggccctcgaggctcttctcgatgtgctccgccgtgatggtgctggtctggtcgccgtacttgctgggatccagagtgctcttgggagggaactccgtgaggcgcgtgatcatcatcgggttaacgcgcgcgaggtgctcgccggcgttaacccgat

SEQ ID NO: 34161 - DNA, 435 bp, Setaria italica
  Peptide Sequence Number=SeqID_100135
agtgtggtgcatcccgtgcacaagctgctggtttgtcgcgatcacgaagggctcgatcactgcgtgcgtgttcagccagtggctgatcagctgatgccaagcagagtcattgacgcaggcgtaagccttggcaagctgccaaatgtggccggcaacgccagtgtgagcaggggtgtacaccttgctgtccgcaccgtgctgctgaccatcagggtggggcaggctgagctcgatggccacgggcttcagggtgccatcgtcctttaagacagcagggtcctgctggcataaatgaagttgccctccaacttgttgatccggtcgaggtatggcatgaaatgatcatggtggtctaggatgaagagcttgttcttcttcaatgcattctgcactgtgtagcctttcaaggttatgctgaatgtgagcttcagtgat

SEQ ID NO: 34162 - DNA, 438 bp, Setaria italica
  Peptide Sequence Number=SeqID_100136
atgccgtacatgctgctgtatcccaacacgtcggacgtcaccggcccggtccggttcttgttcgccgggtcgttgttcatcttcacgatgcgcttctcgatctccaccagccggctgccgaacctcttgaacgcgtccagcgccttggcgtccgacgtccagcgctccggctcgtcgcgctggccgaggtacacctcgtcggaggagtgcttggagaggatctcgatgagcgagatgcccgatgatgggtcctgggatcctggctggtgatggtgtggatgaaacccccagctcccgggtcgcgctccagctccgcgtacgccgtccgtgccccgggctcccgggcatcccggcgccggctcaccgtgggccggttcgggaggtacccccgcgtaggggtactgccccgaagttgacggccgcgtgcagcgcccgacg

SEQ ID NO: 34163 - DNA, 719 bp, Setaria italica
  Peptide Sequence Number=SeqID_100137
aagactccgctgactgcaaccatcccaacacaggcaaaagcccatggacaaaccatatgcacagtgacacgccacacgcacagacttgagaaaaaggggaacctcgacggcgtccgcggccacggacggcgggttcgcggtggtgaagcggtcggccgacccgtacgaggacttccgcaagtcgatgcaggagatgatcgccgagtggccggcgggcggggacgtcggcgacgccggcgagggggagcacagcgcggagcggctgctggagacgtacctcgtgctcaactccccgcgccactacccggcgatcctcgcggcgttcgccgacgtgcgggagacgttctgcccatgagctcttgtcgtgtccgcgacgatcggccggcgcgccgatgtgatgttgataggattattaacctttgtcaaaccgaagcaatggcactagaattgtgcgtgtgctctgttccgcgcgtacgtgcatttggctctgtcgtccttggcctgctaaccactgcttaattcgactctgttctgcagtctctgtctttgatggtaaatctttcttaagtactaccttaaaatagtttagtagtgaagctttgggctttgttgagcgcgtagcatgtaaatacttctccattttgtggataatggactttgtagcttagagcatttcgtgaatgttcatcacattttgagaaaaatggatttgtggttcc

SEQ ID NO: 34164 - DNA, 369 bp, Setaria italica
  Peptide Sequence Number=SeqID_100138
cgtgagcctgctctcgcagtcgtggtccgtctccgtgggcctccggcccgtgcggccgcggcgagggtaggggtggtgcttggagccccccagggtggggcgcgggttgccgccgtccgggttgccgaggtcgttgtagacgtcgtagcggtagacgcggtcgtgcgcctggtacgggccctgctggtcgtcgccccggaggttccggagctcgtcgtcgcggtagggcttgagcgccgccggcatctggctcggcaggtacgtgtcgttggcgaagaagacgcggttgtagcggtacttggactgggggtagacccatgagttggcgacgaagacgacggtgccgcggccggggacttgtcgagggtg

SEQ ID NO: 34165 - DNA, 672 bp, Setaria italica
  Peptide Sequence Number=SeqID_100139
tgtagggtcgagagagcaacagccgcagtgaggaatgaagaaacacattacggcgtggcgcaccaaagattcacagtgcccaaacgtgctgcgccacaggccacagcgtcaacctaccatcccacgagatacatctgctaaacctcagatggagatactgttggggatgcccatggccgtgagcccctcgcccttcgtaccgtccacgtctgacgtgttggggtacagcagcatgtacggcatctccacaggcccttccggtctgacaccggattgtcgttcatcgtcttgatcctgttctcgatctccaccagccggctgccgaacctcttgaacgcgtccagcgccttggcgtccgatgtccagcgctccggctcgtcgcgctggccgaggtaaacctcgtcggaggagtgcttggagaggatctcgatgagcgagatgcccaggatggtctggaactggctggtgatggtgcggatgtacaccttgtcggcctcctcctgcccagcttccagctgcgcgtactccttggtgcctggctccggcatcggccgacggctcacggtcggccggttcgggaggtacccggcgtacgggtactgcccgaagttgacggccgcgtgacaagacgaccgaacgaccaacccaagaatagaataggtacgtagacaa

SEQ ID NO: 34166 - DNA, 571 bp, Setaria italica
  Peptide Sequence Number=SeqID_100140
atacgacgactaggcccaaggtaacaacctcgtcggaggagtgcttggagaggacctcgatgagcgagatgccgatgatggtctggatctggctggtgatggtgtggatgaaccccagctccgggtcgcgctccagctccgcgtacgcctccgtgccgggctccggcatccggcgccggctcaccgtgggccggttcgggaggtaccccgcgtaggggtactgcccgaagttgacggccgcgtgcagcgccgacgcgatccagatgatggtggtgcaggcgctcgcgagctccgtcacggcctgcatccgcggccaccagggtgcgtctttgaggtcgccgtgcccgacctcgcgcacctccttccaccaggcctgcagctccgcgtcgccctgcagcgtggcgtcgttggggtagtagatggccaggtactcgcccacccaccgctcgatggcgtgccagatggccagaccgtcgctcgcgtacgggtagtcctggatcagcagccgcaccttgtaggggctcggacgggtccggcaccgccacgccgcgcttgacgaggtcggccggga

SEQ ID NO: 34167 - DNA, 515 bp, Setaria italica
  Peptide Sequence Number=SeqID_100141
ctttggcagttttgtgtgccagttctctgacttcagatgccagtttgtgcaacgttcactttatttataacgtacagcaccactacgtgttatttccatgtgccggctcacacagacgttaaccgacctctacaagctcccacgtggcatcgatcatacgacgacgctcgcactctctctctctctcacacacacacacgcacacgcacacacaagcgacagagttattcaagcgccacctctcgtggcctccagacgcgcgcgcaacaccttacacctagacgtgcaggccgcagcagcctcagatggagatgctgttggggatgcccttggcggtgagcccggcggcggcgcccgtggtgtcggaggtgttgggatacagcagcgtgtaggggaactcggcgggcccgctccggttcttcagctgcgggtcgcggttctcggccaccaccttgccctcgatctccaccagcgcgacaccccggagtggacctcggacgccagggcgctcgcgg

SEQ ID NO: 34168 - DNA, 663 bp, Setaria italica
  Peptide Sequence Number=SeqID_100142
ggtcctgggtgtagagcctgtgcgggaagacccacgagttggcgacgaagacgacggtgcccttgccggggacgccctcgagggtgatggtcttgaggaagaactcggcgtgctgcaggttcctgacgaggacggcgcccgggatgccctgcgactcgtcccactcgaagttcacccggaacaccgtctccccgttcgtcttggacttgagggacaccaccgcctcctccaggtgcgcctcattccccagcttcccccggcctccattgcttggttcggcggcggtggcgctgacgagccgcagggcgacgccctcgtcccagccgaggatcttgtggacgccgtcgaggagcgaggcgtggaagtcgccgacggccagcacctccttcttgaccagcaccaccgtgccgcggatcttcccctcgttccacgcctccttgttcttccccctcagccggtccgcgaccccgtgccagaacatcctcgctctcctcctcggggaggaccgcaccggacgggaaggctccgcggatcggggtcgtcaccaccggcgattgattcccctgctcgctcgctcgctcgctcgccaatgtgatgtgccagcgagcaagcaaaggcaggcaatcagggcaggcgtgttgaactgctgccgccccgcgccgc

SEQ ID NO: 34169 - DNA, 3074 bp, Setaria italica
  Peptide Sequence Number=SeqID_100143
tttttttgtagtcgtggaaaaatcatttgatggaataactgtggtagcttttcagaaaagtagcacactcttcctcactcaccgacgagcggacccctccctctctccgccaaagactccgctgactgcaaccatcccaacacaggcaaaagcccatggacaaaccatatgcacagtgacacgccacacgcacagacttgagaaaaaggggaacgacgcatagctaccgagcagcaacatgtagaatcatctaggggaaaatctctgctctgctcagatggagatgctgtttgggatgcccatggccttgagtccctcgcccttctcgccggtgacgtccgacgtgttgggatacagcagcatgtacggcatcttcacgggcccggtccggttcttgttcgccgggtcgttgttcatcttcacgatgcgcttctcgatctccaccagccggctgccgaacctcttgaacgcgtccagcgccttggcgtccgacgtccagcgctccggctcgtcgcgctggccgaggtacacctcgtcggaggagtgcttggagaggatctcgatgagcgagatgcccaggatggtctggagctggctggtgatggtgcggatgtacaccttgtcggcctcctcctgcccagcttccagctgcgcgtactccttggtgcctggctccggcatcggccgccggctcacggtcggccggttcgggaggtacccggcgtacgggtactgcccgaagttgacggccgcgtgcagcgccgacgccacccagatgatggtcgtgcacgtcctggtgagctccttgacggtgatcatcttgggccaccagtccctgtccttgaggtcaccgtgcgcgacctcacggacctccttccaccacgcctgcagctccgcgtcgcgccgcacctcgccgtcgttgtggtagtagatggccaggtactccttgacccactgctcgatcgtccaccagatcatcaagccgtccttggcgtacgggtagtccttgatcagcaaacggacaccgaacgggtccgacgcgtccggcacggcgacgcctctcttgatgagatcgttggggagggcctgctccgtgagattccagttattgtacacgaaagaggacatctcgagggcgtacttcccggggaacacggtgagctcgaagatgccaccggcgttgatgagtgtctggcgtgccagggcgttgatgttcatcgtgtcgcggaagtgcgggcttagcagcttgtgcacggggtgcaccacgctgagctgccggttcgtcgcgatcacgaacggctcgatcaccgcgtgcgtgttcagccagtggctgatcagctgatgccatccagaatcattgacgcatacgtaagccttggcaagctgccagatgtggcgctcgacgcctgagtgagcaggggtgtacaccttgctcaccgcgccatgccgctggccgttggggtggggcaggctaagctcgatggccagggggcttcagcgtgccatcttccttcaagaacagcagggtcctggtggcgtagatgaagttgcccttcaacttgttgatctggtcaaggtatggcatgaagtgatcgtggtggtccaggatgaagagcctgttcttccttagcgcttcctgcactgtcaggccttccaggttgtgctgaatatgggcttcagtaattttgctggtatggtccccgtacactcttcggtctagggtacttttagcaggaaagtccttcagacgtctgatgaccactgggttcacgcctgcaagcatttctcgagcaaactcctcatcagtcctccagccaaacttatcttgtggaaccttgttgcgtgcatctgattggatgacatttggaaggggcatctttagggggtcgtcgtgagcaccaaccggcaacatacttctaagcaactcactgggtatcctcttcctaatctcagccattagtgggttattgggtgcttccggaccaagttcatagagtcccaggatgtcttcaaatgaatcaaactcatttcgcgtatcatcggtgtaggcttctatcgctggaacaacagcctcaatgactgccttcagggagtacccaaggaagtctgacatcttgagatgtccaaagcgttcatcacgcgggacatagatgttcaggttgagcagaaaaagcctgctctccgaatttgggtctgttttcgttgggcgccgtccagttctgccacggcgaggatatgggtgttctttgctgccaccgaggatcggccgtaccttatctttgccatggtctggatcaccaaggtcgttgtagtagtcataacggtagacacgatcatgctccttgtatggtccaggattattgtcacctcggagaatcttaagttcctcgttccggtaaggcaccaatggcgcaggcattttgctaggcagatatgtgtcgtttgcgaagaagatgcggtcgtgggcgtagtggttgtggttgtagacccatgagttggcgacgaagaccacggtgcccttgccggggacgccctctagggttagagtcttgaggaagacctcctcggtctggtggttcctgacgatgacggcgccggggatgccctgcgagtcgtcccactcgaagttcacccggaacatggactcccccgcctccgtcgacttcaccgtcatcaccagctcctccaggtgcgccggcttcccgtctttccctttgcccccatttttggggtcggccgccgtggcgctgacgagctggaacgcgagccccgtgtcctgtccgaggaaccggtgcaggccgtcgaggagcgacgcgtggaagtggtcgaagatgagcgcctccttccgcaccagcaccgcggtgccgcggatccggccgtgcttccacgccgccttgttcttccccgccagccggtccgccaccgcgtggagcagcatgcttgctagcttgttcctcctcgcgctctcaaaggaaagagtgacctgctgcctgcccctgccctgccaacgtgctgccccccagcaaaccaagctgctagcggctatggaacagtacgtggcctactgagctctg

SEQ ID NO: 34170 - DNA, 2890 bp, Setaria italica
  Peptide Sequence Number=SeqID_100144
cctaagaaatgagctggtgtacctttattcatgatcaagaaagaatacatacacgacaacatttttcattcctcactgcggctgttgctctctcgaccctacaaatcaatctaaattctccactacaccctcacaaaaccaacgaagaaacacattacggcgtggcgcaccaaagattcacagtgcccaaacgtgctgcgccacaggccacagcgtcaacctaccatcccacgagatacatctgctaaacctcagatggagatactgttggggatgcccatggccgtgagcccctcgcccttcgtaccgtccacgtctgacgtgttggggtacagcagcatgtacggcatctccacaggccccttccggttcttgaacaccggattgtcgttcatcgtcttgatcctgttctcgatctccaccagccggctgccgaacctcttgaacgccgtccagcgccttggcgtccgatgtccagcgctccggctcgtcgcgctggccgaggtaaacctcgtcggaggagtgcttggagaggatctcgatgagcgagatgcccaggatggtctggaactggctggtgatggtgcggatgtacaccttgtcggcctcctcctgcccagcttccagctgcgcgtactccttggtgcctggctccggcatcggccgacggctcacggtcggccggttcgggaggtacccggcgtacgggtactgcccgaagttgacggccgcgtgcagcgccgacgccacccagatgatggtcgtgcaagtcctggccagctgctgcactgtgtccatcttgggccaccagtccctgtccttgaggtcaccgtgggcctcctcgcgcacctccttccaccaggccctgcagctccacgtcgcgctggagctcactgtcactagggtagtagatgtcgaggtactccttgacccaccgctcaattgcccaccagatcaccagcccgtctacggcgtatgggtagtccttgatcagcaggcgcacgccgtacgggctcgactggtctggctcggccacacctctcttgacgagatcagcggggagagcctgctcgttgaaattccagctcttgtacacgtcagaggacatctccagcgcgtacttccccgggaacacggtgagctcgaagatgccaccggcgttgatgagtgtctggcgtgcaagggcgttgatgttcaacgtgtcacggtagtgcgggctcagcagcttgtgcacgggatgcaccacactgagctgccggtttgtcgcgatcacgaagggctcgatcactgcgtgcgtgttcagccagtggctgatcagctgatgccaagcagagtcattgacgcaggcgtaagccttggcaagctgccaaatgtggccggcaacgccagtgtgagcaggggtgtacaccttgctgtccgcaccgtgctgctgaccatcagggtggggcaggctgagctcgatggccacgggcttcagggtgccatcgtcctttaagaacagcagggtcctgctggcataaatgaagttgccctccaacttgttgatccggtcgaggtatggcatgaaatgatcatggtggtctaggatgaagagcttgttcttcttcaatgcattctgcactgtgtagccttcaaggttatgctgaatgtgagcttcagtgatcttgctggtatggtctccatactgccttaggtccagggtacttttaacagggaactccgtcaggcgtttgatgattactgggttcacgcctgcaagggtttctcttccaaactcctcatcagtcctccagccaaaattaaactctggagcctttttcaatacatctgatttgatgatatttggaaggggcatctttaggggatggtcatgactaccatttggcagaatacttctaaggaactcactggggattttctcccttatcgctgctattattgggtggttgggtgcttctggaccaagttcatagagtcctaggatgtcttcaaatgaatcaaactccttcggcgtatcatcaatgaaggttcctattgttggaagaacagcctcaatgattgccttcagtgagtacccaaggaagtctgacatcttgagatgtccaaagcgttcatcacgcgggacgtagatgttcaggttgagcagaaaaagcctgctctccgaatttgggtcagtttccgttgggtcccggccagttctgcagcgacggggatatgggtgttcttggctgccaccaaggatcggccgtgcatggatttcacctttgtctggctcgccaaggtcattgtagaagtcataacggtagacacggtcatgctccttgtatggtccagcgttattgtcaccttggagaatcttgagttcatcttgccgataaggcaccaatgctgcaggcattttgcttggcagataggtgtcgttggcgaagaagatgcggtcctgggtgtagagcctgtgcgggaagacccacgagttggcgacgaagacgacggtgcccttgccggggacgccctcgagggtgatggtcttgaggaagaactcggcgtgctgcaggttcctgacgaggacggcgcccgggatgccctgcgactcgtcccactcgaagttcacccggaacaccgtctccccgttcgtcttggacttgagggacaccaccgcctcctccaggtgcgcctcattccccagcttcccccggcctccattgcctgcgaatcgatccacgacagcggagaacccgtttacacaaactgccgcagctaaatccaaagaaaatgctccctgaagaattttcagtaaaatctccgagggccctgaacgcctgcgcgtcccgtcgaccctgaattgagtattgacgatgaagctacagcgaatcctcaggttcccagtgtc

SEQ ID NO: 34171 - DNA, 3146 bp, Setaria italica
  Peptide Sequence Number=SeqID_100145
gttttccacattactcaagtcaactgcttgccccatcgcgatgagtatgcagcatgcaccaacagctttggcagttttgtgtgccagttctctgacttcagatgccagtttgtgcaacgttcactttatttataacgtacagcaccactacgtgttatttccatgtgccggctcacacagacgttaaccgacctctacaagctcccacgtggcatcgatcatacgacgacgctcgcactctctctctctctcacacacacacacgcacacgcacacacaagcgacagagttattcaagcgccacctctcgtggcctccagacgcgcgcgcaacaccttacacctagacgtgcaggccgcagcagcctcagatggagatgctgttggggatgcccttggcggtgagcccggcggcggcgcccgtggtgtcggaggtgttgggatacagcagcgtgtaggggaactcgggcgggcccgctccggttcttcagctgcgggtcgcggttctcggccaccaccttgccctcgatctccaccagcgcgtcgctgaaccgcttgaacgccgcgagcgccctggcgtccgaggtccactccggggtgtcgcgctggcccaggtacacctcgtcggaggagtgcttggagaggacctcgatgagcgagatgccgatgatggtctggatctggctggtgatggtgtggatgaacccccagctccgggtcgcgctccaagctccgcgtacgcctccgtgccgggctccggcatccggcgccggctcaccgtgggccggttcgggaggtaccccgcgtagggggtactgcccgaagttgacggccgcgtgcagcgccgacgcgatccagatgatggtggtgcaggcgctcgcgagctccgtcacggcctgcatccgcggccaccagggcgcgtctttgaggtcgccgtgcccgacctcgcgcacctccttccaccaggcctgcagctccgcgtcgccctgcagcgtggcgtcgttggggtagtagatggccaggtactcgcccacccaccgctcgatggcgtgccagatggccagaccgtcgctcgcgtacgggtagtcctggatcagcagccgcaccttgtaggggctcgacgggtccggcaccgccacgccgcgcttgacgaggtcggccgggaggccctgctcggtgaagttccagtccttgtacaccacggaggacatggtgagcgcgtacttgcccgggaacacggtcatctcgaagatgccgccgccgttgatgagagtctgccgcgccagcgcgttgatggtcatcgtgtcgcgatagtgcgggtgcaggagcttgtgcaccgggtgcgtcacgctcagctgccggttcgtcgcgatcacgaacggctccatcaccgcgtgtgtgttcagccagtggctgatgagctggtgccagccggagtccgttgacggcgacgtaggccttggcgagctgccagatccacgcctcgacgccgctggacgccggcgtgtagaccttgctcttggccttggtcaggccgccgtcgatgtagggctcgctcagctcgatggcgagcgggggtcagcctgccgtcgccgcgcaggaagaagagcgtccgggtggcgtagatgaagttgccctccaggttgttgacgtcgatcaggaacggcatgaaccggtcgtggtggtccaggatgaagagccggttgccgtccagcgcctgctgcaccgtgaggccctcgaggctcttctcgatgtgctccgccgtgatggtgctggtctggtcgccgtacttgctgggatccagagtgctcttgggagggaactccgtgaggcgcgtgatcatcatcgggttaacgccggcgagcacctcgcgcgcgaactcctcatcggtcctccacgcattcttgtcctctttgatgatgtgcgggatggggagcttgaggaggtagtcgccgccggcggggaggaggtccttgacgagctggagcgggaagagcttgcgcatgtcctcgagcgcctggatcttgggcagcttgatgccgccctcgtagaggttgatgatgtcctggaacgagtcgaactcggccgggggtggtgtccacgtacgtgcgcaccgccggcacgatcccctgccgtgatggccttgatcgcgtaccccaggaagtccgacatcttgaggtgcccgaagcgctcgtcacggggcacgtagatctgctccaccagcgacagccggctctccgagttggggtcggtggtggtgggcttgcggccggttcggcaccgggcgagggtaggggtggtcgtccgagccgccgaggacggggcgcgggttgccacggtcgggctcgccgaggtcgttgtagacgtcgtagcggtagacgcggtcgtgatcctcgtaggggccctgctggtcgtcgccgcggaggttgcgtagctcgtcgtcgcggtagggcttcagcgccgccggcatctggctcggcaggtacgtatcgttggagaagaagacgcggttgtagcgatacttgtcgacggggtagacccatgagttggcgacgaaggtcacggcaaccgcgcccaggcacctcgtcgagggtgatggtcttgaggaagaactcggcggagtggtagttcttgacgatgatggcgcccggcacgcccagcttctccacctcccagtcgaaggcgacgccgaacttggactcgcccgtcgtcagcgacggcaggctcgtcagccactgctccaggttcggcgtcgccttcgactgggaggtggagaagctgggcgtgccgggcgccatcatcgtcaagaactaccactccgccgagttcttcctcaagaccatcaccctcgacgaggtgccggggcgcggtgccgtgaccttcgtcgccaactcatgggtctaccccgtcgacaagtatcgctacaaccgcgtcttcttctccaacgatacgtacctgccgagccagatgccggcggcgctgaagccctaccgcgacgacgagctacgcaacctccgcggcgacgaccagcagggcccctacgaggatcacgaccgcgtctaccgctacgacgtctacaacgacctcggcgagcccgaccgtggcaacccgcgccccgtcctcggcggctcggacgaccacccctac

SEQ ID NO: 34172 - DNA, 607 bp, Setaria italica
  Peptide Sequence Number=SeqID_100146
agtagggtttcccgccgccgccgccgcccgctgcagttccccgtccgtgcacttatccggcgttgatctcgctcaggagcggatatgaagcccgtggtgggcgttgtggtgtcgaacaagatgcagaagtcggtggtggtggcggtggaccacctcttccaccacaagatgtacaaccgctacgtcaagcgcacctccaagttcatggcgcacgacgaagaagacgcctgcaacatcggcgaccgggttaggctggatccttctaggcccttgagcagacataagcactgggttgttgctgaaattcttcgcagagctaagatgtatgttccaccatctgcaacggcatccagtgaaaatgataccaaggctagacaggctggcgttgctaccaaatgatcccgcctttagttccttggagacaaagacacagttgccattttttgttaattgaatgtgcatgagatgtttaatccgtggaagaaaccatcatttttgctggacacggtttgttcttctgtagcaccctttgttggatggcagccaatggggatgtaattaccagaatcaactttcgagatccaattgttttttttttggcatttgc

SEQ ID NO: 34173 - DNA, 1732 bp, Setaria italica
  Peptide Sequence Number=SeqID_100147
gcagtacaaatatgagcttctttggatcatactggtcgcgtcctgtgctgctcttattattcaatcacttgcagccaggctaggggttgtgacagggaaacatcttgccgagcattgtagggctgaatatcccaaggtcacaaattttgtcttatggattcttgcagaacttgctgttgttgcatgcgacattcctgaagtaattggaactgcttttgctctgaacatgctgttcagaatcccagtatggtgtggtgttctaataactggactcagcactctaatgctcttattactacaacaatacggggtccgtaagctggaatttctgattgcatttctggtgttcttaatagcaacttgtttcttagttgaacttgggtattcgaaaccagatgcttcggaagttgtgaggggcctttttgttcctgaacttaaaggaaatggagctacaggtctcgctatctcattacttggtgctatggtgatgccgcataatctttttctgcactcggcgttagtgttatcaagaaaagtgccacggtctgttcatgggattaaggaggcctgtagattctatacaattgaaagtgcatttgctcttacagtagctttcctcatcaacatatctatcatatctgttagtggtgccgtctgtggttcaggtaatttgaaccctgaagatcaggcgaactgcagtgatctggatctaaacaaggcttcatttttgttaaagaatgttcttggaacctggagctcaaagttgtttgcagttgccttgttggcgtctggtcagagttctacaattacaggaacatatgctggacaatacgtcatgcaggggtttttagatcttcggatgacaccctggatacggaatcttgtaactaggtccttggctattctgccaagtttgatcgtgtcaattattggtggttcctcagcagctggccagctgattatcattgcgtcgatgatactgtcatttgaactccctttcgctctagtaccactccttaaattcaccagtagcaaaacaaagatggggcagcatacgaattcaatattcacttctgtgctaacatgggtgatcggttcattgattgtcatcatcaacacctacttcctggtaacgagctttgtcaagctgctcctccacagcgggctgtccaccgtctcccaagtattttccgggatattcgggttcctgggcatgctcatatacatggccgcgatcctttacctcgtcttccggaggaacaggaagtcgacccagccattgctggagagcgatcctgagcttgcagcgtccgaccacagcacaggcgctggagcagaaggtggttctctaggccatttgccccgggaggacatctcgagcatgcagcttcctcagcagcgtgcagggactgatctcgattagatatagcggccaggaaaataaatgttttttgatggtgatatagtagtattaggtacagtatttacacattaggtacatcaggtactgacgtagatcatcatagcgatgccacagtggataataatctggctaatgtatacaagagggtggatatcaatgacaccaaagttttaacccatgttgctgttggaatgagttgtgaaatccttgcattccaaacatggcgggcttatggtgagaaaaagagttgatgctgtaaacatgatgaattttgacgatcacaataagatactagagaaactaccttat

SEQ ID NO: 34174 - DNA, 424 bp, Setaria italica
  Peptide Sequence Number=SeqID_100148
agggttttggcaaactttgggcacctcggttcatgtggtaggtaattacttaatttttttttttaaaaaagttaacagaggtaacagaggcgcgctgtccctgttcctcctctgtcctctcgtcttccctggtccaatggctttggcagagggcccggcacgatatccctgctcccctgtcgcatggctagggctgcccgatttgtgcaactgggccactggggcggctagcggagaagaagaggaaaaatccactaccactctagcaggcgcttgctgttcaatgcccctaccggccgccgctgcagtgctccgtccactagccgactagcgggtaggcggtagccaccctcccacgcggaagatggccggactcgtttgaccttcccctgcctcgcttgtcccaaaaaaggccaaagccaga

SEQ ID NO: 34175 - DNA, 647 bp, Setaria italica
  Peptide Sequence Number=SeqID_100149
tgtccttggttaggtttttgccctggaggttatgacacaaacaaagcgatgtttgtatctctaatgaccaactcattaacatttgctagagtacagcacttctgtgtagaaaaatgtgacagcgagtcaagtgaaatggaaccaaaactattaacatagttgaaataattaaagagattgaatggttcataggtgagtatagtcacccttcacatggaacaaggaccaagcaaaggcacaagtaccaaacactccatatggattttggacaacggttaccagtgtacaatggtccagtacaagacacttgcaatgcagaatttaagaaggcatgtaaatcaggcatctgtccaaaaatataagtataccactttcctaaatcattttggagctgtttggtttatgaacaaatttactatggggaatggggaggacaaatcattggcaagccagaatcagggacatcaatctggtggccaagattttggcctattggccaaaaaaatgaactaggcagccaaatgagactgttgcatacccaaattttggcacccaaccaaaatggtggacaaagttagtcaaagtagccaaattttggcttgccaactatgggcacactagggtcaaactactaccttaaaaaaact

SEQ ID NO: 34176 - DNA, 173 bp, Setaria italica
  Peptide Sequence Number=SeqID_100150
tcggtgctttcgggtaagcgcctcgacctccaccgccgcattctcgcgctcatccgcgagaatgacctcgacgaggcggcgctcctcacgcgccactccatctactccaactgccgccccaccgtcttcacctgcaacgccgtcctcgccgcgctgctccgccaggcgcgcta

SEQ ID NO: 34177 - DNA, 486 bp, Setaria italica
  misc_feature (458)..(486): n is a, c, g, or t
  Peptide Sequence Number=SeqID_100151
cggcgggcggcgaggaggccgcggcgcccgtggagaagacggagttcgacgtggtgatcgaggaggtgcccagcagcgcgcgcatcgcgaccatcaaggtggtgcgcgcgctcacgaacctcgcgctcaaggaggccaaggacctcatcgagggcctgcccaagaagctcaaggaggccgtgagcaaggacgaggccgaggacgccaagaagcagctcgaggaggtcggcgccaaggtgtccatcgcctgagatgcacgcaagcaccagctaattacactaggactgcttctcttttacgccccaagtttttcttggcaattactcacacaattttgcgtcccttgttcctgtaagaactgtactactaccgtgttgtttcagtacgacggcattaccttttggtacgtgactaaaaaagagtatttgacaatttggcgagttactgattggcgttcnnnnnnnnnnnnnnnnnnnnnnnnnnnnn

SEQ ID NO: 34178 - DNA, 847 bp, Setaria italica
  Peptide Sequence Number=SeqID_100152
cagagttaagaggtctgaagctgcaatatgcaagtgtatatattgagttatctgaaagtgtgattcgagttcatcattcgtgtaacggttactcaaaaacagtaagatcaaacaagatgatatggcacacacgaaccgtactccgtaagccatgttcataacttatgccaaaatgttcagagaagcctgcgcagtggtcgtagtctgtatgtctgagttcatctcaaagtggccgtgccccaggctccgccgttgaagggtgctgaagatatgttgcaggataactggagaagcaacgcagtggttgaggagatgtttggaaggatggctctgcagataaccgactaccctggttcaggcccaaatgatcgtcacactcccaaagcaccgggtccatgattttgacaaatacaaattatgagcttttgctgaactatgacgacatgtacagagattagcaagcccatcattaatcgtctatcagctagtaaaacagtagcagccttcaagtgtaaatttttagtgtgaacttttcgttcagaaaatttgtagcataacagtgcagctcctgcctgaattcttgcatagtggcaccagtccatggaaattcatggaaggctttgggtgctttctatttgagagcagggatcgatgaatatatcctgttacttacttctgtagttgtagagtaagaattgtactaagtatgaacaaagtagctgcagattctctgcacagtaagctacacactgaactttgagaccttcagcagaacctgatcagttgttcagttttctcgaagagtaaaatacaccggtggtccctaaaactaaaaaaaaaaaaaaaa

SEQ ID NO: 34179 - DNA, 300 bp, Setaria italica
  Peptide Sequence Number=SeqID_100153
tgtacatgacaacactcctttacatgtcaaatgtcaaatttataaattaattttgattatttgaccagtcaacagctattctttcagtgctttccctatttccccatgtattaaagtggaggcacagttacaactttacaatgctcatagctgcaggaaaataatgaaaagaaacattggaaacctttttgcttgttacagcaactatttgtccatattttccttcctcctttcgaagtttcggttgaattaagagaagcaagaattttaaaccttttttattgattggacaggcaaagg

SEQ ID NO: 34180 - DNA, 530 bp, Setaria italica
  misc_feature (11)..(11): n is a, c, g, or t
  Peptide Sequence Number=SeqID_100154
tgcgctccagntcccgcttcttccgccacgtcatgcacgccatcgccgacccggccgcggccgtcggcggtggcggcggcgtggacgacgaggcgcgcgccagggccgtgatgttccagcgccaggtcgtcgccttcatgaagcggcgcgcctggcacgcgccggacgtgtcgctgctcccctacaccggctgggtcttcgtctccaggaagatcggcaggctgctcaacatgctgcaggtgctctccgcgttcgcctgcgtcgcgctctcgctgatgcgcctctggaagcacgacttcggcggcgacggcaacatgaggccggcgctgctgctcttctacaccctggcgctcgtggaggcgtcgctattcctgctggagaaggcgtactggacatggaaggtctccatccgcaagctgctccaccaggtgagcgccgagtgcgagctgggcgagtacgggctcgtggcgctcactcgcttcttctacgacgcctactcgcggtgcatcgccgggagcatcttcgacggc

SEQ ID NO: 34181 - DNA, 558 bp, Setaria italica
  Peptide Sequence Number=SeqID_100155
tgtcttgggtatgctcttggatcagttattgtgtcagctgtaccatgtagaactagaaaaggaacagtaactctgctcaagtttctttgcaaatatgatgatattcggagtatttcattgccagttctaactctaattggtccagtataaacaaggggatctgaatacttcatcttcagagcctctggatcacgggaaacaggaggtcctctcttatgcaaagcactaactcgatattttggagctagcacggagaatataggtgcaacaactttgatgattggatgagatggttgaacatgaatagctggcgatgttaagaccacaccttctacatgaagttttacacaaggatctagagctgccttcaaaacaatagctccacctgtggagtgcccaaataagaagcatggcaaaccatggttttcctccaatacaatatcctcgagaaattctttcaagtcaccaacagcatgatcaagcgatgaaacatatccatgaaccccatcacttccaccatgtccaatccaatccatggcataaactttaagcccttga

SEQ ID NO: 34182 - DNA, 179 bp, Setaria italica
  Peptide Sequence Number=SeqID_100156
cgccgtcgggggcgtgaatagcagctcccgcctcccatccgcgatgtcgaagatgaacacgctgcggtgcagggtgccgtcggggctgaagaggaaggcgatgcggcggtcatcggggctgaagctgagccccgtcggcgcctcgtagcccggcagcgggcgcccgacggtctcctcca

SEQ ID NO: 34183 - DNA, 458 bp, Setaria italica
  Peptide Sequence Number=SeqID_100157
attaatacattgatatgttacttggtcacaactaaacctaatgtgaaaactgtactctattgttttctgtaatggttggcatttaatcctcgggaaagccattttcagttttcttggatgagctattgatcatggtatgtccactggcttagcaaataataacataatttaaggacatgcttctcatttctcatttagcaaataataacataataataataatttaagagtatgattgatctgcgtgagagattattctggaaagattaatctttggttttgtatgagactatgggtgtccctctccttttgtgtcattacgtttaagggcgatagcattagttttttcaatggttgaagtttacaacctgagaataggcttgttttctctacatgcgttatcctattttagggataccttattcacttttttgggtgaaacgttgggcccaacatta

SEQ ID NO: 34184 - DNA, 245 bp, Setaria italica
  Peptide Sequence Number=SeqID_100158
ttcgaacacgagaggtctgaatattttccgcaaaatcataaggcacttaactggagttatgcttatgtcactctgtccaacgcccataacaagagtcatagatgattgtggcaccagcgctactcagcttggtgacactgaagttaatcaccggacatgcattttaaactagttctgaaattctgaccaaaactctagtcaaaagatacagaagcatgcagaaaaccaagatacagagaattgta

SEQ ID NO: 34185 - DNA, 968 bp, Setaria italica
  misc_feature (963)..(963): n is a, c, g, or t
  misc_feature (965)..(965): n is a, c, g, or t
  misc_feature (967)..(967): n is a, c, g, or t
  Peptide Sequence Number=SeqID_100159
gtctagtctccatggcctccgcccgcgccgccctcctcctgcgtcgccagtgcctcggcgccgccgcggccaacccgtacctcttctctggccatggcctccgataccgcaagctcgaggtcatcctcaccacgacgattgataagctggggaaagcaggggaggtggtgaaggtggcgcctggccacttccgcaaccaccttatgcccaagatgctcgctgtcccaaacatggacaaattcgccatactcatccgagagcagcgcaagctctaccaacgtgaagaggaggtggtgaaagaagtcacgaaggaagatgatgatgctcggctacaggaagagagactgaagcagtaccaaacggcagcaaagcggctagataatgcactcttggtgttgaggcggtttatatcgactggaaatgagctgcgcactcctgtaaccaaagatgaaattgtctccgaggtggcaaggcaactgaacatcaacatccatcctgacaatctgcacctgcagtcacctttggcgtcccttggtgaattcgagctaccgctccgcttgccacaggatataccacgcccagaaggcaagctacagtggactctgaatgtcaagatcaggaggaaatagtgtgataacagggggaatttcattcaccgcccaaacaattgtagccttgagatcaagggacctgtggaataggttttcagatcaaacgttacgctactcagatgtgtatgatctgcatgcttccttcccgttttttggaagcagggtgtttgatttttgccgtctgaacttatttcctgtctttggacaggattccatttctggagatgtgattgttagataatgtagcgagaaatgttgaataatttgtctacaataggacacgacaaatcgtatattgtcatggatttggttttgcaaaacaaaccaaaacaaaacaaaaacaaaaacaaananana

SEQ ID NO: 34186 - DNA, 474 bp, Setaria italica
  Peptide Sequence Number=SeqID_100160
tgctttgtataagaaactcctcaaaagatgtgccagcctgttcagaattcgtaatcatgtttaagcagaagtcaactgtagctggaagcacagtttcgtgaacaaaagaatatggatgtctgccttgcaaggtaacaaggactttcatcaacttaatgcatgattctttttgcaaagtcccatagtttagcttgcttgtctttaaaggagtcataatatggaagaagggatttaatggctgtcaaaactgctggacaaacttccctgacctgccagacatcctgtgcagttctcgagtcactagcatagcctgaaaaaattaattgtcggacaatctttaagcagagcaaccaacggtcacatatcaaaataaggtcatttgattgctccaaaatggaatctatgtcatttcgctgcgagagcatagaaagattctgtaatatagtctgcacatcgctcttccaaaggttccat

SEQ ID NO: 34187 - DNA, 479 bp, Setaria italica
  misc_feature (411)..(479): n is a, c, g, or t
  Peptide Sequence Number=SeqID_100161
ctccccctacgatcgcgagactccccctcctccgcccccgccgctgccgcagccgcagcagccagaggcctccaccggtgagctcgccggcgacggcgagggaggtgcgcccagcgcgtaaccgaggtcgttttcggaattaccttttttccacttattcttggggaatttgcagtgtggtccttgtacagggactggacgcaaatgttctgctttgttttttttttcttccctacctttttattcttccttccctttttacccttttgatgggtttcatttccccccgcggcgtagatgtagtagtgtagtaactagtgctggtaattatggaggacaaaagggaccaaaaaaaatttgtagctttagtttgaattagaagagataaaaggaaaaggagattccggaatnnnnnnnnnnnnnnnnnnnnnnnnnnnnnnnnnnnnnnnnnnnnnnnnnnnnnnnnnnnnnnnnnnnnn

SEQ ID NO: 34188 - DNA, 1416 bp, Setaria italica
  Peptide Sequence Number=SeqID_100162
ctagtgtgcagtggattgagagttacatgttcttgccaaatcaatttgttattcttataaatttgtgtctgcttccctgcctaggaataattcagaaagctacagcaattgtcgttgttgttgctgtgcaggtcgccgtgttcgcgcagaacatccccgcgttctgcgagctccacttcggcattcccatggccggcgccgtgatctgcgcgctcaactcgcgccatgacgccggcatggtgtccgtcctcctccagcattccgaggccaaggtgttgttcgtcgacgccgcgctgcttgacaccgcccaagaagctctccgtctcatgtccaaagccggagcaaggtcccccaccgtggtcctgatcaaggaggtcctcgacgagccagccgtcccagctgaccatcatcagtatcacgagtacgaggccctcctgagcagcggcggcggcggcggctcgccggagttcgttatccggttggcctgccgacgagaacgagccgatcgcgctcaactacacgtcggggacgacgtcgcgtcccaagggcgtggtgtacagccaccgcggcgcgtacctcaacaccctggcgtcggtgctcctcaacgatatggcggcgatgccggtgtacctgtggacggtgcccatgttccactgcaacgggtggtgcctggtgtggggcgtggcggcgcagggcggcaccaacgtgtgcctgcgcaaggtgtcgtcggcgggcatcttcgacgcggtagcgcggcacggggtgacgcacatgggcggcgcgccgacggtgctgagcatggtggtgaacgcgacggcggaggagcggcggccgctccccgggggtcggccggtgaccgtgatgaccggcggcgcgccgccgccgccgcaggtgctgttccggatggaggagctcgggttcctggtgatccactcgtacgggttgacggagacgtacggccccgcgacggtgtgcacgtggaagccggagtgggacgcgctgccggcggcggagcgggcggcgatcaagtcccggcaggggctccaccacctggggctggaggtggacgtgaaggacccggcgacgatgcggagcgtgcccgccgacgggcgcaccatgggggaggtcatgttccggggcaacacggtgatgagcggctactacaaggacgccgcggcgacggcggaggcgatggccggcgggtggctgcggtcgggggatctggcggtgcggcacgccgacgggtacgtgaagatccgggaccggtccaaggacatcatcatctccggcggggagaacatcagcaccatcgaggtggaggcggcgctgttcgcgcacccggcggtggcagaggcggcggtggtggggcggcccgacgagtactggggcgagacgccgtgcgcgttcgtgacgcta

SEQ ID NO: 34189 - DNA, 759 bp, Setaria italica
  misc_feature (250)..(250): n is a, c, g, or t
  Peptide Sequence Number=SeqID_100163
ttcctttctagtacctacttaaggtcgtttgtctttgtattcggtttggtagtagttcgtttttgttctctctcagtcatttagttcatcaaaaccagaaaatattgaccatcttctaaagcacctaggatcgccgaaaaggaggatcctcccaagcagtgcaggaagaagtaaagtaacgcccaaaaaggcagttagaaataatgactctagcaaggtgcctagatattcgcaaaggattgcactttgngcgtacatgatactaggtcatccaaaatctgttcttagtggacaaggtgagcgagagaaattgcttatggactcagcaacaaactttgtgaaggaatttgaactgctggttaaaacaatactcgatgccttagacggtgcatgcatattgaagcagtcagagctagatgttgcctctcctggatgttctagttatgaggagtcctcttccattgttgctgatcgaaagaaattcagaactcaattggttgcctttgacaaagcctggtgtgcttatctttatcattttgtggtgtggaaagcaaaagatgctgaatcactagaggaagatcttattagagctgcatgcaggcttgaactgtcaatgatccaaacatgcaaaataactaatgaagggcaatcagataactttcgtggtaatttgaaagccattcagaaacaggttgcagaagaccagaaacttttaagggagaggattcaaacacctgggtggtgaagctggtattgaaa

SEQ ID NO: 34190 - DNA, 615 bp, Setaria italica
  Peptide Sequence Number=SeqID_100164
atgtcattgtaacagagtatatgcctggaggtaatttatatgactttcttacacaagcaaaaaaacactgtggatctcacaatggttcttaggattgctatcggcatctcaagggggatggattatttgcaccaaaacaatattgtccatagagacttgaagactgccaatttgctgatgggctctgatcatgttgtgaagattgcagactttggagtctcaaggaatccacctcaagagggagacatgactgctgaaactggcacctacagatggatggcacctgaggtaataaaccacaagccctatgatcatagggcagatgtcttcagctttgctgtcgttctctgggagctggtcacttcaaagatgccatacgaaaatctgacacccctgcaagctgcacttggagtgaggcagggaatgcggttggagatcccctcatgggtgcatccgcaactgtctaaactgattcagcagtgctgggatgaaaatcctaacgtgcgtccctcattcgctgagatcaccgcagaactggaagacatgttacggcatcttcagggctccaagggaagcaaccgtcattccaaaggaaaggtgcacaagaaatcacag

SEQ ID NO: 34191 - DNA, 336 bp, Setaria italica
  Peptide Sequence Number=SeqID_100165
gaggggcacgcaggcccggaagctggcggcgtcggtgcggccggcgaggccccggtcccggacggtactcggttccggcgttgtcggcgaggatccggcgcagcgtctcccgctgcaccgcggcggcgtcccgcgtcagggcctcgaactcggtgatcaccgcctcgccgcagaacccctcgctcctcttcgactccggcatcttcatgtcaggccactccgctctgctctgctctaccctgcggggtggggatgccgccgccgggccggacaacggcgggagacgggaggcctgctgctcggcgttgctggtggcgcccggtgcggcgtgacgag

SEQ ID NO: 34192 - DNA, 472 bp, Setaria italica
  Peptide Sequence Number=SeqID_100166
ttggtaaattcttttctttcttctattggtggggtactaaattacttaactatacttctttgctacttcgtgatcaactatctcgtttttgacctcaaaagcctgagtggaccagtgtctgcgaccctctacattgggtactcactcttcatggtgattgctattatgctggcaactggaacggttgggtttatttcttcattctgctttgtccactatcttttctcatcggtgaaagcagactgagtttattcctactgaggagtcaatcactcaattgagaggtgagcataatggacattgaaaagtttgtagtcacaaaaatcttagttcatgtcatcttttggtatacagagcctgaataactattgtaatgattactagggttcatcaatggattttatgaagaggtgctagcagcatgcacgatgtaatagaatgaattgctttattcacatgttgtgttaatttt

SEQ ID NO: 34193 - DNA, 429 bp, Setaria italica
  Peptide Sequence Number=SeqID_100167
actacgacttcactcatcttcttccggtcttcccttccgtcgcgccgtcggatcgaacgctagggtttctccgaatcttgcgtcggcggcggcggggcgctctccctcgcggcctttgccagcgccaagtccaggaacaccggctacaacccggcactcatcaagaagcagaaagagttctacaaaaatgctaaattaattagcaagtacaaaaggacaaagaagcaacaaaatcagtcgagcaatcctccagaatttccaattcatgagggtggtggtgatttcaatgtgccgaagctgcaacacaaagggaagaagcgcactgcacaaagcttgaaggaagagtatgagaaaaaacgcgcagaggttgaaaagactcagaaggagcgggatgcagtcattcaggcaaagagggaacagaaggagaag

SEQ ID NO: 34194 - DNA, 789 bp, Setaria italica
  Peptide Sequence Number=SeqID_100168
ggggcgctctccctcgcggcctttgccagcgccaagtccaggaacaccggctacaacccggacttctagttgttgtagttagttcctaaactattacgcaactacactcatcaagaagcagaaagagttctacaaaaatgctaaattaattagcaagtacaaaaggacaaagaagcaacaaaatcagtcgagcaatcctccagaatttccaattcatgagggtggtggtgatttcaatgtgccgaagctgcaacacaaagggaagaagcgcactgcacaaagcttgaaggaagagtatgagaaaaaacgcgcagaggttgaaaagactcagaaggagcgggatgcagtcattcaggcaaagagggaacagaaggagaagtctgaggcgaagcgaagagaactgagggagaagatgttcaagaagacgagatctggccaacctgtgatgaaatacaggatcgagcatctcctagagaccgcgctagaaagctgaagcaagcgacaggataccagctaccatcatcaccgtctgagaccaaagcatgcaagcaaaatttatagttccgtgcaaccatcagtttggtttagcctacttttgtcgctcgttgtatatatcattgtaagctatctttggatttgatcacaacactctggtttcccctgtctgtccgtacccacagtcctgtgcgcttccattttgtcaaatggtgtaagatgatcagtagagacctgagtgctcagaaacaattggatccagaagccatgatattagctatcaaattcatctta

SEQ ID NO: 34195 - DNA, 2492 bp, Setaria italica
  misc_feature (2444)..(2492): n is a, c, g, or t
  Peptide Sequence Number=SeqID_100169
ctcctcgccggagcagggccaccaccgccactcccaacccccgccgccgcccagatccgcctagaacccaaactcgaagcccccgatccagatccaaggccaggcgatggcacgcctcggcgcgctcctcctcgtcgccgtcgcggcggcggcggcgctgctctgcgcgctgccgggcgcccggggattctacctcccggggagctacccgcacaagtacaaccccggtgagccgctcagcgtcaaggtgaactccctcacctccatcgacaccgagatgcccttcagctactacagcctccccttctgcgtcccgccggagggcgtcaaggacagcgccgagaacctcggcgagctcctcatgggcgaccgcatcgagaactcgccctaccgcttcaagatgtacaccaacgagtccgacgtcttcctctgccgctccgccccgctcgcccccgacgccttcgccctgctcaagaagcgcatcgacgagatgtaccaggtcaacctcatcctcgacaacctccccgccatccgctacaccaagaaggacgactacttcctgcgctggaccgggtaccccgtcgggatccgcgtcggcgtcgactactacgtcttcaaccacctccagttcaccgtcctcgtccacaagtacgaggacgccaatgtcgcgcgcgtcatgggcgccgccgacgccacagacgccatccccgccgggggcaaggacgggggctcctcctctggctggatggtggtcggcttcgaggtcgtgccgtgcagcatcaagcacaacccggaggacgtcaagtcgaccaagatgtacgaccgctaccccagcaagatcaagtgcgacccgaccaccgtgtccatgagcatcaaggagaacgagcccattgtctacacttatgaggtgtccttcgtcgagagcgacatcaagtggccgtcgaggtgggatgcctacctcaagatggagggggccaaggtgcactggttctccattctcaactccctgatggtgattgccttccttgctggtattgtgtttgtcatactgttgaggactgtgaggcgtgatctgaccaagtatgaggagctcgatagcgaggcgcaggcacagatgaatgaggagctgtctgggtggaagcttgtggtcagtgatgtattccgtgcaccaagcaacccaatgctgctctgtgtcatggttggggatggcgttcagatccttgggatggcggtcgtgaccattctgtttgctgcacttggtttcatgtcccctgcctcgcgtggtaccctgatcacaggcatgcttttcttctatctggtcctcggaatcctggctggatatgctggtgttcgtgtatggaagacgatcaagtgcggggatcactctgggtgggtgggtgtttcgtggcgggtggcctgcttcttccccggcattgccttcctgatcttgaccacacttaacttcctgctgtggggaagccaaagcaccggtgccatccccttctcattgttcgttgtgctgcttctgctctggttctgcatctctgtgccgctcacgcttgttggtggattccttggtgcgaaggcaccacacatcgagtaccctgtccgcacgaaccagatcccccgtgagatccctcctcagaggtacccatcctggttgttggttcttggtgctggcacactgcccttcggcaccctattcattgagctcttcttcatcatgtcgagcatatggatggggcgtgtgtactatgttttcggattcctcttcatcgtcttgctgctcctggttattgtctgcgccgaggtttcactggttcttacttacatgcacctgtgcgttgaggattggaagtggtggtggaaatctttcttctcatctggatcggtggcaatctacattttcttgtactcgatcaactatctcgtttttgacctcaaaagcctgagtggaccagtgtctgcgaccctctacattgggtactcactcttcatggtgattgctattatgctggcaactggaacggttgggtttatttcttcattctgctttgtccactatcttttctcatcggtgaaagcagactgagtttattcctactgaggagtcaatcactcaattgagaggtgagcataatggacattgaaaagtttgtagtcacaaaaatcttagttcatgtcatcttttggtatacagagcctgaataactattgtaatgattactagggttcatcaatggattttatgaagaggtgctagcagcatgcacgatgtaatagaatgaattgctttattcacatgttgtgttattttagttgcttagtatcatatattcttcaagttacttttagagaaaaagacactggactggcagatccatttatctccttatgctaatagatccttgctagttgctgcaaattacgatagaaaaaaaaannnnnnnnnnnnnnnnnnnnnnnnnnnnnnnnnnnnnnnnnnnnnnnnn

SEQ ID NO: 34196 - DNA, 466 bp, Setaria italica
  Peptide Sequence Number=SeqID_100170
gtctccgctcgcatttcccgctttgtttccgcctcctcgctccccctctccagacctcgccgccgcctcgcgcccggcctgcgcgctctctctcctagggttagggtttccgccgccggcgacagggatcgcgtcctgatcgcttattttgaacattggagttgaacaaggcacttcttctgaagtgaattgcatggagatgggaatgacccctgaaataatgtatgggcaaaatatttttgttcctgctactgcaaatccctaccaatatggctacgcagaagttggacagcctatggaatggtataaccacccgagcactgtaggatatgatggccaagatgttttttacccgacagaaggcatgccatgcgtgtactatgctgccccggacaatgcatctatgcatccttcctacagtccttaccctcttgatccttctttcatacccgatggctcatttatg

SEQ ID NO: 34197 - DNA, 262 bp, Setaria italica
  Peptide Sequence Number=SeqID_100171
ttccggatagatgtagatagtgttatttcagcatttcctccccctcatcagatgggctttgaaagaagctgtagtagtgtcatgagttgagggtggggtcattaactttttaatctatcggccttagtatccggcaagaacatccgctgcgatacatcaaatcttatctttacgtgtatctaaggcctgtttgtacgagattataatccacatagattatataagctagactataggtcattggtactataaaaaaaaaaaa

SEQ ID NO: 34198 - DNA, 306 bp, Setaria italica
  misc_feature (305)..(305): n is a, c, g, or t
  Peptide Sequence Number=SeqID_100172
cgcgctgcgggctcagctccgcgccgaacgccgcggacgacggcgcggcgagcactgcacgccgccgccgccgtagcagtagtactctgagaggcggtgctccctggactcggtcgccgccgccgagcagctgctccgcccgcgccgcgctgccgggtcgctgatgtccacctccacgatcttcacgtgctcctcgccggaccggtccatctcgtaggagctgcggcgcctggggtgctgcggcgaccggcgttggtaggcggcgacatggtccgcatcggccatccgcgcgcgctgccgcccgna

SEQ ID NO: 34199 - DNA, 1353 bp, Setaria italica
  misc_feature (1295)..(1353): n is a, c, g, or t
  Peptide Sequence Number=SeqID_100173
caccgccctcttaaaccttcctgtaccggaaaggtagaatgcaagaacatcattgatccaaccacaccccttaaggttgtctgggccatgggtgcaagctggtcgggagatgatctgacagacagtaacatgcattcagtcacaagcagtcggcctatacgagttctgttgttgagaggttcggctgaggcagaacaggatttgcgtcctgttctggctgttcatgggtttatgatgtttgttgcctggggcatcttgcttcccggtggaataatggctgcccggtatttgaagagcttgaaaggtgatgggtggtaccaaatacatgtctacctgcagtattcaggaattgctataatgtttcttggcgttcttttcgctgcagctgagctccgaggcttctttgtcagctcagtgcatgttaagtttggtgtgctggccctattattggcagttttgcagccactaaatgctaaattccggcctagtaaaccagctaatggggaggttccatctcggaatcggatcctgtgggagtacctgcatgttatcacaggcaggtcggcgattatcgtcggaattgtggcgcttttcacgggaatgaagcatttaggccataggtacgacagtgagaatgtagaggagctcacttgggccttaatgctgtgggtgctttcagttatcgttattgtgctgagcttggaatataaggaggtcaaaagaatgagcagcaacagaagtgtcagagggcactgggtactaggcaacaccgaggaagatgattcggttgatcttttgcatcctgacggtacagccaggaattcggattctagtacttctggtgtgatggaggtgcagcttgaacctctcaatagatgatgtagatcaaatcggtcagatacagatacacctgtttattctctattctgttatatggatggtgaggtccaccggcatgacaattttctgctcgttagaagtctggactggggagttttcatggtggttcctactacggcagaatggttccaggctagacaagatgttcaaattctgtcccaatttcatgcattacattgtatagtgtacattcttttgacaatagacaggtataatttgccacattgccctagtgattcttttttactattcagatttatagagggaaagaattaattgaggtgcccatacgattcacagcagcaatacatgcgccgagtatccaaagatgccatgaattttgtaccatatccatatatctgaagtcatatttattcactaccggaatgaagggnnnnnnnnnnnnnnnnnnnnnnnnnnnnnnnnnnnnnnnnnnnnnnnnnnnnnnnnnnn

SEQ ID NO: 34200 - DNA, 514 bp, Setaria italica
  Peptide Sequence Number=SeqID_100174
ttcgagcacgctgggcgacagcacctcggggccgaccttccgcggcgacgcccccgcggccgcggccgccgccatcgccagcggcgcgatcatcttgaggttgttcttgccgatccggcgctcgtagagcttgaaggccggcttcttgggtcctcaggcgaggccgctagcgccgccgtggttgtggtggtggtggtggtggtggtggtggcccttggcgggcttattctgtgctgacgacggcgtgtcggagccggtgagcctctgcacgacctgcttgaagttggcggtgtcggcctggacgaacgtggtggggaacggcgtggtgtcgatgatgcgcggcacgggcttgggcgacgggggcacggggtggtgctgctgctggcgcggcgacggggaggcggcggaggagggggaggaggaggaggtggacgaggacggggagttgggggcacgcgccagtggggaggagttgcttcgccgcagcaacttccatttgcggacggggactggg

SEQ ID NO: 34201 - DNA, 437 bp, Setaria italica
  Peptide Sequence Number=SeqID_100175
agcaggattactggacagccatagttctgcaggcattgcccactcataaattcggcacgcatggggaaggattttatctacaggtagtgacaagtccttcaagcaacgttcagcaattgcatagaagttaactgaaggaagcctcaagcatattctttgtgctatggatccagcagcagcttctagctgccatgctccaataacttgcaccggcctgaacagctgccttgcatccaaagggcagcgttgcaggtgcagtgagctcccaaggagcttgtctacttcagtaaacactgccagataagggagcttggattccactgcccacctgtaaatgtcactaggtaagatggcctgacgggcaatatgacaggccaagaagcaaactgctagtgttgagtaaatgggcagcaacgtcctcagtgagcgagaaaagc

SEQ ID NO: 34202 - DNA, 314 bp, Setaria italica
  Peptide Sequence Number=SeqID_100176
ctctcctccctcctccgctccccctcctccccccatctcgccatacacttctccactccttcgatcaccagccgcctccgccgtccgcctcgatctcctgcgatccaatccggttttttccttgatccggtgcgcaggagcctggtcagtccaatccgcctgtggagaatttttgtttattttcgcctgcatcgtatcctttctccaaaggattttctgttggtttggggaaataagagcagccttcttgatgtctactattgcgacctcgccgccaccatcggtggcgcaggagaaggccgccagccggaata

SEQ ID NO: 34203 - DNA, 451 bp, Setaria italica
  Peptide Sequence Number=SeqID_100177
gcggttatttgatcatatgcttagtttactttttcgaaggaattaaatgtttaaaagttctattctgatctccattagcacagaactgccagaaccaaaactgcaggcaaatcctgcagtgctagctaaagctctctgatcgaagccttgccagctagcctatcagtgctccttatcaccctccttgacagcctcattcttgtcagcgccagtggtactgccagcattaccattgctgccggagcagcgagcgaatttcttggacgaggtgttgtggcgcttcccgaccgggtgcttgatggcgttgagcccaatcttgcgcagcgcggccttgccgaggtcgacgccgcacatgtcggagaggcggacgaggtagaggagcacgtcggcgagctcctcgccctagtgctccgtctcccgggcctcccaccccggcacggccccgggggcc

SEQ ID NO: 34204 - DNA, 234 bp, Setaria italica
  misc_feature (1)..(1): n is a, c, g, or t
  Peptide Sequence Number=SeqID_100178
ngtgtcatacagcaaacaatgcaaatccataatataatttagcaacgcaatacacactagagtagagtactactcatatgttgacatgcacgcacttacaccttggtcgtgagtcgtttttgggcaccaccgtttggatggatcgtgggatgatgttggatccaagaagaaccttaggcatgagtgcttctggttgcaacagaacccaattgagcccttgagcagcagctatag

SEQ ID NO: 34205 - DNA, 523 bp, Setaria italica
  Peptide Sequence Number=SeqID_100179
cctggggctcgacatcgacgaccaagagggggagcttctgagctctgacggcgccggcgagatggatgctgtatgcgaagtgtgtggtgatgttggctacaggcatcttttggtacaatgtaacagctgcaagaatgctactaggcaccttgggatcatgaagattggccaggagtatattccattggctgcacacctgtcaaatcaagcaatccaagaaggtgcaggaattatcactttcattaccaccagttatgaaagtaaccaagcattcggagttgaaagcctggcaaagtagatgggaggcattggaacttactgctgaaaacatcagcttgtatttcttttcggataatatgagtgttccaagggaggaaacactatctgtggggagtgttcaggcgcaggttaggtaggagcaaagcagctacccaagtgaaacaaaaagtctcaacggtctctaaatcacacacgtcggagaaaaaggatcatcaagacaagatgcaaagcgatgcccagaacc

SEQ ID NO: 34206 - DNA, 621 bp, Setaria italica
  Peptide Sequence Number=SeqID_100180
gatcgactagtgcagtatgtcactgattattagcatagttctcaaattatgtttgtttggactttccaagctgctaatcttcccttctgttcttctaccagagcaatgtcaagtaagtatcgtattttccattttcacaatgtaatttactagtgccatggattcgatatggcactgcacctgttttggcatttgcatttggtcagaactttgcaatactattgcttctactgtccactaccacacttggaaagttattttttttctttgcagttaagttcttacgatttagagtttagtcatctatggctattgtagttgacatattaaatcctgctgttttgtagtgttccaagggaggaaacactatctgtggggagtgttcaggcgcaggttaggtaggagcaaagcagctacccaagtgaaacaaaaagtctcaacggtctctaaatcacacacgtcggagaaaaaggatcatcaagacaagatgcaaagcgatgcccagaaccaagaaatgcatgtttcaaagggtaccatgccatcagggagccagccgacatcagatgctgtccatgacgttggcaccgagcctgatctcggtgattcattaaaaagtccccc

SEQ ID NO: 34207 - DNA, 568 bp, Setaria italica
  Peptide Sequence Number=SeqID_100181
atatttttctctctgcggtggctaatattttcacgttttatgctgatagtgggatcatgaagattggccaggagtatattccattggctgcacacctgtcaaatcaagcatccaagaaggtgcaggaattatcactttcattaccaccagttatgaaagtaaccaagcattcggagttgaaagcctggcaaagtagatgggaggcattggaacttactgctgaaaacatcagcttgtatttcttttcggataatatgaggtgtgtgacctacccctatgaatacttgtttgtattgtattttcagctacatgcgttcttgttgcatttgtaggccaaataaagagctagatcgactagtgcagtatgtcactgattatagcatagttctcaaatatgttgttggactttccaagctgctaatcttcccttctgttcttctaccagagcaatgtcaaagtatgttccaagggaggaaacactatctgtggggagtgttcaggcgcaggttaggtaggagcaaagcagctacccaagtgaaacaaaaagtctcaacggtctctaaatcac

SEQ ID NO: 34208 - DNA, 1734 bp, Setaria italica
  Peptide Sequence Number=SeqID_100182
aattatcacaaatggaagatgttaacagtgagtcattgccttccaataatgttagcccatgcaaggcaacacaaagtagctttaaaaagcaaccaaacagagacactcaacatcatactaaacatcagaaaatcaagctcattgtgaaagataggaacgctgatcatgcgcagctgaaaaattgtaggccatcaaagcagcttgatcatacttgcctaagtgcttccttggagttgtcttcagaggctaaggaattaaatgatgcagtgccaagatgttctagttctgctcaaacttttgagaatgccgtgcccatgaaaagaaaacgacttattgtaccacatagtgaagatgccgaggccatgcatgtggaaaatttgaaccctccatccagtgagaatgaggggcaagtaaggatgcataagagacatgtagaaagtgctgtgatgaaccagagaagatctgcaaaaaaccatgaggaagtgaattcaaatgaacaacacgtcaataatcatacgcagacaaagaagcagagaagggccactaaagacaaaaaagcacctgtagggaatcctagtgttcggtgcgcactgaatgatgctgagcagttggcatcagaagctgcagggaccctcggccactgcagcctatccaggatgccagttgtttcggcacctactgatcaacaaagctttatttgtccgcaacctattgatagacctaaatggactgggatcatgaagattggccaggagtatattccattggctgcacacctgtcaaatcaagcatccaagaaggtgcaggaattatcactttcattaccaccagttatgaaagtaaccaagcattcggagttgaaagcctggcaaagtagatgggaggcattggaacttactgctgaaaacatcagcttgtatttcttttcggataatatgaggccaaataaagagctagatcgactagtgcagtatgtcactgattatagcatagttctcaaatatgttgttggactttccaagctgctaatcttcccttctgttcttctaccagagcaatgtcaaatgttccaagggaggaaacactatctgtggggagtgttcaggcgcaggttaggtaggagcaaagcagctacccaagtgaaacaaaaagtctcaacggtctctaaatcacacacgtcggagaaaaaggatcatcaagacaagatgcaaagcgatgcccagaaccaagaaatgcatgtttcaaagggtaccatgccatcagggagccagccgacatcagatgctgtccatgacgttggcaccgagcctgatctcggtgatcataaaaagccccaagcaaattcagaagctcccccaaccaagctgcttggccttgtcgtctgcgcaacgccaagatcagagcagtttatcaaggagctggaaaacgaaggcgcactggtgtttgctgtgaagggcatagtgaagcccgcccctgaaaggctctaggcctccagtgctgtaggatcagaactaacctgcgacaatggtgctccatctgctgaagcgtagctgtagctgtaaccttttgtgatgtctagggccgaattagatggtcgttatccatttaggagtgtaggctgtaccgaactgaagctgaactggagcccatttcaatttgtcgcgtttgcaagactcaaaatggtaatgagcaaagtctagctaagaaagatgttcccttgtgccgtgaaaaaaa

SEQ ID NO: 34209 - DNA, 385 bp, Setaria italica
  Peptide Sequence Number=SeqID_100183
atcttgaatgaggaatgtatctcctgccatcctttcaaccacttgcccggtggtcatctccatgtcaaagaatgcaatatcctgtctcagaatcgccttgaggtacaaggctctgattcgtgctgcttgtctttctccacttattgtccaacaagatacctgaagtgttgaagcaagccctgctgcgatgccaagatagacaaagttcatgatcaccagatttcatcaatagacggatcaaatcatcctgccgcacatggaagcggccgaggcatattcgcaggctcctcaattgaccttacgactagacttaatagggactagaaatactttaagaagactaggaaaccggaaaaacttaataccaatacctaccggaaaggta

SEQ ID NO: 34210 - DNA, 332 bp, Setaria italica
  Peptide Sequence Number=SeqID_100184
ggcacaggaaaattgccacactgaaggcatacagaccaccaatactcgcaattatactaactgggcctaagacgctttcattgctgatctccacgatatagtcagaaagataacttatgtagagtgtagtatttatcactccatcactaggattctgcagggaagcatttaagctgcccacatctgaaaaggtagaaccttgagtgaagtcctgaagaagtggctgcaagagcttcaagccatgatggttgttgtatatttgaggaaacaattgaatcttgagcacattggagtctcgtcctctgaaagtcttcagcttgtcatcaacaaaa

SEQ ID NO: 34211 - DNA, 273 bp, Setaria italica
  Peptide Sequence Number=SeqID_100185
gagaggagtagtggcggcgaggcagagcaggggaaggagacggaatcagcatagcgtttcttgcccctttcgtgctttccgcttttcccctggatatatcccattttgtctggttctctccaaattgtttttttgtattattaggattttaaggtaggtggtcaggatcgactgtaccaggtaaaatggatccaaattctagtatctgcataattttattttgaaatgaattgtggacatccagtgataggccttggtgtttccctagctcta

SEQ ID NO: 34212 - DNA, 437 bp, Setaria italica
  Peptide Sequence Number=SeqID_100186
gccagaaatgaacagaaataagaacaaacgtaaagttcaaagcctaaagagctcaaaactgcacacaaccttgtcaaaaagaatatgaggggagtgtttgtgtccttatgagattatgctaaaatgcatatactcctacagaaacgaagcatgaatcatattaacatttgaatagactttgatctgcctccggcagcataccttctgattagcagctcagaagcacgctgactctaataatttgacaattgtttgctaaaactaaactgaactatcaatccaccaattcagcaaaatctgcccaataatttgctagcgaagcgagtaatcatgactctggcaagagggtgctggtgatctacaacacatgcttgtctacggagtcttacagaaaagaatacgatgccagttgatgatagaagaacgaacaaagcgaa

SEQ ID NO: 34213 - DNA, 476 bp, Setaria italica
  Peptide Sequence Number=SeqID_100187
tttttttttttgttccttatttcttagttattattctttttctagtcttggttgttaattaattaacttttttctacttatttcggggacaaggatcatacaaccttctttctaatgaaggaatagcggaggctttttcgccttcccttttttaacttgtcatcaccaaactgtctattgacaaaaggattaatgtgcatgggcaaaagaaaaaaaccaaaaaggatatctgcagcagcacacaccattcctcgcagcaacacccacggctggacaaactctgacctgacagcagggcaacacatcgcgcagctgctgcatcgctctagggctgctttatcgtcagctcagctctcagatgcagcatcccgtcgatgaagaagaggctgtcatcagccatgaacgtctgtcctattgggtattagtcgtaagtagttattttccttttgtttaccgtttaaccgttttacttttta

SEQ ID NO: 34214 - DNA, 747 bp, Setaria italica
  Peptide Sequence Number=SeqID_100188
aatagcatgaaacaacctcaaatttgtcagccgccatcaggatatccagcagaagattgggctcagtagtcgtcagctttccactatacataaagctcaaaagctccatgagggcagtttcctctgaatcagtaattcttagggttgcatgtctctgatcagattctttcatgccgtttgagaaaagcttgaaaaagaaaggactctttgcagcaagaatcgctgagctgatataaatcgtctttactcgtaaaactggcgtacccaccacggtccaagacgaatcaatacctggtccatcatcaccatcttgaccaacatcaggtggagattcttctatcattgctacaggttcctcttgattttcttcatatgcatcacactcttccgcttcgacttcattgcaatttgtctggtctgacatgtgagttgtagattctttctccttaaggagctcctcgcggcggcgcttgcggtggcgcgcccaatcggcgagtcctcctcctccggcacccccgccgctggagcccggcgcgtcgtcgtcccccgcgacgacctcgatccgcagctcccggtctgagaagttgacctcgttgaaggcgaactcgaagctgggccccccgccaccgggcgagaagtccgggtccatcccgcgcaccctcctcctccgccgacgggaaggtggggggaggcggtggccgtaaccctagccggcgggagggctcggagggggggagacgagatgag

SEQ ID NO: 34215 - DNA, 261 bp, Setaria italica
  Peptide Sequence Number=SeqID_100189
ggtttctgtttctggaatcggctcaatacaatatctgaatcttggaggtattctggccgaccgtatgtaacataagcaaatttccactgatgaaagagatgtagcatcatatatattatccaatataagagaaaacccaagtaaaaaaaagaaatgaaacatcaatgttacactacaccacagcaaatattaattgagccaaaccaagatgcccgttcaaattaaatttagatgagacgattaaaatcagaaagtgaacca

SEQ ID NO: 34216 - DNA, 2976 bp, Setaria italica
  Peptide Sequence Number=SeqID_100190
tttgccaaatgaatcggcttcgacattcaaacgacagccagccacaactgtaaacttgaatcaattctaccgctaggtaccaccaaacggataaaaaaggtcacagccttaagaaacgataaaaacaacagaacactgaatcaattgtatttagacctgtaacaggttctccgaggctaatgttaacaacttcccacagaacagtgctggggaacgcaaaagaacacggtggtcggaccccgatttacagcttccagaaactttctacaaggaaaggttgctatagaaccctgtacatccaccaaatgaaaattctttagataaactgccacggatctactctatgcaaagccttccaccctgtacatgaccaaaaacataatgagattgcttttggaacaagacagcgccctcatatccagttctcaattcctcgcacaacaacatattgccacttttagttgtaaatcttcactggcttctcaaaagaatgacggttctgactggctaagaaggacctttttggggtagtagctgtatgctccaatccaagaatatgttcccacgccccataaataggtttctgtttctggaatcggctcaatacaatatctgaatcttggaggtattctggccgaccgtatgtaacataagcaaatttccactttagaaactgctcatcaggaacttgaagtctcttctgaatccgtactttgatatccgacaaagcctcaccatcacgaattaaaaagaagaaaggttctccaaaatattgaatatgatgaatatctttgaagaagtgatagacatgaaccaaacggtcattaggcccagcatttttctcttcctcaggaacctcttcaatacgaaggggtccagattggtcactaactgaatctatcttatctcctggttgataaaccttgcatatcttgtgaaggtggacattgaaaaaccgaaattcagcatcattacaagaaagttcaacctttgactttaagtcttcgatcaaatcaaaaagagcattactttttggtgacctcataatgtgaaatgacgcctcacagtttttcgcattttgaaaagcaactttcagtgttttcagaccttccagctcaggcaacggaatgtccagtgtctcataatataatatgtcacacatctgattgtgatgctgtagcatgtccgaaagataatcaagacctctgtatttgatgtagtaaggtttgggttggtgagaaagtggatggtgttgagtaagccgaattttagaaggttcatccagaccaagttgatgagcaaccttctcaacaacatcatcatatgtggaacgctttgaaagctccagagagaagtagtcttcttttggcttctccagcaatctgaagcgaacaatctgtttattatgaatatattcgaagaaagaagatacagtaggatagcgatattgatccattttatctggcaaacagcgtttttggttagcatattatatcaccattctcaatctggcttgaatggaaagatacattactctcaattggttcgcacatcacacttggatcatacattatttcctcatagagatcaatatcttcatcagacggaaatccggcgatctgattcagcctttctactatatcaaatggtttccccgatgctttcacaaaaaattttccaacatatcttaggtcttccttttcaggatcgtagagcttgaagaaaagtaatatatcttctttggtcttcacaggaggagcaatcggttgattttcctggccaaaatgaacctccaagaatagccttacttcagaagtctgaaattttgttacagttgcatctttaagcagcccaatagcagttttttcctcctgaagggtcaacggccgactgggcctgtaggtactgttcttccgcttagcccacacccaaaatcgttgggattccaccgggatgccaaattcttttgaaagctccatcttgacctcgttgattgacatgttcttaggtgcacggaagctatgaactttgtcaaagtccacgagatcaaagtgcacatgtcttccaatttgctctttcaaatcagaatcccaggccaccttcaacgcagtgaacatgtgagcctcagctttctcccttttcttgtattccttttcttcctgttcctttcttaacctaaccttaaggtgttctgatatgtcttcctcgtccaaatcacagataattttctctttgtcactttctcgaatgtaaacaagcatgtaggcatttgaatgcttagtaaatctgaggggggttgtattcagcccagggttggtatgggggagctcttcttcaccaccatattgctcctctaaagcccgcttcgtgtcttcttttgttacccgttcatcatcaaacttgtaccattggtcagacaacgtcgggcgaatgaaggcatagtagtgtcctccatgaactccaccactatgaactagtacactgtgaagagtatataggttacgcacacttctatccgcttctggagaaagatattttccatcatctctatcaagatccaattgaagtgggaactcatagcggtcgtttatcttgaccattgtatcccgcacaaaatcgtattcgaaccgttttaactgaagttgcaagactggagggaagtcaacaaaaagcattcctttcttggcatcctgcagaccatgttcctcagattgatacttattatcgccttctaacctctccactgcaacatacttatcaaatgatgcgtagacatcagaacaccccttgacatcaagtgcaagatcatagaatgactctttcctggtagatttgtggtcaacattaatgcactcgatataattcatatggtgaccctcaaataacttttgtattgctccttccacagtggtccccttcatcttgttctccagcttttcacagagaaccctattcaattcttgaacatcatgctgc

SEQ ID NO: 34217 - DNA, 369 bp, Setaria italica
  Peptide Sequence Number=SeqID_100191
gaatacttggcgtcgtctcggtctctcgcggctctcctctcctcttctctcctgctaccgtccagccgcacgagggcgctgctagttctcgtcaccaacgacgccaccgccgatttcagagcaattcggatcaggttaaacaactgaccaatccgccgcgctcttcggttccaacgacaagagcggcggcggcgggaactataggggagcgaggagtagagggcaaagtggaaagggggagccatgggtaacgcgtcgtcgatgctgacccagtacgacatcgaggaggtgcaggagcactgcaactacctgttctcgcagcaggagatcgtgtccctgtacgagcgcttctgccagctcgaccgcagc

SEQ ID NO: 34218 - DNA, 1196 bp, Setaria italica
  Peptide Sequence Number=SeqID_100192
cgttcccgggcccggggctcgggctgccggaggggttggagaacatggacatgctggtggagagagagcactacatggccttcttccgggccgtctggaggatggacgcgccgctggaggagtacctgcggtcgctgccccgccgcccggactgcctcgtcgccgactcgtgcaacccgtggacggccggggtgtgcgcccgccacggcatcccgcgcctggttctgcactgcccgtccgcctacttcctcctcgccacgcacaacctgtccaagcacggcgtgtacgaccgcgtcgccggggagctggaggcgttcgaggtgccgggcttcccggtgcgcgccgtcgggagcaaggccacgttccggggcttcttccagtggcccggcgtggagggcttccagcgggacgtggacgaggccgaggccaccgccgacggccttatcctcaacacgttccgcgacatcgagggcaccttcgtcgacgcctacgcggcggtgctcggccggaggacgtgggccgtggggcccacgtgcgcctccggcttgttggacgcggacgccaaggccggccggggaaaccgcgcggacgcggacgccggcggcatcgtcccgtggctcgacgcccggccgccgtcgtccgtactgtacgtcagcttcggcagtctcgcgcgcctgccggcgaagcagctcatcgagctcggccgcggcctcgaggcgtcggggcggccgttcgtctgggccatcaaggaggccaagtccgacgccggcgtgcaggcgtggctcgccgaggggttcgaggagcgcgtcgaggacaggggcctcctcgtccggggctgggcgccgcagttgaccatcctctcgcacccggcggtgggcgggttcctgacgcactgcgggtggaacgcgacgctggaggccatcgcccacggcgtgccagcgctgacgtggcccaacttcgccgaccagttctccagcgagcagctgctcgtggacgtcctccgcgtcggcgtcaggtccggcgtcaaggtgcccgcttacctaccggaggaggccgtgggggtgcaggtaacgagagccggcgtggagaaagctgtggccgagctgatggacgaaggccccgagggggccgcgagggagggccaggggccaaggagatcggccgcgaaggcgaaggctgccgtgcaagaaggcggg

SEQ ID NO: 34219 - DNA, 1178 bp, Setaria italica
  Peptide Sequence Number=SeqID_100193
gagtaggcagcattgtcgttggaagccaaggtgaagacagagaaacctgttatcactatagctgcatcgtagagcagcaaagattgcttgagatcagcatattgtctcaaaccatcctctttcaattccttaacaattgaagcagtgctctctgaggataactgtccttcttgaagatcagataagctaactcctgataggtccatgacagccacaggcctggcttcagctactgatgctccgtcctctccaagaggcacattgattttctcgaaggtgtactgcaaaccgttaaacttgagttcaggtgttccattgacatctttagatcgaccaaccggtccatgtattactttcaagctcaaaccatctaatctccatgaacctgaccagattccagcccgatccagacttctttgatcctttgcaatttagaccccttgaaagtgacaacatcaactgaaccactttggaagggcatcgattgctctgccttcattcctggtgttggttgacctaaataaattgccggtactctttgtaacaaggagtcaccatcaacatctattaagcagattaagattgcagaatttttatccagcaaagaggaactaaactctctacttgtgctaagctctagcacatagaatgcatcagagtcatctaatctgattgtgctaaatatctcctcaggaacagtattgggatatgtctttagttcctctgtaggaagaagacgtgaaggctttagagagggcatggaatcttgtaagaaagaccctttggagaaacaagtcacccactgatgtctgtttctccttttgagcctcattcgatcccgaaaggcatggcaatacattctcgggctgctattcagcagtagccatctgggcagaaaatttgaatgaactgatggagcagaacagaggattgccattttctgtagtaacaacagcaaacagaacctattatatgtgctacctgcaagacatatggttaaccattagagacaaagaaaacagagggagcataaacctgatctagtccttgccatcataacacaaaaagaaaagaaaaaacaatgctatgtaagatttaaagctgattcacgattcacggccaaatttacaggaacttaagtacggaactatgcattgaaaaagaaataaaggcattat

SEQ ID NO: 34220 - DNA, 492 bp, Setaria italica
  Peptide Sequence Number=SeqID_100194
ccttaaagtatgtttggacttgtgtataagatgaaggggcttgcaggaaagttttgaactaacttagtccatccctaaatcttaacggaatatttaaaactgtgcgcttttttatataaaagataggcaatattcagaatgagggcacttagcaatttgccctacagattaagtaccctttcttgaagtatgtcattggcagcctgcaatataccttcctgcaaaatataggcacaaagaaccatcagtgaagggaacaatagccatgttagtctcttctttgtatgtaaactttggctcgacgtgtgaacagagtgacagatgctgaaccaaccttgttcctgagcatttcaatctccctagacatgatctgcatctgtttgacatataagagccgtaaatcaaaacttgcaggtaccatctcttttttaaaagatttccacctgtatcaagaagagcatgaaccttaccttctgggagcgaatgttatgc

SEQ ID NO: 34221 - DNA, 470 bp, Setaria italica
  Peptide Sequence Number=SeqID_100195
tataggaaaaagaacatgagtttgtcttggtccatgttttgatgagaggagtgctgaaggggctcaagttgagaagctatgactacctcttacgttgtctctagatgatatggatgctccattggagatgccttatgtcacctggccaccttggaacattcaggcattcctcaggaaatccataatggctctgttgccatcaacgttttctcaagtatatgtgtatattagttacacatggccttacgccttctgattgatgttaactgttgtgcattaatggagtaatgtcttatgccttcgataattgatgcaaattgctgtccacaaggctgcccatgggaaaatggtggatactgtggagaaaagcttgttgacatgcagaaaggcggctattgtcaaaatcaaggatcacagttgaagaaagtatttgctgcaaagcttttagccatgacatttgcctctccatt

SEQ ID NO: 34222 - DNA, 277 bp, Setaria italica
  Peptide Sequence Number=SeqID_100196
cacgatcagctagcgacccagctttggcaaagaccatggccagcgccctcgccttcgttattgtcctcgccgccagcacctgcgcctcgacggcgacgacgctgaccatccacaacctctgcccgcacccggtgtggccgctggtgaccccgaactcgggcctcccctccatctccgacaacacggcgcgcctggacaccaacgcgctcctctccctctccttcccggccaccttctgggccggccgcgtcgccgcgcgcacgggctgcgacgcagg

SEQ ID NO: 34223 - DNA, 977 bp, Setaria italica
  Peptide Sequence Number=SeqID_100197
aaaacgaccaggtccaacttccttaaattcaatttacacctgaagtgaaccaatagactacataaaacattacatatttgtgatcaatagaaactaagatataaactacaacgaattgatgccactagttctctatcttgatatatataaagtctcctagctcacttggcgctactccccggccgcactctgttaccagctttcagtgcctcttcattccaatcacatcgaagggtgatcaatgccagaattaaagtctgcatcattgtgccgccgatcattccagcccatattccaggaacaccgtagttgaaaccccatcctagcagaacaccaagaggaacaccgatcaagtagtaacttccgatgttcacataagcaacaagtccttgccagcctgaaccaatagcaactccagagagcacaggttggataccgttgaggagaatagtgagcgcgagcagaatggatatgccatcgaccgcatcgatcacggcctgacttgatgagaagatcatcgcgagcttgtcgtggaaaatcagcgcgagcaaactagcaaagagactgatcagaaaggatgttgtcgtcgacacgattgtcgcaaactttgcaccttgtccattggccgcgccaagctcattagctaccctcaccccagtgcccgctaaaaatcccatatgaatcatcatctcccatccagtcaaactcatacagatagatagtgcatccacagatagctcggcgttcctcaagaaacccgtgaggaaaagcaatatccggtagtaccaattctccaagcacaccatgacacccgacgacgcagacaacgtgacaaactccttcaagtccacgaacgccgacgtcgagaacccgctccacgtctccgggcacccgccgccgagagcgtacgcgaccagcagcgccgcgaagaccacccatgacaggtttgagcgttgtattggccgaaggttccgtta

SEQ ID NO: 34224 - DNA, 738 bp, Setaria italica
  Peptide Sequence Number=SeqID_100198
gcggtccttgttgccgccgtgctgggccgccgccgcgggtccgggccccggtcgccgctggtggaagagaaagccgcggcggaggctgcctgtgcgaccggtgacggcgcaggcgccgccggcgacggcgggtcggacgtcatcatcgtcggagccggggtagctggatctgcgctggcatacacgctcggaaaggatggccgtcgggtgcatgttattgagagagatctgacagaacctgacagaattgtgggtgaattgttgcaacctgggggttacttgaaattaatcgagttaggcctcgaagattgtgtggaagaaattgatgcccagcgtgtccttggttatgctttattcaaagatgggaggaacacaaagcttgcttatcccttggagaagttccattctgatgttgctggtagaagctttcacaatggaaggtttatacagaggatgcgtcagaaagctgcatctttgcccaatgtccaattagagcaaggaactgttacatcccttcttgaagaaaatggtacagttaagggtgttcaatacaaaaccaagtcaggtcaagaactaaaggcttatgcacccttgacaattgtatgtgatggctgcttttcaaatctacggcgtgccctctgctctccaaaggttgatgttccgtcttgctttgttgggttggtcttggagaattgccagcttccccacccaaatcatgggcatgttatcttggccaat

SEQ ID NO: 34225 - DNA, 582 bp, Setaria italica
  misc_feature (1)..(21): n is a, c, g, or t
  Peptide Sequence Number=SeqID_100199
nnnnnnnnnnnnnnnnnnnnnactttaaactaagtacacattgtattccatttagttttacggtgcaaaaagtgactgaacaaagtatggtggatggtgaatgtgtggcatgcactgccaaattgactgcttagtcgacctaaatgggtgtggtgaagtcgtccatggatctattctgtcatccgaagtgttcttttgctcctcgattacgatctgataaccaatcagaaaggcagaacatgctctggagggttgcaaaaatctggtctgaatgcggtgagaccccttgttcaggccttctattttggttgtccatcaacttcttgaaagtacttgcgcatttgcgacacatcatattctcgaaggagcttttgtggaccacgcaaaaactttcttcgcccttgtggctgccatcctgacctctccagatattcttcaatcaacatgctacagattgccttttgggaagcggccacttcacgatctggaaaggagtcctccactttgaagcttaccgacacatacaactctaggaccttgtgaactgattcaagctccttcagttgattgtgtgttttagga

SEQ ID NO: 34226 - DNA, 285 bp, Setaria italica
  Peptide Sequence Number=SeqID_100200
gacgaatgtccccagcaacctcctcgacgtgcgcctcgtcgcgctcgacatgggcgccctcgtcgccggcgccaagtaccgcggcgaattcgaggagcggctcaaggccgtgctcaaggaggtggaggaggccgaggggaaggtgatcctgttcatcgacgagatacacctcgtgctcggcgccgggaggacggagggttccatggacgcggctaacctgttcaagccaatgctcgcgagggggcagctcaggtgcattggcgcgacgacactcgaggagtaccg

SEQ ID NO: 34227 - DNA, 461 bp, Setaria italica
  Peptide Sequence Number=SeqID_100201
ctcaatagacagtagcctgttatcaaaaaagaaagacagtagctgaatgtctggcttgcaagttctctctgttgtattgccccagaaccagataactctgattctttggccacttgttgaacagtacaaatccgagaataaagtgatggaacaataaagcagtgaaagtttacagccttcgaaggcaggaagtcggcgtcgcccgttgtgcacttttgtcatggcgccagttcagtacagtacatcagaacaggtagcgatgagccgatgacgacggcgaaggccgcccgccgccgagtgagatattatccggccgaacgagacgtgacaccgaacagacaacagagccccccgcgaccccggccagcctgaagtgaagccctgctgaaagggacccggcacagcgcaggtcttatccaacccgagcgacgcgaagctggactcctccatgtctccctccc

SEQ ID NO: 34228 - DNA, 544 bp, Setaria italica
  Peptide Sequence Number=SeqID_100202
cgaagccggcgtctccacctcgccggagtccgccaccgatggatcccgcggcgccggggaggttcgacatcctccaaacgtcgttcaaggccgcttccaagtgcctcctcacagcatgctcccgcgaggctgtcaagagggctttcccgtcgttcacggatatctgtggggagcgtctgtaccatatgctcacccaggtgatgaaggctatgcatgccaccatagaggaggagtttgacgaagtctgccaagaaagacaggttgctgctgcccttgacaagatagatgatttcgatgaagagcaaaatctggatgtattaccttcagagaagactagcattgaagaaatcgaagaaaagatatcaagggcaaagaaagatgaaattgaacatttggctgctttactgaaaaaggttgaagaaagtaacaatgcaatgaaagctcgacttgaacttctgaagaaaggagaggattcaactgcatcaagggatgttctcaataagctgacacaattgaattctacatacgcgtagtgaacaatgat

SEQ ID NO: 34229 - DNA, 712 bp, Setaria italica
  Peptide Sequence Number=SeqID_100203
ctagctcgctcgaagatgcggaccgcggagcagctcgccgagcacccccgccgagcccgacacaaccgccgcgcactcgccccgcttgccgtggtcgtctcgtcctctcgtctccagcagtctccgcctaccaatcccccaagaacgtgtgctatcagagtctgaatctgctacgggaaggaagggtgcgcaaaaggaaagcatttgcggactatgctgatttctgcttcaagacatttgtgacagagtcaagaactggatgacatttaacgagccaagggtcgtcgctgccctaggatatgatatgatgatggtagattcgcacctggaatgtgcgcaaagtgcaaggagggaaactccgctaccgagccttacattgttgctcatcacctgattctttcacatgctgctgctgtacagagataccggcacaagtaccagataagtaccagataaagagttctaagcagtctgacctagtacctaactaagttatacaggttaaacaaaataatacgtatgtcaatataaaggaattgtaaaagtcaacagcacaaggtttctaaactgttcatggtgatctgtactcttttttatggttgatttgatgattactgagtggtaaatattatagagacataaaagagtagtattcagaactgtttctagattttctgttcacacaaagttgcctttcagcctacacaaaagg

SEQ ID NO: 34230 - DNA, 244 bp, Setaria italica
  Peptide Sequence Number=SeqID_100204
agcaacagcacctccactgatcattgcaccaccaccaacagcacccacgataacctggaagacggcggagctgggggtgaccatggagaaggaggactggacgccggacgcggagtgctgcttggccgtccactcgccgccggagttgcggcacacgaaggtgtacacgcccatgcctgcgggtcgctggtcgtctgcgcgcgcggcggcggagggtgggaggggaggcggaggctttgcgaat

SEQ ID NO: 34231 - DNA, 253 bp, Setaria italica
  Peptide Sequence Number=SeqID_100205
cgcttgtaacaatttaagaacacagtttttcaggttcacaagccactggctcgtgccagacaggacagcagaattaactaccacaataggaaaccaccaccaacaaatcagctatcttaagcatcaacatggggctctttaagtggccaggcgtgagcagaataaacaaaagacctgaagcctatttcgattatcgagaggaatcatagctggaggcttctgcttccatctcagtattctagagtttgtttta

SEQ ID NO: 34232 - DNA, 373 bp, Setaria italica
  Peptide Sequence Number=SeqID_100206
ctcgactgcggtggtggctatgtgaaattgcttggtggtgatgtcgaccagaagaagtttggtggtgacactccatacagcatcatgtttgggccggatatctgtgggtatgccaccaagaaggtccatgctatccttactaggaacggcaagaaccatttgatcaagaaggaggtgccatgtgagaccgatcagctgacacatgtttatactctgatcatccgtcctgatgccacatacagcattctcattgataacgctgagaagcaatccggcagcatctatgatgattgggatattcttcctcccaagcagatcaaagatccggaatgtattctttgtcatcccagtcttctggcttcttggcttcagg

SEQ ID NO: 34233 - DNA, 1002 bp, Setaria italica
  Peptide Sequence Number=SeqID_100207
cattaatgtttggaaccaagataatactagtagggtaacaagcaccaagaaggttcacactatcctgacaaaggatggcaagaaccacctgatcaagaaggatgtgccttgtgagactgatcagttgactcatgtgtacactttgatcatccgtcctgatgcgacatacagcattctcattgacaacgaagagaagcaaactggcagcgtctacgagcactgggatattcttcctccaaagcaaatcaaggacccagaggctaagaagcccgaagactgggatgacaaggagtacattcctgaccctgaggacaagaagccagagggctatgatgacattcccaaggaaattcctgaccctgatgctaagaagcctgaggactgggatgatgaggaagatggtgaatggaccgcccctaccattcccaacccagaatacaagggaccatggaagcaaaagaaaatcaagaaccccaactaccagggcaaatggaaggcacctatgattgacaacccagatttcaaggatgatccctacatttatgcttttgacagcctcaagtacattggcattgagctgtggcaggttaaatcaggtactttgtttgacaacatcatcatcaccgatgaccctgcattggccaagacatttgcggaggagacctggggcaagcataaggaggctgagaaggctgctttgatgaggctgagaaaaagaggaagaggaggaagctgccaagggtggtgatgatgaggacgatgacctagaggatgaggaagatgaatgagaaggcagacgaggacaaggctgactccgatactgaggacggcaaggattctgatgatgagaagcacgacgagctctagatggagaggatgaagaggtggaccgaccgaaccttaggaagccgttggccaagattatcagttctcccattatgaagttcccatttttcgtgatcagaaactttgaacgcgtgtgtagaaacgattcgctaagaa

SEQ ID NO: 34234 - DNA, 1687 bp, Setaria italica
  Peptide Sequence Number=SeqID_100208
tcgggacaggagaatcggcgggaggttctagaagtttccagttatagtggtgggcgttcgctcgccgtcgacggtgatggccgtccttgagaggtcgtcgtccaccgccgcggttgccgtcgcggccctgatcgcgctcgcgtccgtggccgccgtcgccggcgaggtcttcttccaggagaagttcgacgatgggtgggaggatcggtgggtcaagtccgactggaaaaaggatgacagcacggctggcgagtggaaccacacgtctggtaaatggaatggagacgccgacgacaaaggtatccagacctctgaagactacaggttctacgccatttcagcgcagtaccccgagttcagcaacaaggacaagaccctggtgctgcagttctcggtgaagcacgagcagaagctcgactgcggtggtggctatgtgaaattgcttggtggtgatgtcgaccagaagaagtttggtggtgacactccatacagcatcatgtttgggccggatatctgtgggtatgccaccaagaaggtccatgctatccttactaggaacggcaagaaccatttgatcaagaaggaggtgccatgtgagaccgatcagctgacacatgtttatactctgatcatccgtcctgatgccacatacagcattctcattgataacgctgagaagcaatccggcagcatctatgatgattgggatattcttcctcccaagcagatcaaagatcctgaagccaagaagccagaagactgggatgacaaagaatacattccggatcctgaggacaagaagccagagggttatgatgatattcccaaggaaattcctgaccctgatgcaaagaagccagaggactgggatgatgaggaagatggtgaatggacagcctcaaccattcctaaccctgagtacaaaggaccatggaagcaaaagaaaattaagaaccctgactacaagggcaagtggaaggctcctttgattgacaacccagattacaaggatgatccttacatctacgcttttgacagtttgaagcacattggcattgagctgtggcaggttaaatcaggaactttgttcgacaacattctgatcactgatgaccctgagtacgcgaagaagtttgcggaggagacctggggcaagcacaaagatgctgagaaggctgcctttgacgaggttgagaaaaagaggcttgaggaggaatctgcaagcactaaggacgaagacgatgcggatgaggatgaggatgaagcggacgatgacaaggctgacaccgccgctgaggaggccaaggactctgctgatgcgaaaccagaggacggcaaggtcgctgctgatgagaagcggacggaggacagcaaggatgcttctgctgaggagaagaaacatgacgagctctagagtgtgcggatgaagagcagaagaggcgaacacaggctctcaaattccctgttccggtctcagctggagtttttactgccttactggtagtggtagggttaccatccgaatagaagaaagccatgcgtctcgacatggcgaggtagtccgtccctgtacaatgctagagaacgaaagaaacaaattcggcaatggccattttggtgtcttttccctccatgtgaggagtaggcagacatcgagcaacaaagttttcgtcagtatcggatatac

SEQ ID NO: 34235 - DNA, 804 bp, Setaria italica
  Peptide Sequence Number=SeqID_100209
ttttttttttgtttattgagacgagcacaattatatatatatataatgcaacaaactaacccacaactagccgtgaaacttcaatagcatgcagccatataattcagctagatgcactcaaatttcggagcgacacaactcacacaacaggcatggcaaaggaaaagagcacagcagaacatttgattctaaacaacatagccaaatcctcacatgaaccgggaacacaggggggtcgcttgtaacaatttaagaacacagtttttcaggttcacaagccactggctcgtgccagacaggacagcagaattaactaccacaataggaaaccaccacttataaaagctggatagcattctagtcgaacagggagaaacccatgtcgtcatcgctctcttccttctcctcttccttcttctcctccttgggggcatcggccgcaccaccaccagaggaagcggcaccaccagcaacagcacctccactgatcattgcaccaccaccaacagcacccacgataacctggaagacggcggagctgggggtgaccatggagaaggaggactggacgccggacgcggagtcggcggcggaggcggcggcgacgagctggcgctggagctcgtatggggtggcggcggaggcctcgatctcgccggagtgctgcttggccgtccactcgccgccggagttgcggcacacgaaggtgtacacgcccatgcctgcgggtcgctggtcgtctgcgcgcgcggcggcggagggtgggaggggaggcggaggctttgcgaatcgggctgagacacg

SEQ ID NO: 34236 - DNA, 1717 bp, Setaria italica
  Peptide Sequence Number=SeqID_100210
gaacacgagcggggtggtctcagaagtcagatcggatcgaaagcttctgcgagttcccgtctcgggcgtcgccggggatggcgatccgcaggggatcttcgtgcgccgtcgcggcactgctcgcgctcgcctccgtcgccgccgtcgccggcgaggtcttcttccaggagaagttcgaagatggctgggaaagtcggtgggtgaaatccgaatggaagaaggatgagaacatggctggtgaatggaaccacacatctgggaaatggaatggagatgctgaggataaaggtatccagacctctgaggactacaggttctatgccatttcggcggagtaccctgagttcagcaacaaggataagaccctggtactgcagttctcagtgaagcacgagcagaagctggactgcggtggtggttacgtcaagttgcttagcggtgatgtcgaccagaagaaatttggtggggacacaccttacagcattatgtttggaccagatatactagtagggtacagcaccaagaaggttcacactatcctgacaaaggatggcaagaaccacctgatcaagaaggatgtgccttgtgagactgatcagttgactcatgtgtacactttgatcatccgtcctgatgcgacatacagcattctcattgacaacgaagagaagcaaactggcagcgtctacgagcactgggatattcttcctccaaagcaaatcaaggacccagaggctaagaagcccgaagactgggatgacaagtagtacattcctgaccctgaggacaagaagccagagggctatgatgacattcccaaggaaattcctgaccctgatgctaagaagcctgaggactgggatgatgaggaagatggtgaatggaccgcccctaccattcccaacccagaatacaagggaccatggaagcaaaagaaaatcaagaaccccaactaccagggcaaatggaaggcacctatgattgacaacccagatttcaaggatgatccctacatttatgcttttgacagcctcaagtacattggcattgagctgtggcaggttaaatcaggtactttgtttgacaacatcatcatcaccgatgaccctgcattggccaagacatttgcggaggagaccgtggggcaagcataaggaggctgagaaggctgcttttgatgaggctgagaaaaagaaggaagaggaggaagctgccaagggtggtgatgatgaggacgatgacctagaggatgaggaagatgatgagaaggcagacgaggacaaggctgactccgatactgaggacggcaaggattctgatgatgagaagcacgtaaggacgagctctagatggagaggatgaagaggtggccgccgaccttggagccgttggccaagatttatcagttctcccattatgaagttcccatttttcgtgatcagaaactttgacgcgtgtgtagaaacattcgctaagaagctgagggacaatttgggccgttgttagtgctttgtagttttcatttttcctcaggaaaaaactgatagtattgaacaaggaagatctttgctcgcaactgttatcttccgttcttacaatcgctacagcacgcgagtgacagaacttatgtttcatgtcgttaagcctgtgaaagaacaggctctggcgcaggcgtgctgccctgctgctgaagtgcggcttgtgcagtgttccagcc

SEQ ID NO: 34237 - DNA, 742 bp, Setaria italica
  Peptide Sequence Number=SeqID_100211
tttttttttttttttttattccatcccacgacgacacgacaagcaatgtatagctacgcaaattagagttgcatacattttttcattcgtacgtactgtacgacatacacacacatagatacatgacgacggatcacgtacgaagccacgtatacggaacccgtggcccccttattcaacacacgcatacatgtatgtacgtacgcaggaaagccaaaatacacacaccgggcgcgcgggcccgcctctcagcctcacactctcacacacgcgcagcatatatatacggagaaattaagaagcgcatactatgtagacaagagatacacgtcggtgctggtgcggatgagctagatcagccgaagaggtggtggtgcttcttctcggccgccggcctcctcggcgtccttgtggtccttcttcttctcgtggtgctcgtggaaggcgaagccgccggagcccacggccgccgccgccgcgacctcctcctcgatcttgtgccggtgcgcgtgctcggggtccgttcttcgcctcgtgcttctcgtaaagagcgaaggcgccggcggcgacggcgcctgcctcgccgaggtgctgcttgtgcttgtgctccttctcctccttcttgtacgtgtcgtactcgtcctctccggtggacaccacctccgtcacggtcgcctccgtgtactcgccgtacccgccggcgggctgctccgccgcctcatcgtccttcttgtggtttgaa

SEQ ID NO: 34238 - DNA, 2696 bp, Setaria italica
  Peptide Sequence Number=SeqID_100212
atccattgccatctctgcgatcaaggcagtggcaattggtggttctggtaatgcttgatgtgctctctattcaccagcttcctgctcttgctccagtcgtctcaaattcaaagcttgtgcaaaagatgctgaatgccgctcaggttagcagagaggagtacgagtcgatggttgatctcttcctcccttttggaagatccattcagacattcatgcagatatagcttaaacgagaagccatgtaaatcggccctctgaaagctgcgcgaaccggctgctgctctgcataggatcagatatatggtgatgcctgaacagacaagagtaaatacaggttgctatctacgagtcgtggttagctattgaacaaactgcaaccgggcaatttcagagaagccgaaatgcctgcgaccgtgacgcctccttgtcccttgcgatattccttgtgcgactgcgtaggctgtgaggacaggcaatctttcctgtcacgctcagcaactgttttgctttagtatgaagggacctgagagcaaaagataactcactttgacaaagatgttccgatcgtaatttcgatcgtgggactttaccatcggataactattcgtttttccttgggaaaaaacaaatatgtatatccatcccacgacgacacgacaagcaatgtatagctacgcaaattagagttgcatacattttttcattcgtacgtactgtacgacatacacacacatagatacatgacgacggatcacgtacgaagccacgtatacggaacccgtggcccccttattcaacacacgcatacatgtatgtacgtacgcaggaaagccaaaatacacacaccgggcgcgcgggcccgcctctcagcctcacactctcacacacgcgcagcatatatatacggagaaattaagaagcgcatactatgtagacaagagatacacgtcggtgctggtgcggatgagctagatcagccgaagaggtggtggtgcttcttctcgccgccggcctcctcggcgtccttgtggtccttcttcttctcgtggtgctcgtggaaggagaagccgccggagcccacggccgccgccgccgcgacctcctcctcgatcttgtgccggtgcgcgtgctcggggtccttcttcgcctcgtgcttctcgtactgcatgcacacaaggaattattttaactcggagccaaagttcattcgccgtcgcggccgatagatcacacagtgaaattaaagattgatcagcacaacgaaggaagcacgaaagatcgaggaggagaaggacgtacaagagcgaaggcgccgtcgccgccggcgcctgcctcgccgagatgctgcttgtgcttgtgctccttctcctccttcttgtacgtgtcgtactcgtcctctccggcggacaccacctccgtcacggtcgcctccgtgtactcgccgtacccgccggcgggctgctccgccgcctcatcgtccttcttgtggttgaagaggtggtggtggtggtgcttctcctccgccatggatgaaacgggacggccttgttgaagcgcgagagtgacaataggatggtggtgcttggttggtagctgatgtgtttggcttacttgtgtgggtacagcaccaagaaggttcacactatcctgacaaaggatggcaagaaccacctgatcaagaaggatgtgccttgtgagactgatcagttgactcatgtgtacactttgatcatccgtcctgatgcgacatacagcattctcattgacaacgaagagaagcaaactggcagcgtctacgagcactgggatattcttcctccaaagcaaatcaaggacccagaggctaagaagcccgaagactgggatgacaaggagtacattcctgaccctgaggacaagaagccagagggctatgatgacattcccaaggaaattcctgaccctgatgctaagaagtcctgaggactgggatgatgaggaagatggtgaatggaccgcccctaccattcccaacccagaatacaagggaccatggaagcaaaagaaaatcaagaaccccaactaccagggcaaatggaaggcacctatgattgacaacccagatttcaaggatgatccctacatttatgcttttgacagcctcaagtacattggcattgagctgtggcaggttaaatcaggtactttgtttgacaacatcatcatcaccgatgaccctgcattggccaagacatttgcggaggagacctggggcaagcataaggaggctgagaaggctgcttttgatgaggctgagaaaaagaaggaagaggaggaagctgccaagggtggtgatgatgaggacgatgacctagaggatgaggaagatgatgagaaggcagacgaggacaaggctgactccgatactgaggacggcaaggattctgatgatgagaagcacgacgagctctagatggagaggatgaagaggtggccgccgaccttggagccgttggccaagatttatcagttctcccattatgaagttcccattttttgcgagcaaagatcttccttgttcaatactatcagtttttttcctgaggaaaaatgaaaactacaaagcactaacaacggcccaaattgtccctcagcttcttagtcgtaattgtttcttactactacgtcgttctaaagttttcttgtattctacgtaa

SEQ ID NO: 34239 - DNA, 743 bp, Setaria italica
  Peptide Sequence Number=SeqID_100213
ttttttttttttttttttttggtctcctgtcaatcgatatgatcatatgagtactctgattagagtacactgcacaagcaatacactaccacatattggtataatcccattacgaacattaatcgaacacctggagagcattgcaaacgggccaagtctcaaattccatccaatggagctaagataaacagggacccgtgaccacgcaccgggtgaggtgggagggaagaagaaggggagatgatgaaagggaggccgccgtcgatcagttgtccccctcgggctcgaactccgggtcgccgtcggggtgcatctccctccactggtcctcgggccagtactccttgacgtggccccacttcttgcggaacttctcgatctggctgtccatcaccaccagcgccgaggtgtcgccgacgtagtaggggtggttcccggaccacacgtccaccgtgtactccggcttggtgccccccgtcaccagcaccagctcgccgttgcagtacaccttcgcgtcctcgtagatctccgggtgcagccccttcttgcgcatcgagcagcgcatcccctgggaggggacgacggagcggagagtgcgggcggtggtcctcgcggcggcaggggtggggaggaaggaggtggagagggagagcgtcatggcggatggccttgcctcgcgcgcagctgcgacggtcgcttcggctgctggctctgttcttcctcttcttatcgcttcgctgatg

SEQ ID NO: 34240 - DNA, 412 bp, Setaria italica
  Peptide Sequence Number=SeqID_100214
cccttttggtttaatttgagcatactccaaactttgtatcattcctatttggttgatcaactttccaaatgatacatcacaattcctaagtgcatttcacttttcctgtctacaagattcgggactggatcttcaaatgtaaaggatgaagaaaagaagaagtccagggctgagaggtttggccttgcctcatcatcttcttctgatgaggaggctaagaagaaggcccgtttagaacgatttggtcagggcacaaatgttgacaaggcagaagaagaaaaaaagaaaggcacgggccgccaggtttgcagaaacatccagtggatcacctcgggaaaatggcaaggacaactccaagccggatgcagccactgtgacaggcacagcgtgatcagagcactctgccttcgat

SEQ ID NO: 34241 - DNA, 920 bp, Setaria italica
  Peptide Sequence Number=SeqID_100215
ggaaaatatctctcgccacacccgcgaccgcgacctcccgactgagcgctctccctctccctcgccgatggcatctcagagctccacgcccgcggacgccgccgcgccttcgccggcggccgcagccaccggagaggcggctgcgagccccgcttcctcaacgccggcacaaaaccctaccgctgctgcgaccgcggctgccggggccacggatctggagaagaagatgcgccgcgcggagcggttcgggacagcggtggtgatgtccgaggaggagaagcgtagcagccgcgccgagagattcgggactggatcttcaaatgtaaaggatgaagaaaagaagaagtccagggctgagaggtttggccttgcctcatcatcttcttctgatgaggaggctaagaagaaggcccgtttagaacgatttggtcagggcacaaatgttgacaaggcagaagaagaaaaaagaaaggcacgggccgccaggtttgcagaaacatccagtggatcacctcgggaaaatggcaaggacaactccaagccggatgcagccactgtgacaggcacagcgtgatcagagcactctgccttcgatgaggtctcagatattatccgtggagacttttggtgaagccatagcttgtacaccactaactgcattggactggggacgtcatgtgtttcccagtcccagccatcttacgagatgttggctttgtatgactcttgcttacggtacttgctaggcagtgtagctaggttgctgcctggtttgtgggatgatcatgtaccttctgtttccctcttcatttggtgacacggtgatttcctttacataagctggtgtagtcagctgttagaagacaaggcagcactggtttatcttgcaacgtccttcagttgctgcgtgaaaaactaaa

SEQ ID NO: 34242 - DNA, 272 bp, Setaria italica
  Peptide Sequence Number=SeqID_100216
ggaaactactatagtgcaagtttgacttccatgatgacagtacgacaactccaaccaacagttgccgacttgaatcagcttattagtaatggagaatatattggttaccaaagtgggtcttttgtgaaagatctcttgaagagccttaatgtggatgagcgtaaaattagaagctaccgaaccgatcagtatgctgaggcactgatgaaagggagttggaacggtggtgttgcagcagtagttgatgagataccgtacctcaagttgtttat

SEQ ID NO: 34243 - DNA, 347 bp, Setaria italica
  Peptide Sequence Number=SeqID_100217
ttgtaagtattagccctatcctcatcctaagctaggcactgaaacaacacttcctctctttccatactatctagaatgagaagctatatagagagaggccattgctatgctgtttatatgtcgaaaattgtgcggtaatagagtgaaattacaaggcaacagtgattcagtacttcagttttagcctgccttgcacagccctcatggcttctacagatatattgtctttgccggtggccagcgacggtttcaagagcatggttttctaaatttcttattcttctactacctcgatctgaaatgttctcctaaactctgcaccctgatctgaagtataaacagttctc

SEQ ID NO: 34244 - DNA, 327 bp, Setaria italica
  Peptide Sequence Number=SeqID_100218
caaattctggagtatcttcgggaggaatatgaactgaatttgtgcataatttgcatttttccaggcaatttctgacctgtcaaaaagaccaagtctgatgataacatctgcaagattggaattagccttgcctacaagttgaaagagcttctttctctgcatggtgaagttgccagtcttctccatgacacgattaatttcagtgaattcctcaaccatatcatcaacctgccggatataatgatcaagggcaatactttgaccaagaacacttgattatatagttcttaaaagtttagacactgatgggattcgcataatttcaag

SEQ ID NO: 34245 - DNA, 1116 bp, Setaria italica
  Peptide Sequence Number=SeqID_100219
ttttcgtttttcgttagtagtgaactggaatcaaaggataaaaaggaaattcaaagatgcaacgctcacaaaggtcagactcagagtgcccaggaaggtaagctatcataggaagtggcagcatacccaacttgttttcatctaaggctacagatcaaaagtggcagtgtgtcaggacagaggagaactctagagtattccttttcgtttaccttttttttcttaagaacaggagagcctggagttagcataacaagatgataggttcgggatgttaggtgaaggtggataagagtgccgcagatctgttggatagagaaccctcaagagatcatgttggaatccttgacaatttcatatagtgagatggcaatctcaatagtcagtagaattatgacaccccactccagcagatcagaccgtctattttggaggacttcttggagaaaatggatgttgtgctccacaaatttcagtttgaagtcgaggcttccaaaacgctgattcagttcatattcctcccgaagatactccagaatttgtgcataatttgcatttttccaggcaatttctgacctgtcaaaaagccaagtctgatgataacatctgcaagattggaattagccttgcctacaagttgaaagagcttctttctctgcatggtgaagttgccagtcttctccatgacacgattaatttcagtgaattcctcaaccatatcatcaacctgccggatataatgatcaagggcaatactttgaccaagaacacttgaaattatgcgaatcccatcagtgtctaaacttttaagaactatataatcaagacctcctttcatccatgttgttagcgacggtttctcaaccactgcataatcatcttttctcatctccggaagccatcctgaagcatgtttcctaattatatcaagatagtattcagcttcatgatcagcaatgttgaaaagcacagcagaaccatattggaaaacaaccacatagcgatagcaaaatctgctgtccttcactccaatgtccataatctcaggcgggaattcggagtaccgaagcgcaatgtagttgagcaaacgggtcgatggaggtacaatatcactac

SEQ ID NO: 34246 - DNA, 227 bp, Setaria italica
  Peptide Sequence Number=SeqID_100220
cgcacttggagagctgggagttcgtggagatgggaggtggggaggacggtggcggtggacgatcccgccggcgcgttctccgtcaccgcgtacgacgcaaatcactgccctggggcggtcatgttcttatttgagggtcaatttggtgccatacttcacacaggagactgccggcttacatcggattgtgtacaaaatttgccaacgaaatacatagcgaagaaagg

SEQ ID NO: 34247 - DNA, 576 bp, Setaria italica
  Peptide Sequence Number=SeqID_100221
caggaagttgaattttcggatgccatgatttatcaggcaaaaagtacaagtgaaatggaagaagttatgctcaaaggtcttaatagacttccatgggaaagggttgatgttagcttcaagaaaagtagacagaggttttttgcccatagcacaattcaggtcaagacctatttcatgaactctgacggggctgacgtgatctttcacatgatagaccattttatttattaaggtgcgtgtacgaaggtggttccaaattctttattatctggatgaactccggtcgaataggaacatgaggaaaatattcttttcttgttctcaagaaaaggattagagatataaggaagcagtagaacccatttgtaaagaaagtgtgttgggtctctactcttcctgcaaatttcgggccgcctaggttcttctgtcttattttccagactccagctagatatctcagttgtactctctcttcttttccagacttcagtcagaatctgagttgtacatgtactgctgtagtgcaccaaaatatgttacccaaatgcaatgaaatttgctgtgccgttgcatgtc

SEQ ID NO: 34248 - DNA, 657 bp, Setaria italica
  Peptide Sequence Number=SeqID_100222
cagggatatccatgaaagacttccctattcttgtagaggacattcctgacctcccacaatccttttctagtatttgatttctttcatttcttatatcaggactaggagatgagagatccctcggacgttttttcattatggacggggtgcgtacgaaacttttggcagcattttttagcacagcatcaggactgccatcacgagttggggagccccacaatcttactggagtagggaagtttaaggatgatctcatcagctctcgaatgccaagaggactatattctgggagatcgctagaggttacaagctcgcagctgacaaagggaacttcaaaacttgaaaagcaaggaggttcatagcataaagctccggcatcctccttatcgcttaacacagtgtcaccctgacttggtaatgcttcttctccattgtaggctgtaggctccaaacatgattggtcaagatcaaccagttgttccttttcaggttctggtatgctgtccataggttcagaagtctggtttctgtcatcttcggtgctgatgtatgaattttgaccaggatcaccagaagcattgtagcaagttttaatctccaaatcttggcaacagtgacttgtctcaaatttgacatcagatgcattagaagcaacat

SEQ ID NO: 34249 - DNA, 250 bp, Setaria italica
  Peptide Sequence Number=SeqID_100223
ggaatagaggagggcggtggtggaggtgggggcgcggcgggcgatgtcgcagaacacgcacccgtcggacatcggcgcccgctccgatatcctcttggccacgcggctgcccccgaagcagaaggtcttcctcatggcgcctaccgcgggttgatccgggttaggtgggagtggggcgccgcccgacgctggttggacttgaccggctcagcagcactgctccaggacgcggcggccggctcggggtccg

SEQ ID NO: 34250 - DNA, 1087 bp, Setaria italica
  Peptide Sequence Number=SeqID_100224
gtttggtcgagcgcgtaggaggacacgcggtaggcccccgacgacgtctccttggcgaggatttcgcgctcctgcaggaagatgggcagcgcctccgtggtggaggagaggaggaaggtgagcaggaaggcgaagaggccgacgcgctccgccaccttttcctcgccgaggtcgtagaagatggagcccagcgccagccccgccaccagcatgcacaccgtgcggcacgcgaagagctgccgcgtccgcgccacgttcttgaagaagcgctgcgacagcaccgccacctcgcgcgcccgggagttggcgtaccggctgcccgtcttggccatggctgtggtcttggcggcgtcctcgtcggccacctgctgcttgctgtgcagctggaacagctgctgcagcgtgcaccggccctcccgggaggacgccggatggggctggggatcgggcggcgccgcctgctgtgggctggtgaggtggcggcggtgcaggcggagcgcgtcgacggagtcgatggagaactcgacggcgtcgacgtgcgggggcaggctggaggcccgcgccggcaagcagggagcgcagcccgtcgatggtgccgtgatggaggacggagccagcggcgaggaggaggacggagtcgaacatcttgacgatgcgcgcgcccggctggtggatgctgagcagcacggtccggccgcgcgtctcggccatggcgcggagcgcgcccacgatctggagcgcggaggcactgtcgaggccggaggtgggctcgtccaggatgagcaccgcggggtcgtggacggcctccacgccgatggagacgcgcctgcgctccccgccggagaggtccttgatcctggtggcggcggcgcggcgcagggtcaggtcgtccagaagcgcgtccacgcgggcgtccatgtcctttccgggcagcgtcgcgcccaggcggagccgcgcgctgtagagcagcgtctcgcgcaccgtcagcagcgggaagagcacgtcctgctgggtgacgtagccggagacgcggcggaggtcggcgctggtggcggcggtgccgtcgaggaggagcagctcgggcgcc

SEQ ID NO: 34251 - DNA, 473 bp, Setaria italica
  Peptide Sequence Number=SeqID_100225
taagaagttacctaatatggaaaaattcgtgttggagctgccagctgggatgctagatgatgaaaaaggtgattttgttggcaccgcagttcgtgaggttagtatcttggcttctgaatacagtatgcactgaaatttacatgatactacaggaaataagccagccttgtattggtcctgtttttgtctggctctgcttcagatttgcacaagctataatacattgccgttgcagttggaaatttttgaaccgtgttgcagttggaaattcacatgaatttgtaaagcttaattactgtatacaatattcttgtgtgggtgatccttaattgcttaacaggtggaagaggaaactggtataaagttgaacctagaagacatggttgaccttactgcactgctggaccctgctactggaggtcgaatgctaccatcaccgggtgctgtgacgaggagatcggcctgttcctgta

SEQ ID NO: 34252 - DNA, 1173 bp, Setaria italica
  misc_feature (1144)..(1173): n is a, c, g, or t
  Peptide Sequence Number=SeqID_100226
gaccatggcagcggtagcggcgagtactcgtgcacggtgtctgcttggcttccgccgccgtgcgccgctgccgcctctccctttccctttcccttccccggtcgcacgagcagcgacccgccgccgcggcgttcgcatggcctcgtcggaagcctctgcctcggcgccgcccagcaccacgatcgaggtgcccggcgccgcggcccccgtcctcgtcgtgggtgcgccgggactccccgaggcggacttcaggaacgcggtggattcctcgcttttcaagcagtggctgagtaacctgcagtcggagaagggcgtcctcacctacgggagattgaacctcacgcgaatcctcatccagggggttgacatgttcgggaaacgtgttggctttatgaagttcaaagctgacatcattgacgaggaaaccaaaaccaaggttccaggaatcgtctttgcaagagggcccgctgttgctgtgttgattcttttggagtctaacgggcagacatatgctattcttaccgagcaggttagagttcctattggaaaattcgtgttggagctgccagctgggatgctagatgatgaaaaaggtgattttgttggcaccgcagttcgtgaggtggaagaggaaactggtataaagttgaacctagaagacatggttgaccttactgcactgctggaccctgctactggaggtcgaatgctaccatcaccgggtggctgtgacgaggagatcggcctgttcctgtacaggggccgcgtggacgaggagaccataagatcgctccaggggaaggagaccgggctgcgcgaccacggcgagctaatcaagctgcgcgtggtcccgtacggccagctctggcggtcgacagcggatgccaaggcgctctgcgccgtagccctgtacgagatggccaagagggaaggcctgctgccgccgtcgtccccaccttcggcgaacctgtgagacctgctggatggcgttgtggtccgtgcacgcagcacgcttttaagaaaatgtgatggcacgcacttccttccctgggaaatgaaaggaacggcacctgtgtagtctcaatgtttcctacattttggaagagtgttgaggaaataaaggtgcaagttcgtgtgtgagccnnnnnnnnnnnnnnnnnnnnnnnnnnnnnn

SEQ ID NO: 34253 - DNA, 149 bp, Setaria italica
  Peptide Sequence Number=SeqID_100227
cagcagtcagaaagctcctgcccaacatcttgaaattttcagaacacaaattacattctccttggactcttaaccttttcacaaaatcttaccactttggttactcttttgacaccaacaaattccgaatatcacccaaaaaaacatca

SEQ ID NO: 34254 - DNA, 1051 bp, Setaria italica
  Peptide Sequence Number=SeqID_100228
attttaactttatgtaacctaaaaggagtacatgacaacatggtacaataagggattatttttccatctaaacaacgtggagatggaattattgacaccttttgcctctcttctctccagtgccagattgtaactggaatggtaatgccaagttgctgggttggtaacaacagtgtgagctgatgaaattatgtggatggacgggacatcacatggaacttctaaggttaggtgttgccagaaggcggatgcgatgccaacatgtgtttagaatccctctcaggttccagattgattccacgctctcaggttgcacgtttgcactggaatcaaccgcttttgcaacaatctcagtgtcgctgttgacatcgacaatggccttgaagagcacccatgcccacttatcactggttacgttaccagccacatattggttacttatttattttggttggtgtgctctaaccaactcttaccaccgtcaggggaaatgtcaaccctctcaatgcccctgccacctcctgacaaggcgtatccagcaacagtgacctgtcctggtttgacggcactcatgtcttccaaagaacatattgcagactgaactgggtagtccatttggggcttcctggttgaccacacaatattatcccaatcaactgatggagggaacatcttataatctttttgcatgaaaaaaccctgagactcttcctcgattatgtcaattctatccaaccatttcacagaacgggcaccaatgacaccgggaacaatggcgcggagagggtatccatgatcacgcttgagtaccattcatttcatatgcaagcagtatgtctgctgcaggatttgttgcctggcccaagggaattgatgctttgtatgggccacctttttcctctggacactgatcaacactaacaaactcaacatgctttccaccagatggagtgatttcagtatgatatggcacaccaacgagctgaagggcatctgataattttagcttccttcccctaagttagtttttttatttaaattttacgtttta

SEQ ID NO: 34255 - DNA, 229 bp, Setaria italica
  Peptide Sequence Number=SeqID_100229
ttaccttagaacgtagttttaggacgggagcgagccgcggttggtactggggagtgccttgccaagggagagcattctagactctctttacaccccctgcgcccgcggcgggtaccttgtttgacactgagaagcaggtggcgtacttgtacgttgcaggtgcttcggcatatgcttgtggagttgagtgctcgctctcagcccctaaggaccgagtcagtttaccgtt

SEQ ID NO: 34256 - DNA, 544 bp, Setaria italica
  Peptide Sequence Number=SeqID_100230
cgggcggagcatgtcggagctcgagttcgaggaggtcaagggcttgcaggacctcggcttcaccttctccgacgccgaggtggacgccgagctcgcgtccatcgttccgggcctgcgccgaaagcgctccgaggaggagaacagcagggccaccgcgtcggctcccgcggcgccgcgggccgccgcgtcgtcctccgccctgcgggaggaggaagccaccgccgccgccccggcaccgaggaggccgtacctctcggaggcttgggacgacgaggaggaagaggtcaggagggcgctgcggaactggcggatcccgccgcccggcaacggcaacgacctcaaggagcacctccggatgtgggcgcacaccgtcgcctcggccgtccgctgacgccctccacccatctcaggttttcgttttttttattgatcaacaaactccattagaggttgccaagcaagtttggtgaccaaatcaaatgtaaatatttcagcgatgtgcttgtacatcttccttccaagttttgagcatctgtgtagtgtg

SEQ ID NO: 34257 - DNA, 1187 bp, Setaria italica
  Peptide Sequence Number=SeqID_100231
ctgtctgattatgaaagtgtcacttatagaaaattaaataataacagagtcctaaatgtgcaatgtctaacaaaatcaacacctctaggaacctttgttgaagagggacctggacaaccttgaacttctggatggtaattggtctcaactatgtataacttgcaaaattgtcaggcctgtacgctcaaaacactgctctacatgcgaccgctgtgttgagcaatttgatcatcattgcccttgggtatcaaattgcattggaaagagaaacaaatgggaattcttcatgttccttatcctagaagtttctgcaatgattattactggtgtaacggccatcataagaagtgtaggagacccagcttctccagcatcatttggtggatggcttggctatacagctataaaccattcgtgggtggtgtcttttgtcataatggacctcttccttttctttggcattataactctaacagtaattcaagcatcacagatatcaaggaatgtaacaacaaatgagatggcaaatgccatgaggtacagttatctcaggggaccaggtggcagattcagaaatccatatgaccatggggtgcgcaagaactgttctgacttcttcctgaagggatacaacgaggatattgagaaggttgtgcagacattgcagcctgatgaggaaatgggaccgattcagatgagaagcgcagtctcgcagaatagtgagagcgttccacttcatgcgaatggcagtgaccattcttccacccatttacaagggaactcaaattcccatcgccaaagttcgtccaagtgttgcagtaacagtaagaaatctgagaggacccctttgggcctagggctgggccttgggcgtaacagcccctctagccgttatttgcggtctcttcttcccttgtgattcgttttgagaatgcagatgtgctggtgttttttcattcttgcgtgcttgttgcacagccacagctttgtttgggctatttctgcgttggtggtccgtgatttctctccggttgcactgacattgcaatgctgctggaaatggagccccaccatccaccagaataatgcaatggcgagggtaaatgagatgggagttgcttgagggcttcataaacatcctcgacttacacctacatatatacaccacaatttcattttttttgcaa

SEQ ID NO: 34258 - DNA, 289 bp, Setaria italica
  Peptide Sequence Number=SeqID_100232
caaattctcacacggtcgcaccccatcccgtcccgtgatgagacactccacagcaccaccgctcgctgtcgtcgtcgtactagtagcgtagcaggggtagtagcgtcgtctccccagctaatcgccctgctaatcgcgaccacgcaagaacagctcatctcgacctgctaatcagctgctcgcttgcgtgctctgcccgcctaaccgcgctttgtttagctacagagccggcgactttgtttccctcccgcggcgtcggtataagtagtcgcggtcgccgccgtcgcct

SEQ ID NO: 34259 - DNA, 371 bp, Setaria italica
  Peptide Sequence Number=SeqID_100233
ttattcttgaagaagtccattctccttcacatgcttcagaaagcctttcccaaggagaatggacttcttcaagatatctttgacattaaggttgacacaactgaaacccagtcatccactgataagaaaatctttaggtctgaagaggaaaaagaaagagctctcaaattgaacaaagagcgtcgtctagcccaggcgaggaagaatgctgctatgttggtcgagtaacgaggttacaatgatgagaaaacaacagccattctgtgtgtttctctttatatctggacctttatccgtgtaaactactactggcacatcccgttggagcttctgcgttccagatacacgaacagtagtaaatcatttaggtg

SEQ ID NO: 34260 - DNA, 1334 bp, Setaria italica
  misc_feature (1328)..(1334): n is a, c, g, or t
  Peptide Sequence Number=SeqID_100234
tgcttcatggtcgtttggagaacaagtatgccactatgctaagtcaattcaacaattctgtgaaaaaaggaatctgctaaggaggtttttctggcatctcgtgccatcgggttattggctattacactcggtgctgggagcagttcacatgaaattatggaggagtcacatccccaactttgtagggtactgcaagcttggtccgatgcctcaaagatgatatctgcacttgattgtttggctgtcatcacatttgttggtgcaactgatctggctgaaacagagttagctttgaaagccatgtgggatgtgattcatccaaaatctggttcaaatgtgggaactgtccggaaacctaagcctcctgtgttagcagctgctatatctgcatggacgtttctcctaactactattggttcatggaggataaataccgacagttggaaagagcccatcgcatttctctctactcttttagaagcagaggatcgtgctgttcgaatggccgctggtgaagcattggctttgtgctttgagttaaatctgcttgacgtttcttgtgaagatggcgatgccaacacaggaggaactggtggttctaagaacaagcttttcttggatatgcaagcattaaaagccaagatatctggtctagcctctaatctctctgcagaggctggggggaaaggcgcagacaagaaaaaccttaccgatcaaagagacctgtttcaacgaatcttggattttgtcaagtatggcgattgccctgaagaatcaatcaagattgctggaaagcgtgatgtcttaagggtttcatcatggtctgagttaatccagttgaatttcttaaagcggttccttgggaaaggctttctgaagcatgtgaaggagaatggacttcttcaagatatctttgacattaaggttgacacaactgaaaccctgtcatccactgataagaaaatctttaggtctgaagaggaaaaagaaagagctctcaaattgaacaaagagcgtcgtctagcccaggcgaggaagaatgctgctatgttggtcgagtaacgaggttacaatgatgagaaaacaacagccattctgtgtgtttctctttatatctggacctttatccgtgtaaactactactggcacatcccgttggagcttctgcgttcatgatagtgtaattgttgatgctggagtaatattacacctaaatgatttactactgttcgtgtatctggaacgtcagatagcatgatttatgcgggaatagttaagaagtttctttaaagttgtcaagtttaagttaaacttaaactaaaaaaaannnnnnn

SEQ ID NO: 34261 - DNA, 469 bp, Setaria italica
  Peptide Sequence Number=SeqID_100235
ggaggagacccggcgggcaatgctccgtcaagaacagtccttccctgaccagatgaacgacccgcataagttttatggatccttctggaagcaatccagtagtgcacagagtagccttcattccactcatgagcataagatgaatttgggttcgtgggccaatcaaaaccaagaagatttcaccaattccgataagcacaaatcgccgtccaatatcgcgcaacagaactcagatgttagggcttcaatttggagaaagacttatgcttataacggtgtgattgacttggagaagccatgcacttctggtgatgcggtgggggatgttggttgctctggcttcggcaacctttccaaccaaaatgggaggtctcgggatggttcatgctgcatttcaccagagaatagctcacttgtagagtctgctcagttgtgcagagcttggaattcgtcacgtttaagccctagg

SEQ ID NO: 34262 - DNA, 298 bp, Setaria italica
  Peptide Sequence Number=SeqID_100236
tggtgtcatgatcatcattgaggtgataacttttgcttgaagttttggttattttgatatgacccatagggttaatctttataatttatacctgaattttatatctctattatgagtatgtgacagtcaaaagtttaccagatcgtaaactttctatatcttgaagaataatcaatataatttattttaacgaagagctcatgatctgttttcattttttatatttgtaaatggtatagcttgcttaactgttgtcatctcgatgagttctatatctattatagacacactgaacttg

SEQ ID NO: 34263 - DNA, 258 bp, Setaria italica
  Peptide Sequence Number=SeqID_100237
aagatgatggataagctccaccagggcgacgacaacccctgggccaattgggtccggttccggtacacgccaaaacgcgcgacgcgcctcacgtcttgttggcagacgtccagcgcctcctgcccgtctacagagggatcaccaccgttgtccttagcagtggcgagatgacctccttctggcacgacaactagacctcgcttggctcccttgcccgagcgctgcaggtcctattctccaattgcctcgcgcccaaca

SEQ ID NO: 34264 - DNA, 698 bp, Setaria italica
  Peptide Sequence Number=SeqID_100238
gcctctttcaaacaggaagcgtatcaaatgaattacatctattgaacttccaatgatttgatcagttcaagagcacacgtcatacacaaactataaaaataaatttcaaaagcagacaaaacaagacaataatatgatgataataaattgcaagcagaattatgctgtgagtaaggcatacccatttttcttgaagttatctactattttaacaaccgagtcaattggtactgcaaagctcaaaccatcagcattcctgactttcatcacattaactcctataatctcaccatcaaggttcacaagagggcctccagaatttccctgattaatggcgcaatctgtttgcagatactcccttccgtaatcctccaagacccagatcactacttttccggtcaacacagctgacaataccagctgtaactgtgttctgaagagaaagtggacagcccagagcaacaacccaatcacctggttgaagtctagatgacgttccaagcctggcagccggtaacggggtcttagatttaattttcagaacggcgatgtcagagtggcggtcagcattaaggactacagcttcaaattcacgaccatcttgtaaagtcacactaacctgttacaatatccaaccttttgagagaaagattaggaaacaaacacgtttaagaaataatcaccttggaccaaattca

SEQ ID NO: 34265 - DNA, 1199 bp, Setaria italica
  Peptide Sequence Number=SeqID_100239
tgactgaacattgcgccaatatatatttcccatgaattcttgtcctttcttttgggtggtcctgccacccatgcttaactagttacatacaaatctcaacagaaagtgtattatctaaagaaaattggagttccaatggaaaatcctcctcttaggtatcagctcagcttcccagcaaattaattttgggtcatctgccggcatctgcctcctctggtaccacaattaaagtcactgtcaggttcgctcttttaacaagaactttaaatggcactcccaccttgtcccccatgatatcaatgatctctttgatgctttcaactggtttgccaccaaattcaacaaccacatccccaggacgaaatcctgcctgttcagcaggagatcctggtgtaaccattggaacaagcactccttttcttacatctggaaaagtacttgatttttctttgagttgtgaaatgatcatgggatttaggtcaagcatctttaaaccaagccacggcctcacaactctcccatttttcttgaagttatctactattttaacaaccgagtcaattggtactgcaaagctcaaaccatcagcattcctgactttcatcacattaactcctataatctcaccatcaaggttcacaagagggcctccagaatttccctgattaatggcgcaatctgtttgcagatactcccttcgtaatcctccaagacccagatcactacttttccggtcaacacagctgacaataccagctgtaactgtgttctgaagagaaagtggacagcccagagcaacaacccaatcacctggttgaagtctagatgacgttccaagcctggcagccggtaacggggtcttagatttaattttcagaacggcgatgtcagagtggcggtcagcattaaggactacagcttcaaattcacgaccatcttgtaaagtcacactaacctttcccctcacaattgcttttgtgctttgaaaatctgcaacaacatgtgcacaggtcaatattgtcccatctggatctattatagttccagatccaatgctctgctctaggagccatccatgtgcatcttgagaacatgaaatgtttacaacagcaggaccaactgcagatgcagctttggcaatcgaattcctgcctagacaccctgggcaacatcttgaatcatctaagcttccagcagaa

SEQ ID NO: 34266 - DNA, 796 bp, Setaria italica
  Peptide Sequence Number=SeqID_100240
tgataagcatagaatgacatattgatggacgatacaaaattccctgctttaaattttgaacaaattctgggtgcctctaatgatcttgccattgatggccactttgatgttacggatgatgacatgaatgacccagatatggctgctgccctacaatcatttggctggagtgaggacgatgacaaacagttggaaaaccatgaacctgtttcttcttcaaatcaagtggcaataaaggagcaagtgcttgctctgaaaagagaggctgtcgcaaacagaaggtctggtaatgttgcagaagccatgtcattgcttaaaaaggcaaagctacttgagaaggatcttgaaactgaagggccagactcaaagtttccttctccagaaggacagaaaactacaaatgcagaagatattacttttgctgggtcaaatgcccgacctgtatcagcaccaaaaagtaagctagcaattcagagagaactgttggctctgaaaaagaaggcactaactttgaggagggaagggaaggtggatgagtctgaggaagagctgaagaaaggtagtgttcttgagaagcagcttgaagagcttgagaattcttccaaaccacctgtagccaaggaaaccaggagctttgcatctaatcctccatacaaggttgaacccccaaatctcaatcttgctgatgaaggatttgaacctgaggttacagacaatgacatgcaggatccagcattgctatccgtgctgaaaaatatgggatgggaagatgttgatactgattctgtagaaaaga

SEQ ID NO: 34267 - DNA, 615 bp, Setaria italica
  Peptide Sequence Number=SeqID_100241
gctgctcgccgggttccacgacaggagcatcatcggcaggggcgcgttcgggaaggtttacctgatcgagctccaagacgggcagaacatcgcggtgaagaggctggtgaactcagggaagctgaagttcagagcggtgaagaacgagatgaaggcgctggcgaaggtcaggcacaagaacatcgccaagatgcttggatttttcactccgagggggaggtcagcatcatatacgactacctgcagacgggaagcttgcaggatctgatctgcgggccgaaattcacggtggggtggaaggacagggtgaggatcgccatgggtgtagcccaggggttggcccaccttcaccatgaccatactccccaggttctgcatagagacctgaaggcgagcaatgtgcttcttggtgacgaatttgagccgaggattgcaggatttgggatcgatcgtgttgtcggggaaatggcgtaccagacttccatggcttcggatctgaactacaagtgctatatggcaccagagcaaagctgcgccaagaatccaacgcacctcatggacgtgtacagcttcggggtcatcctcctggagctggtcaccgggaagcccgactaa

SEQ ID NO: 34268 - DNA, 240 bp, Setaria italica
  misc_feature (229)..(229): n is a, c, g, or t
  Peptide Sequence Number=SeqID_100242
aaaaaatagctactccattttgttcaagacaagatagatttgtacagataactactggagccaccatgatacgattcggttgttcgtaaacgtcaacatggtgcttctttttcctgtcatatagatgactgaacctcatatcgggcaagtagcagccaatgactaggcacacgtacatacgtgcatcatctctctagtggtgcacaccctcgagcagttttagtttggngcttcttgtta

SEQ ID NO: 34269 - DNA, 1333 bp, Setaria italica
  Peptide Sequence Number=SeqID_100243
cgccttcctcccttgcttctccgggagggaaggcacccgggaggccgccccgccacccttcgcaaaagccacgcgccaccaaaccttttccctcaccccgtcgctttcgcgttcagcgcggttggtcggtcgccgaggcgggcgataaaggaaggcgtcgccgacgaggccgggatgatgagcagcaggtcgtcgggcgggagggacgccgagggcgagtgggaggtccggcccggcgggatgctggtgcaacgcagggacggcgaggccgccggccccgccatcaggatcagggtctcccacggcgcaaccttccgcgaggtcctcgtgccggcgcaggccaccttcggtgagttgaagagaatccttgttcagactactggcgtggaacctgagaggcagaggctcttcttccgtggcaaagagaagagtgatagtgagttcctgcacgcagcaggtgtcaaggatggtgcaaaattgcttctgcttgagaagcctgctcctgccaccatggagcagaagcctgagccagtgtttatggatgagagcatgatgaaggcatgtgaggctgttgcttgtgtcagagctgaagtggataagctctctgctaaggtgtgtgacttagagaagagcgtgcttggagggagaaaggttgacgataaagaatttgttgtcttgacggagctgcttatgatgcagcttctgaaacttgatggcattgaagctgaaggagaagcaagggcgcagaggaaggctgaggtgcgccgtgttcagtccatcgtggagaccttggacaagctgaaagctagaaatgctaacccctttagcgatcacaacaaagctgtttcagtgacgacgcagtgggagacgtttgagaatggcatgggcagcttgagtgctcccccaccacgtgtttcttcgacccaagtcaacactgactgggagcagttcgactaggctcagatgaagctatcaatgtatcatggaccttgtgagatcactatggacattcctttgcaggcagcaaggtgttgtgtatatgcaccacgtttgatgccttctgctgttcccactgcctgtgaatgctaccaaatgataccgtgtgaaatgcatcgctcattcgaggcttgtatttcaatctgcacccactgtcatggttggtttctgcatcctttggagcactagctcatccgtgtatgagtttgtatcatatacatgcttgttttttttgagcagaagactgatcgtagcttcccctggatttagcccaaagcaaagataagagtaaccattgtttggtcgtccaatgctaccagtacgaagtggatttagc

SEQ ID NO: 34270 - DNA, 540 bp, Setaria italica
  Peptide Sequence Number=SeqID_100244
tggaattaaatatgatccaaggaactcagatggcaaggtcagccaatctgagatgggagggagaacgaaagagggacttgaaggaatgggatgtatccaagataattgacaatagcaaaagagtacatgaaaagtagcaatccatgcgccagaaccatgaactataaaattgatatttcatttactattatttcctactacaaatactattttactctcacatacatattatagccactttttagctcctgccagtattcctttagcctacccagatttggttggaacaaaaggcttgtgcaacacatatcctgtattactctaagcttttggataactatgcaaaggcgaattgctttcaaaaaagattgtgtaacatatatctatagtgaaccgatgtaaaacaaccagattgcttaaatagttgtttatcttttcagcagacgccttcccaagaaaaagctataagggcaacatagtgaaaacctcatagaccaacaatgtgacacgttcccaatttcgttcgaccccaagagaaag

SEQ ID NO: 34271 - DNA, 294 bp, Setaria italica
  Peptide Sequence Number=SeqID_100245
gacctctcccgcccccccgaaccctagccccgtcccagtgcccgtccccaccccgactcccaccgcgaacgggaccgcctcaccgcccaaggaccagccgccgccgccgccgcagccgcagcagcaggcgggcggtcaggaggagctagcagcggcggatgggggaggcgccgaggcggcggaggctggagtagtagcgggtggttcgggagaggctatggaggtggatgggggtcctggcgcgggggatgcggaggcgggcggcgcggcgggaggcggaggaggcagtggggg

SEQ ID NO: 34272 - DNA, 1390 bp, Setaria italica
  Peptide Sequence Number=SeqID_100246
taaaacaaggccaagtacaaaaattgcacaaaatgtattattattgaccatttcgatgagcaaacaattctcctcaacaatcaattcattgagctataacagtgtgtatatactttcgtacacttgttacacttgaaggtggaaaacaaattaaataggactcgggagaagaaatcttcaggagtattcagtccgtagaagatcataagctggtctgagccagctccttgaagttgaagggcgcagtgtatcgccccgggcggctgtcatagaagttctgggcggtcagcatcgcgccccgctggctcggatgcacggcgtcccagaacgcgtgccggtcgcggtcagcgcacaccgtggcgttgggcaagcagggcgcctccgcgccgagcctcccaccgccgcagcacgcgccggcgatgtcggtgtacccgaccgcccgcgggtcggcgaaggtcgcctccgagaggccgtagtagtcggcgagcgagtaggcgaagcccggcagcctggacgcgaggctactgaacattgaggcgaggacgtcgtcgaagcccgacgcgagctggttcagcgcgccggagcacgcgccgctggcgtcgtgcagccgcgccgccgggacgcaccccagaaggccgacgttgatgacggcgaacttgctggcgcccagcgcgtggaggtcccggacggcggcggagtagccggagatgaggcttgcgtagagggcggccgcgtcgcgttgttgtccggcggcggacttgttctgctccgcaaccgcgaagacgaagaggtcgttgctgccgacgctgaagaggaagacggacttggtgaggaggaggttcgccgcacgggagcccagcttggcgaccatctgggacttggtggtcttgaagtactgcacctgcttcgacaacgggatgttgttgccagcgttagtggagtcgaggatcccagctcctcccgaggcatagctgacaccaccagcaacagcggcctggacaagacggccggagcttggtgccagcgacagataaggcggaggactccacgggaaccccaagctcttcgcgaggtagtcggcgatgttgtagccgttgctgaagcgtccggtggaaacggagcccgggaagtcgatgccgtagtaaggcttgttcgcccggggcacgtccggccctgacaagtagttgttgttgccgacgtccagcgtcgagtccccgaacacgaacatcgccggcggccgggcaccggcagcggcggccgtcgttaccagcacggacgaggacaccacgagcaggcacagcgcggtactcgccatggccgacctgtagcccaccattgtctcagctggttccatgctgcgaacacgacgaatcggtgtagtggagtggtg

SEQ ID NO: 34273 - DNA, 1274 bp, Setaria italica
  Peptide Sequence Number=SeqID_100247
gtgctgttcagatctgttgtcagaaatgtaagtcacgtctcttccaccctctcttctgaaagcaaatctatcaccaaggccgatttcggatcatagctttcaggggcaggtaatgactttcgtgcaaatacctactagtgctagaatattgaacctcccgtccattacatggaactattatcggtatatctattggttattcacttctaaaacaatacaggacaccgttgcaagtgaagatgcaaaaaacaaaagaacaatgtgacaacttcccaactgtctcctaattgcgagaagattgttaactatgttgaagaaaggctcaactggaaaggtataggacttgcacttaataactgaattatcatggataagttggcatagttcgtcaatgacctctaatggcaggtaatcaccatataacagcacaagtgtttctttggttttcttgacataaaaaaaaagtgtttctcgagaagccttttgttttcatgctccctccgtcgaagaacctgctctgctttgtggaataacccataccaaatgaaagcagaagcatatgaacaaaaattaaatgagcaattgaaaggaatagcctgagggtataaacgacctagaaaatgttttactgagcagttcaaaagaacatgttatgtgcaagcggataaaaaacaatttggaaaaaaggtatattcaaaaaatgtacatatctatgttttacagaatgcaacaaattcctccatcaagtttatgtgtccagttgaaagtatatcctgctaaaagaatacctataaattacagatgattgaaattgaactgaaaaataaaaaggttaatgataaaaggagggaatacaatgttattaggttgcaggttttcggattcgggagggctgtccacatgctcaactccagtagtgttagcaggcaaaacacggcccgtgcagttcttccttttgaatgatatctatttggacatgaacacaattggtcggtgcctcagtggccccaaaaaccacaattgatacagccaaataaacatatgaggatcgcctgtaaataaagcagtagtgcttgcaactatttagttcttgattcagcataacatctaaagaagcttatgcaaaaaaacaaaaataattatcattgcatgcctccctcaaaacaacaatgttaacaagtcacaataaaaaagagaaccctgcagttcatagaatatagcattactagacaaaaaagtgtagtaatagtggcgcaacaaccacacttgaaaac

SEQ ID NO: 34274 - DNA, 684 bp, Setaria italica
  Peptide Sequence Number=SeqID_100248
aagtcacagaactgtaagtaacattagatagacagcacagttacatttttcctttccttttctccatatattgttaatcattcactttgtactttgctgacacatccatgctacaggcaaccgatttgcagtttgtgcagcttgtccggtgatgttaccgtactctttactcatcctggtcatccaagaggtattccttgagcaccgcgccgcagacgggcagcggcacgtccttgaagtagccgagcgggttgggaagcgcatgtcgtcgctgatgccggcgtccttggcgagcaggacgctggcgcggtcgctgtgcgctgggacctcggcgcagtccttgcgggggctctcgatgaggatgacctcgcagatgtcctcctcgtggccgcccttgagcttgatcgtgtagaagccggactcgtcggtcacgccgtcgatggcgcgctcgacggcaccggtgccgaagtgcttgcactccagcctgaccttggcgcccttgatgtactcggtgacgttggtctggaacccggcgcggcaggtgtcgcagtagacgcggccctggatgacgaagtcgggagcatcggtggcgacggcgaccacgacgtagaagaggacggcgacggtgaccgccggaaggatgcggagcgaggccatggccgccggtcgccggatgaatgtgtt

SEQ ID NO: 34275 - DNA, 732 bp, Setaria italica
  Peptide Sequence Number=SeqID_100249
gtccaatcttacttgcgactactgctgctgtgattacttctttactggcttccatgcacctgggttcactactggaacattatctttgacccattcatcccaccgcgatctgcacaaaaccctcacactctttgccaccttctttgttgccgcacctgtgctctctgctattgtaatcaccccctctgcacctccactttcttcgtaaaaatcacggcttgtgtcgcaccagtcatttatgaggtgcttgtttgtttcacctactatttcatcatctttgtctcgtaatagcctgaagctcagatcatgcagctcttgtagacgaggagcttcgaagaacatcaccagaatcaccgcaattgcagccttgtgctttttagtgttcccaccgtaggctacgaggatatggaatgcattcaggagtgattggaagccaatcaagcatgtatgcacagagtcaccaatcagattagggtagctcccagtagtgtggagtgattccgatccaaccatagccttgggccccggcatgtctaattcatatcttgaaccattgtgggtgactattcctctcagccaaatttggtacttgtcacacacaatcatgagctgggactgaccatcagtgagctcaatcacaaatgacccgttaggtgtatgatctaatccctttgtaacagcaacaaccttgttcttctttccatcttcagaaaccagagtaaaggtgacatt

SEQ ID NO: 34276 - DNA, 502 bp, Setaria italica
  Peptide Sequence Number=SeqID_100250
tacaagaaagaaatcgaagagctaggtaatactctagttgatagactgaggaatgggtccagcaattatatcgcacttcacttaaggtacgagaaggacatgctctcgtttacaggctgcagccacaacctaacacatcaagaggcagaggaacttagggaaatgcgactcaaggtgcagcactggaaagagaaggaaatcaacagtgaggagaggcgactccaaggaggctgccctatgactcctcgcgaagcagctcttttcctaaaagctatgggttatccttccagcacgaagatctacattgtagcaggtgaactgtatggtgtacatagcatggatgcattaagggctgaatatccaaaatttctacacacattatagtctggcaacagaaaaatgaattagagtctctcaagctgtaccaaaacagattagctgctgtggattacaatgtagccctccagagtgacgtttttgtgtatacatatgatggaaatag

SEQ ID NO: 34277 - DNA, 2134 bp, Setaria italica
  Peptide Sequence Number=SeqID_100251
ccgcctggcggacgtggagcgcgacgcggccgccgactgctgcggcgtcccgagcgacgacagcgacggcgggaccgagcgccgcgggcacgtgaaggcgctcctcttcgcgaggaggagcgggcggcagcggcaagcgggtgccggcggtcgaccgggcctgggtgaggaacgcggtggcgtgcctgctcggtgccaccgtcgtcctggtcctcgtcgtgagctctcgccggggcgacgtcggcgcggggaggctcgtgcgaagggtggacgccggcgacggcgaggtgctcgggtggagggaggagaacctgaccgccatcgctcgccgcccgcccgacccgccgatgacccagatatggacgaaactggataacaagggttacacaaaatgtatcgaacgcccaaaaaaccgttacagaatcaacagtgcaacggctggttacataatcgtcgacgccaatggtggcctgaaccagatgagaatgggaataagcgatatggttgcagttgctaagctcatgaacgccaccctagtaatccctactctggatcataaatcgttctggacagatccaagcgatttcaaagatatatttgacgttgagcacttcaaggaaactttagaaaatgacatcatgattgtggattccttgccaccagcttacaaaagattgaaaccctatattagagcgcccaagtcctgggccaaggcttcttattacagagctttcacaaggacactgaagaagaccaaagttgtgaaattcacacatacagattctcggattgttaacaatggtctccctccttccatccaacgactccgttgccgggcaaattacgaggcattaagatacaagaaagaaatcgaagagctaggtaatactctagttgatagactgaggaatgggtccagcaattatatcgcacttcacttaaggtgactgaaactgcaattgtctaatatgaggctggcatcattttgctcaagactcaagaggaattagcagatcagtgatactttggtttccttataaactgacaggtacgagaaggacatgctctcgtttacaggctgcagccacaacctaacacatcaagaggcagaggaacttagggaaatgcgactcaaggtgcagcactggaaagagaaggaaatcaacagtgaggagaggcgactccaaggaggctgccctatgactcctcgcgaagcagctcttttcctaaaagctatgggttatccttccagcacgaagatctacattgtagcaggtgaactgtatggtgtacatagcatggatgcattaagggctgaatatccaaatttctacacacattatagtctggcaacagaaaatgaattagagtctctcaagctgtaccaaaacagattagctgctgtggattacaatgtagccctccagagtgacgtttttgtgtatacatatgatggaaatatggctaaagcagtccagggtcatagaagatatgaaggattccgaaaaaccattaaccccaacaggcagaagcttgtcgagatgattgacaagcttgatgaaggtacaataaattggaatgagtttgaaagtgaagtgaagatgcatcatgaaaacaggcttggaggtccatatcagaggctgtctggtcgaagtgcaaggcatgaggagtacttttatgcaaatcctcttccagggtgcttgtgcaaaagaaacacacaggatcaggtggcatgaacttactatacaaactactgaggaatggatagttcattcctcaagtgtacagcgagcttaactgcatgtagcatggacgcagaatttcgtccaactcattgatatacagcaaacagcacaagtcctggtaaactgacagcaagagcacatattatttttctagacgcagatagaattcgtgtacttttcaatcttccacaaggatatgggagggagcactcactgagatgcgcgctttcaaataattattcatccaagtttaaaaatagaagaggcaaagaaattctaagaggatatatgtgccacaagaggatagaattagctaaattgaacagttttgtatgctttaccctatagtccagaatacagtcttacctctttttgatattaaattttgt

SEQ ID NO: 34278 - DNA, 732 bp, Setaria italica
  Peptide Sequence Number=SeqID_100252
tctccttgaacttttccaggggccgatttacggcctgtgccccccgatcttccattcggggaagtgaaaacatagggtcggcttttagaaggcactgagctgcctggatgagccacactattttcttcaccagaacattttccttgcagaaattcaaaaacagctggcgcgtcacatggatccagaaggaggaaatctccataaaaatcacatgttgctaacaaatacgagtctagctcactcgcttcgctatccagacagtctccttcaaacaccagcagatttgctggtggcctcacagtctttctttttaaatcatctcgatcaacattgttatccagagaggtccttgcttccgctggaacatcatctaaccccataaatatatcatcttcttcattatgaattgtgctagggtcattttcattagtgtgagctgagccattttcctgctgatcctgcttcttttgcgagaggaactccaacgcatgaagcaccaatgagtacaagtactccaccttcctactgtacacttgaactgatccctggagtaatagtgccgcttcggcaaagttgacggagtgggccccgtcctcgcctgtgacctcgccggagcagatcttgagcaggtactcctcgaggctcttggcgacgtccaactcccagttcgactcggggtcccggttcgcctgcagaatggggaacctcccgccgctcgagcccccactcccc

SEQ ID NO: 34279 - DNA, 450 bp, Setaria italica
  Peptide Sequence Number=SeqID_100253
gaagtagattgtttgaaatgggatggactgtccatttgggttcttgaggactatgatacagaagaatgggtcctcaagcacagggtgagcttcttggagctgtttggacaaatgaattccctagacagttttaacagcatcgtgctctccattcatccggatcgcaatttgattttcattcttcaacacagcaaccagaagctgatatcgtatgacatggacagtaaggaactgcatgctttccacactcttggacacaactttgaatctcttactccatatgttcccaatttcttggagccattggtgcttacaaatgagcactgaaatgttgcttttggagtactcatggcaacattcttctggaaattgttacctatgtaagctagcaacctggtgaatgaaatctttcagaattagctgatgtgttgctggtaatttggatgtatt

SEQ ID NO: 34280 - DNA, 247 bp, Setaria italica
  Peptide Sequence Number=SeqID_100254
ttcctccgaactctctccggttcagttcgagctccgccgccgagcgccacccgatggaggaggttcaggccgccatgacggcgcacctagaccaggtgtctggtctcgtgcaggcgctctcctccgagctccgccgcggcatggggcccgccgccgacaacctgcgcgccttcgtccgcgccgtcgactggacggagccatggctggtgtgcttgatggcattccatgtgattctgctgctcaccgg

SEQ ID NO: 34281 - DNA, 433 bp, Setaria italica
  Peptide Sequence Number=SeqID_100255
attaactctttccgggaggacaatagcatgatttttagatgatcccgtcccatttttcactatttcccgacatatcatagggcagaacatcgcaacttcctcctccacttgctgtatggaaccatcaaagcactgaagccatatatatgtcttcaaagcctctggttttattactgctaactcgctctctgacatgattgcccaatgccagaaaaataatgatgctaatagaaccagatacaggggaaaatttacaatgaaatcctttcaaggtatacaaccgccactgggctctccaatatccagcaactagctgagaaacctttatcctatagaacaaatcttggtactcctttttccccttcagattggaggataactttatttgccttcagatcaaaaaatgaggcatgaagtttagcttcaacctttg

SEQ ID NO: 34282 - DNA, 993 bp, Setaria italica
  misc_feature (1)..(1): n is a, c, g, or t
  misc_feature (8)..(8): n is a, c, g, or t
  misc_feature (14)..(14): n is a, c, g, or t
  Peptide Sequence Number=SeqID_100256
nttttttntttttnttttttttccgccaactaagaacacgacatttttttcccttgtatttattcataaagatgagtcctgtcaaaattaatgaacatacataggttcaaaacttctggttttacactcacaagtcactccacctttttttccttttttgggtaacacaagttggacactacttcttgatgaaaaacagggtacatacaagtcacagaacaaactattgctgctcgcaatgttgtcctgtgtttctgtcaaacaaaactcctccctgcctaaggttttccaccactctaacagcaaaaaacctcatcaagaaaattctacacggaaaaactaacagagaatctctgctagaaccatttaccacctggcaccaacatgagactccatccgttggtcctggcccaaaagcactctttcaggccaaactaagttcaacttcatcgcaaagtccgccacttctctatcaatctcttccctcattgcaggatcaagtccatcatcaagatcagcatcatcaaaggggtactcgatatcatcttgcaaatcttgactttggcaaggaagctcagaaatattaccactatctgctttgcgcgaaaccacacagccagctccctccttatttacaggttcagagttcgctcttgcgggattcttagcttgatctttccttcttttaatctttttcttacttttagcagctagtgcgcctccagaactgtaattatacctccatccccatttataaaacagagtaattcatccaaagatctctcatctttttgctcttcttgtacttgaacatcctttagcttctggcgctcttggagctctttccgcttctttgcatacaatcggttcaataagcgaatcctaggatcatcatttatattttttagaggctccaacttctcttcctctgttaagttctattcttggttaaattggtaaaattgttctacgtaatttccttcggttgttttt

SEQ ID NO: 34283 - DNA, 1763 bp, Setaria italica
  Peptide Sequence Number=SeqID_100257
tttagaggtaaaagttgtgtattccaacccagcttaggtcaggtcaccaaccgaacatcgccgcatttttatgtgcaccacacaatagagtgaatcaacataatttcacggatatctgtaacagctccaaccgctatcaccactctctttctctattaaggaaaattggcaacacagcagcaaaggaaaaattgagtcaacggcagacctctaaccatccctccccaaagaaacaaccctgtccttttcctttgagtctaaacctagctatgcttcatcctgacttggtgaccccctgctgccccagcaaatggactagggaaacagacacacatgtccgcacgcttggttaccagatatcaaaggtttctcaacactcaggtgccaggtggccagtttggtctttagctctcctccaagctgcatgtccacaaatctcctctgcttccgtcttttgatcctgccagcttaacactcacctgtgattgaatccgggaaatctctgcagagaaccattaccaccgatatgtgactcaatccttctgtcctgtcccaaatgcattctttcaggccaaactgaattcaacctcctcgcgaagtcctcgacttctctatcaagctcttctttcattgcaggatcaagtccatcatcgaggtcagcatcttcaaaggggtcctcaacatcatcttgcatatctggactttggcatggaagtctagaaatattgccaccatccactttgcatggagtcacatgctccttatttacaggttcagagtcagcttttgggggattcttagcttgatccttccttcttttattctttttcttactcttggcagttttcccacctccagaacctccatccccatttataaaacaaagtaactcatccaaagatctctcatccttttgctcttcttgtacttgaacatcctttagcttctggcgctcttggagctctttccgcttctttgcatacaatcggttcaataagcgaatcctaggatcatcatttatattttttagaggctccaatttctcttcctctgttaagtcatctggtaaatggaaaatgtcacgaatttcctcgggtgtctttccttcaattattcgagcaagagctcgactagtaagatcaacaagtggctttaactgcagactgtctgctgctgaagtcaattcacagagtctttctgtgtctatcctaacaaatttttcatcaaaggacttccgctccttgtttgagcgcccagggacctgatgaaaccgacaatagtcaagaatcaaactcaaactagctggattaactctttccgggagagcaatagcatgatttttggatgagcctgtgccattttttactatttcccgacatatcatggggcagaacatcgcaacctcctcctccacttgctgtatggaaccatcaaaacactgaagccaaatataagtcttcaacgcctctggttttattactgctaactcggtctcggacattgtgataatagcagagttgaatatggatgagaatttacaagaaactcctttctaggtataccaccatcagttgatccagtgcccagcaagtaaataagcaaaaattaccttccggcgggcgcgaacggaatgaggcaggcgctcccagaagagggagacgaggagaggtgaggcttctccggcggcggcggcggcggccggcggcgaggaaaggtgttggttttttggttggtgggcgtccgccagcggtttctagtttttg

SEQ ID NO: 34284 - DNA, 380 bp, Setaria italica
  Peptide Sequence Number=SeqID_100258
gggcgctctccgcgcccgcgccgcacggctacgcagaggaggaggcagaggaaacagaagcgggagggagacagaggcccgtggaccggtccgcctccgcgaactccgccgccgccgccgtcgccgtggacgtggcgtccatcgggcggttcctccgcgaccgccgcgccgtgctgtcctcggccatcacccgccgcatctcgtcgctcaaggagtcctcggcgcctcccgccgcggccgacacctacggcgtgcaggagatccacctgcccaacgtgaaggtcacggtgcgcctcaaggacgcgatcgccgccgaggacgacgacatctctctggctgacagcaacgacgacggtgggtactccttctcgggcggccac

SEQ ID NO: 34285 - DNA, 1200 bp, Setaria italica
  Peptide Sequence Number=SeqID_100259
atattctattagaagaaaacctaaagggtttcttctaatagatgggatgtgtagaaaattcagtacattcctttgaaaactgggcttgttctgcatatgcttgctccatgttcctcgtactcttcctttgtgtggcaatactcatagaattctgggttagatgcagctactgaccccccgaaccaaactgcataactctgtataggatgggcaaccacgttgacttcaataggtctcacttccacatgatgttcggcattagttgcagcaacacgttcatctactattttctttatatcactctgtagtctcttgtggaagtctttaaacatggtagatccaccggataatactatattcttgtacagagctctccttgtgtcaattggtgcagattgaacacatctatcaatcaattgaggtaaaggagtggcgaaatcagcagagtaaatctcaggtttgaagaagatctctggcccgagaaagcgctcatatccgatgtcaattgtatatgggaccccagtctttggtttaatagctgaccaatgtttgatgtacttatcaggcttcttgtcatgcttcttgaactccttgacaatgtctgagcaagtgtagcaatacatttctttcaccttgcgagatatatctaaagaatcctcaggtggcacaagctcacctctttcctgtaaaagctgcgaaacaaactgagttacatcacttccggaaagaggaaaagactttatgctacttccaattacatagccattgaccactggcacgatgtgtgaagcgccatccccaatatcaacaactacacctgtcatatcggacgaaggatctgaattctcatcagaaatacttttcagataggcatatccagcagaaaggctgaggacagattgaacggatatatatagaccagggacattgaaggtctcaaacattatttctcctgtacattcacgactttcaggtgtactgacaggactatctgtaaggaggaaatagtgttcctcaggattgcaacgcagataattgaaaatgcattgctgccaaaatctctccattgtgtcccagtcatcaacctgaccattatgaattggacttcttaaagtgtacagcccactagatctaagacgagatagagcctcatctccaataaaaaaatcaagatcagccatgatgcctgcattgtactgt

SEQ ID NO: 34286 - DNA, 976 bp, Setaria italica
  Peptide Sequence Number=SeqID_100260
atatagcattgcaaattatggtgaacatttagaggcatgttcagccaatgaagaggacatctatgcgacccatgtcatctcattaattgtcgcatcaaattggctggatgtcaaataaaccagcttcaacccaccataccctgacctagtgccatctaggcatctattgcctctgtttactgccatgtagtctactgtagatgcatttcataaaggggaaccaaatgggcaaaggatgttgctgccagcaatttctattgacttctcactttctgttgctgctcctgtcccgttgtgctgtgtgtctccctgctatcccatgagcatcgatgagttacatttctaaaagaggtctagtgttcttccatagccagtcacgagaatcgccactcagcagaggggaaaccttttcccagacttcttcatggtaagcattgacccagttgatctccgcaggtgaaagcaaggacatgtcaataagcttgctctgaattggaacaaaggttagtttctcaaaaccaaggtatgaaattccaccaaacgaatttgccagattaagctcctttatcagaagtaaattctcaatacgaatgccaaatgaattatcttcgtaatagccaggttcattgctgacaaccatgcccttctgtaaggctgtcaaatttccatatcgatagcttatgctctgagggccctcatgtacatttagtgcagctccaactccatggcctgtgccatgcctataatccagtccaatcttccatagagatgagcgtgccagaacatctagcacaaagcctggagttctctcaggaaacaccgcctgatcaatagctatatggccctgcaaaactctagtgaaacactccttttgccatgggagaaggctcaccaaaatgtactgtccttgttatgtcagtagttccatcaatgtattgagcccccactatccaataaaaatgattgtcagttccaa

SEQ ID NO: 34287 - DNA, 337 bp, Setaria italica
  Peptide Sequence Number=SeqID_100261
gattgctggctccaaggcttatcagcaagggaagatctatggaatcgatgcagcttctggagctgctatattagcacttgatgttcgaccaggggaccatgttcttgatctctgtgctgcccctggtgcaaaactttgcatgcttgcagatatgctcggaagcacaggttctctgactggcattgatgttgcaaagcaccgtctttcagcctgtcgtacaatgttgcagaagtattctcttggtgaccgtactcgactctttgttgctgatggaactttgttttccattttgcctgtgaactccaacctgcaaagaaggaagggtcaattggccttg

SEQ ID NO: 34288 - DNA, 413 bp, Setaria italica
  Peptide Sequence Number=SeqID_100262
aggaaaaatgatatatttatagcttgcagttcgggggaaacattggttgcaatggtcattattaaagggtgcccaaggccacccctttacaatacatacacagcttgcagtttttaggaaccattggttgcaatgtcaatattaaagggtgccaagaccaccccttaactatattaccaaaatgggaaataagcgtgcgatttgtgcgacgagtttgaggaccatagaaaaagacatgcatcatgttcttttacaatatccaaataaaagtggatacttctggaaaaaaaaaaggaaaccgctcgacttgcttctggtactaattattgaataacttactcaagaaaagcaatgtacaaattcattctcataaaaacatataatgcttcctatccctttcagacagaaaaaac

SEQ ID NO: 34289 - DNA, 241 bp, Setaria italica
  Peptide Sequence Number=SeqID_100263
cccgtcgggatggccccctcgaggtcgttgtacgagacgctgaacacggccaggaagttgagctggttgagcgccggcgggatgggccccgtcaggcggttccggcgcaggatcaggacctgcagcctggcgagattgctgagctccggcgggatcccgccggagaggttgtttctgctaagatcgagcacctggagcgtcaccagccgcccgatctcggcgggggatcgtgccggtgagg

SEQ ID NO: 34290 - DNA, 482 bp, Setaria italica
  Peptide Sequence Number=SeqID_100264
agtctacgtggcaggacaggatctagtcgaggattgggaaaactactcgtagcaattagagtaggactcgcctagtcgaatccgactagtattctcgtaaatcaaccaacctgtaaacctacccccgacaatataagacgaggcagggacccctccaaagcaattcaatccaaccaacacacaagacgtacggtattacgcaatctagcagcccgaacctgtctaaatcgtgtttgtgttcaccttcgagttcttgatctaggcgaaccccacaaaccaaacactaactcgagcacccctcgataggttgttgagtctaaacaccgacacatcactacccaatattaaagtgcggttgtttcttccaaccgtcatgattgtcttgcaaaaaagtccctcaactttttcgtaattgacccgcagtccttggaatagttcttgatgattttgaaaaaaaggtccccaagctttactgcaattaa

SEQ ID NO: 34291 - DNA, 326 bp, Setaria italica
  Peptide Sequence Number=SeqID_100265
cttttacttgttcacaggacacaaaaactcttagcatgttaactgagagatcaccacaagcatgaagaccagcaaggattaatggaggactgttctgagttggttccagaatttgtgggcttttcatagtacaggccttagtttcgcttacatgttcaccgtggttatccttacatgcatctagcgtgacagctgccaatgtgtcactagaaagaacatgacaggtgacagtcctaggtactgtgagcagttgcttctccacacatttagcagcatagtgcttctttattctctctgcacgagcaattgtaactgatgcatgatgt

SEQ ID NO: 34292 - DNA, 478 bp, Setaria italica
  Peptide Sequence Number=SeqID_100266
cggggttgatatgtggtgatttttatctatgtcaagtaatgacgaggacactactctgtcgttgtagtgcttgacagcaccctttttcatgaaccatttgtggttttggtgtcaaacagtccacttcatcgtacaactatacacgttacattttgcactgctgactctaacataaacatatgccaccagagttggccataagctgtgcaccatctgcgaaccgaatgatatggacttgaagtgtgatgtctaccatttttggcaacccaatgcttctgaaggtgcatcactgacatacacctctagtcctctaagaatccgtttgcttcgagatatgacactacttgatcagccattgatttaggtgaagggcagtccccaattttgcactctatcactatctcacaatcagatggtggttcataaggatcatcaatcccagtaaaccctttgattttgccggcacgggcaagcttgt

SEQ ID NO: 34293 - DNA, 274 bp, Setaria italica
  Peptide Sequence Number=SeqID_100267
tcgcgcttcttgggatgaagagttatgctgcagctatcaagcgaaaaactgaacgaacaaaagcacccatcctccaaggaaaagaagcagggccctgcatcaacttcattatccatgtatttcaccggcagcacagtgatggataagttaggagcatgatccttgtcaggagtagtgacattgatgcgataagcattgatgggtccattgtgctttgacaagccaaggaataaagagccatgtggggtggcgcggccaatgaatggcagcaact

SEQ ID NO: 34294 - DNA, 1165 bp, Setaria italica
  Peptide Sequence Number=SeqID_100268
cctcgcctgtcggctgtcgccgcctctccgtccgaccgccccatccttctttcccttccgcctccgcgtccccaatcctccgccgccgccgttggtctccacagttttggctctaagctattgtgggattcaagaagtacggcaacatgagctactaccaagctacaatgaacaagcctcacagtacactcactgcctacaggccagtagctggtcttggaaggacccacgagctgcttggtcgacattctatgtgcctacattctaccagatcttgcaagctgcaacagaaactgtatccgaggcttgttcttgtttccgcttgccataaaaggcttggtcctgtatatgcctcgagtggaaaagagaactctcagcttgtcaatgaccctttctcaatggaatctttgaacaaagctatggctcaagcaaaaagaccaaggtccttgcaagacttgctgagagagcagatggctaagcttcgagggcaaggatctggtggaaatggaggaaacaaaaaccgatatggaggtagtggtggtggttctgacggcccagaggatgaatctttcaaggattcattatatgagatgatccagattctgatagcaactattgccttcataattgtgtatatccacataataagaggggaggagttataccgccttgctagggactacaccaggtatctagtcactggtaagagaacagctcgactgaaacgtgccatgctgaactggcgtgagttttctgagagcatcaccaagaagaatggcgcacaagaagactactacggaagatcagattcttctgaatccacatggtggcagcagcctcaacagcttgcacgtcgtttggaggagctcttcagaggctatttgcgccctcacgcccaggagtcgtagctctggtgccacactgttttgtcggcctctgaaaaattctggttgtggtaatgtatagatgactaagatgagtagctgcttgaatggaggagcgcagtacgtgaatgcagcttacgtgaatggagtagacgacctgctgccgttggtcgttctcgcctactgttgtggaatacattctctgtccgaggttagtgtaatagcctgttaggttcagaacggaaaggatggggcagttcctgtttggttttttgttagtt

SEQ ID NO: 34295 - DNA, 346 bp, Setaria italica
  Peptide Sequence Number=SeqID_100269
tcagttttcttccacattgcaatgccatcaggttggccaggttccctgagtaacttgtgtttaaaaacattgaaaccagatttcgctttctccacccaagcttctttgatcttgtaaagaccatcatatatgtatatcttgccagttggacaagtcaagtctcttatgctgcgaatgactctaatcggattacctctatgcaaactcctctgcaatgcaaggttacccctctcgtagtttttgatcatccttaccagacatgccctgtccagtgtaaactagaatgtctggatcatcttcggtattatcatacacaccagctgacacgatactaatagccacagga

SEQ ID NO: 34296 - DNA, 1083 bp, Setaria italica
  Peptide Sequence Number=SeqID_100270
ttttttttttttttttttaattttcaagcaactaggaaccgagcatatatattgacatattgtagcgtttgaatgcgctgccgtgtacaccctggcctgaacttctatacaaccatcatataagatgttacagtaaaatgaaacaaagtcattacacaatgttcttacagacaactccctgcccccaaaattcatcaagtaaaccccggtggagggcgccgtgtgacctacatacatcagtctggtaagggcaagcttacaaaaaccgcaaggcacttcaacctccttcctaggtttcaaggccatgtgcagcctcaaactgctagggttggttttcagcagaaagctaaagatcagctagatcattgggcaaccgggcttgaatattccggtccattctctgaagtggttacgctggatgaccctgctgaggtcacgttgctgtatgaagaaccattcctcgtggattttggttggagttccatctctcttttgcctctctgggcctgctgcaggtctttgaccctcatctgctaatctctcaacaatgtcataaactcattaaatccaaggatagccattgcagcaagtgcccatggaggtggcagccagttgttattcctcttatttgcttcctgggcagctatggcttgagtgactgtatattcggtttcagctttgaattgcctccacaaagatttgcactggacagggctgattaaagtcttctcctcgggaaccctttcccatgagctggaggcaagtggatcagacaattggatactcctatctgtagtcccagcaggtcttgcagcatcaacaagagcaagggagagagtgttttctatgttgtcaccatcctcatccaaccgaattgcagccagtgtagccagcaacttcatggaatttgacataaacgtagacgtgcagtaagtataatagcttttatgtcctcctttcctgtccacacccttggcatggagtcagcatcacgactgaataatgttgagaacctgtccttcatgcgaatcaagacccgtccagcttcttcttttgccttagattcaacaacacttcttccag

SEQ ID NO: 34297 - DNA, 3218 bp, Setaria italica
  Peptide Sequence Number=SeqID_100271
ttaaaaggaaaaatttaaaaaataaaagaaaaagtttaaaaataaagaaaacaaattaagttaagaaggaaataccaactttaacctagacttagtacataagttttttttttgttaaaccaaaagcagctcttcgtattatttcgaaactcgtgatacaacgcaatccaatggcagtttcaacacatttacatgcatgtcgcaacaatgcagccaactatagcttgtgtaaaatgcactgctgttttccccctggcctgattggcaaatcttctatacaaccatcatatatcatgttacataaaccaaaaaaatgaaatgaaagtcattctacaatgctcttacaaacaacccccagccccaaaagactcctttgaataacagcggtggccaaaggccacctcatcaccatgcgtctgtttgggaagggcaagcttacaaaaactgcaaggcacctcaatctcctaggctcagccattttatctctaggctcagagccattttgctgcctcaactgctagggttggttttcggccaaaagctaaagatctgctagatcattgcgcaaccgggcttgagtattcgggtccgatctccgaagtggttacgctggatgaccctgctgaggtcacgttgctgtatgaagaaccattcctcgtggattttggttggagttccatctctctttgcctctctgggcctgctgcaggtctttgaccctcatctgctaatctcttcaggatgttcattatagtgggaacaaatttcgtcgacagtgaaaggatggcaggaagaaatccatgttggaattccctgccaatttctgactgcacccaaatggcctttccaacaagataaaccacaaatatgacaagcaggtaaagtggattcctcaacaatgtcataaactcattaaatccaaggatagccattgcagcaagtgcccatggaggtggcagccagttgttattcctcttatttgcttcctgggcagctatggcttgagtgactgtatattcggtttcagctttgaattgcctccacaaatttttgcactgcacaggggtgattaaagtcttctcctcgggaaccctttcccatgagctggaggcaagtggatcagacaattggatactcctatctgtagtcccagcaggtcttgcagcatcaacaagagcaatagaaagggtattttcaatgttgtcaccatcttcctccaatcgaattgcagccattgtagaaagtaacttcatggaagctgaacgagcagttttagtaatagcttttatgtcctcctttcctgtccacaccctgggcatagagtcagcatctcggctgaagagtgtcgagaacttgtccttcatgcgaatcaagaccctcccagcttcttcttttgcctttgattcaactacactctttccatgtttctccagcttcacaagcagttctttctcagttgcttcatcaagttcaaaagatgacacagcagattcaagacctaacacagcagctttcgtctcgcgctcaagaagctttctaatagctggccaggtatcttcactggccgaatctagaagagcttcgactggttctgccagagctttgctaagttgtgcctcatatttggcacaaacttcagataatttagtagttcgaactgaagctacatgtgcctcaatgtcacgtttaagcttatccttcacttttgaggtatcccaattcacttgttgaatagcagcatcttcagatcctttatcaaacttctccaagaaagtctgagtacaatcacgagctgcagcagcgaatccttccttttctagggccttgtcaaaggactccttaaatgcttctaaagttctggtccgcaagtgattcagaagagattgataggcaggattgacaagctgcaagagtttagactcaagttgttgtcttttcgagtttctgacaccttcatcaaaataaatagcctccatgtcatactctgataaacatctatcgagaaggctgctgatcttcttcccaaacccaggacaatagtcatgttgaacagcctcctcaaattgttgccattcctcatcggctgtaaaactggcaactttctcattaccaatttcctcgcaacgtacagtagccaccataactttatgagcaggcaggtcaaggtctttgttctccttaatgactttccaaaattgctgtgaactaaatgaaaaacctgaagctgggacaacaccacgccgatcaccagcaagtccaccaggagcaatagaatgctgaaacctatctcttaaatcagaaacctgctctttgaataactcctctttttcttcataactggatagcgccacaacttgtacattgaaaaattcactaagtggagtttctttatgggcgtggggtttaggaacagcatcccatatcttctgaatatcttcccttaaaattggctcaagattttctaggggtgtccgtgatttgtcacgaataacaaataataatgttgtcttgcgaggactaaacaacctcatcatgacctggaaaactgtcttcaaaagaggcttgtttgcagcctgttctctgccaatgtcatgacaccacatattgatcaacacaatgtctgaaacagccaaagcaaacaaagcactttgcttctcaaaggctgtgtcatcctctcccctctctcttccatcagttccttccaagtccattacaagggtgcatggttcaatgtcttgtgccttcgccaaccatatacctttggttgtctgcgaccttcctttgaaagcatccatctccctaaaattggtgcggaaaagatgattcaaaagtgtacttttcccactactttgcgggcccattattgatacaacagcatatgagagcccgcattcacccaagctaacttccttcatgaagttctccaatccggagacgttgaacaccccatctccatcgatgagctgtgtagagaaacacacatccgccatttctgctcgatcaatcaagcacaggtcgggagggacgggacggatctccaccctacgccggcggccgtcgcagatctggccgcgctctccaacgccggcgcacgggagcagtgcacggggcctggggcggggaggaggcgtggcccggacggagggaggggaaggcccggtgtagcgcctgggttcgccctagccgcgccgacgatgccgcgcggagagacgctggag

SEQ ID NO: 34298 - DNA, 365 bp, Setaria italica
  Peptide Sequence Number=SeqID_100272
taaccttgtctattctaaatttcacattgaagtaacaaataataactgggtgataacatttctacttaaccaggcactgatcctgcacaggtttgcaaagataagcctgaacatgtactgtaagcaagcagtacctctgtaatctgcataccgttccaggatcataatggcatattacctagtgaattgcttaccggccttctatttttccgggggtagcacttgatattttttgctaacataactttcatccattcgtgttattcatgatctttttagttctgtattattggcttgtgtggtcaaagcgcttaggtccaccgttgctgaatggcatgattaccaactgaatgcataatatagtg

SEQ ID NO: 34299 - DNA, 177 bp, Setaria italica
  Peptide Sequence Number=SeqID_100273
gagaaatactctgctgggatgtgtttttttttaattactctgctgggacgtgttaaatactgcaagctgataacatgatgcgtcagcttctgatctccttacttatgcaatggctttctcttgacttgatcttgatatatgcagtgtaatgtttgaaaggctatctggttctcagag

SEQ ID NO: 34300 - DNA, 246 bp, Setaria italica
  Peptide Sequence Number=SeqID_100274
gtcaccccggcgcgccgcgcgtgggccgccgtgtccacccgcgtccgcgcgcgcaacacaggcagcggcggcagcatattgaagcttcacgaggatgtgcagacctgtggctacagggacgtgcaggtgatgttcgagatcctgacctcggagctggaggtggcctcgcacggccccaagcaccatcaccagcgcaagcggccggcgtggacgccgccgccgccgtggcccagccaccggtcgtcg

SEQ ID NO: 34301 - DNA, 222 bp, Setaria italica
  Peptide Sequence Number=SeqID_100275
atctgaggagcaggggtctgtgccttgtcccagtgagctgcaccctggacgtcggagttgacgtggtcgcagactactgggcggccgcagctgcgccggctttcggcatggggttcggcgggtagataatggaggatgttacacggcgagcatgctgggctgcataacatcaggagcagccatcctggtgaagagagatgcttaaggctggttcctcttgat

SEQ ID NO: 34302 - DNA, 348 bp, Setaria italica
  Peptide Sequence Number=SeqID_100276
cggacggtgacagccgcgctgccggcggcgcctttccgcaatcgtcgtccatgctgatggcaccactgggtggactaggagactcgtacaacggcgagctgcaacagcagcagccatggagctaccaggagccgacgacccaattcgaggcgccgtcggcggccacgacgcagcctgacatgctcgggaacggcggctacagcgccgtgcccgcgccggctagcttccgcgagcagagcaaccggccgtcgtcggacgacggctacaactggcgcaagtacgggcagaagaatatgaagggaagcgaaaatccgcgcagctactacaagtgcagcttccccggctccg

SEQ ID NO: 34303 - DNA, 269 bp, Setaria italica
  Peptide Sequence Number=SeqID_100277
cgggggagggggcagggcctccgatgactcgccggagcagttgactacggaggacagcgccgcggaggcgtcgagctgctgggaggaggcgtacttggtcatgaggagcaggatgttgttgcagagcttcttcatctgcccgagctcgcgggtcagcctcgcgttctcgcggcggaggcgctcgttctcctcgcccgtgtcgcccgacgcggacgcgcccccggagccggacggcaccgcctgcgggtggtcctcggcggagccggagt

SEQ ID NO: 34304 - DNA, 294 bp, Setaria italica
  Peptide Sequence Number=SeqID_100278
gtggccttctccccttccactcgtgctcaccactcccactctcctcctccgtctccccaaaccccaaaccccacaccccaccctaccgcccccgccgcgccgccatggccgccggcggccagccgtggcgcgtgatcccgcggcccgtcctcgagaccgtcctccacaaccacgcaatccgcccgcgcgtgccgcagccgcttctcttccacgggccccgcggcgtcggcaagtccacgctcctcctggaccggctcctcccccgctggtccgagaacccccacgccaccgcta

SEQ ID NO: 34305 - DNA, 789 bp, Setaria italica
  misc_feature (23)..(23): n is a, c, g, or t
  Peptide Sequence Number=SeqID_100279
ctgtatcagcgacaacacttacncctttgcagtaatccatttttgcatccgccagcctatcagatttctgattatcagcatgaaccatgtccatattcttgtcctgtgaagttttgtctccatagctatcttttttctcagtttttgaaagtgctccctgcccagatgaagaaactagttcatctggttgcatattttctctgacatttttgtcgagtttctcgagcaccgatgatccattgcctatgtcacttttatcctcaacaggttctgacaacgagcccaaaactttcaaacaagatgacacctctgaaaccacagcaggtttacaggaatcacataatttcttgtaccttgataatatccaatgtctcaaagatggatgcctagagatggcctgcaaatgattgtgatgtaacactcatttgactccaccatagaattctccaaatcaacattatcatcggacgaattatttgaacgaacaatcttttgggttaaggcagatttccttccgtccctgaagactgtccatcaatcttatcatccagagaatcatttgcagcattactgttcagatgacaggtcagctgatttaaaaagtacagcccttctccttttacatcatcagattctgcggaagcaagcagcgtgaaacaggcttctagtatattctctgggaacaaaagaaatatgcatagcaagcaaagtgctcccagttcaaataaactgtcaaatactggttgtttggcattattcaactccagctttaaagtctctaatgcttca

SEQ ID NO: 34306 - DNA, 269 bp, Setaria italica
  Peptide Sequence Number=SeqID_100280
ccattataaaggttagctgcctaagcggcggcctctcccccttgccaccagcccaccaccacccctcgccatcagagagccagagagtgttcagctccagttccagttgctccacgcgacgagctgagctccgctgaagctcgagggaagcgctactctgcatctagcctcgccatggcgtcaggggaagcagagccgctgcagtacacgaccaccgtgctgcgggtgtccatccactgcgagggctgcaagaagaaggtcaagaaggt

SEQ ID NO: 34307 - DNA, 622 bp, Setaria italica
  Peptide Sequence Number=SeqID_100281
aactccttgagttttttttacattctgataggtaacttggaaacttcattaatcaaaactgaaattcgatgtcacctttgagaattccctgcttctgaacttgattggatcttagtttcatactgtacggttccaacagtaccttattatctaagatggtacagtagcaaggtccacgaagacattacagtaccccacgatcacgattcacgagatatacccagccatcaggagatgtaccctctgctcttgaggctctccactgcatccctgatgatcttctccagggagctgaactgcatccccagcgcgatgagcttcttcgaccccacctccgctctgaccagcccaggctgggtatccgtggggaacttgggcactttgtagttggggtagagctcggcgactttggccgcgaagtcgctccagtgagagatggattcgttgcagaggtgcctcccggatgctgatgggttctcgaacaccaggatatgagccaaggcaacgtcttccacgtggactgctccaataaagatatccctgtactcctctgtgcaacctcagccagtctggggtccccctaacggcccctcgggtcacccgctcgtagggaggggctaag

SEQ ID NO: 34308 - DNA, 1349 bp, Setaria italica
  Peptide Sequence Number=SeqID_100282
tcccctacgtctattcctaattttggttccttacttttttcgttgaattaattttggttccttactttgaaagttgaaaccacgtgttttcaaaatggtctgtctcgcaaagatcgcttcaaccccacgcgagagttttatggccatctatctagtcacgattggacggcatggtttatttcttcctcatgagattacgattttggccctctaaaaaagaatcgaagggatgctgcagatggaaattaaaatcaagcagataggcgacacttgagcaagtctttagcttttcacattatctagtgacacccttattactggtttgtacttaactagcgaaggtccaggaagacatcacagtagccagccgtctcaagagatgtatcccctgctcttgaggctctccacagcatccctgatgatcttctccacggggctgatctgcagacccagggcgatgagcttcttcgaccccacctccgctctcaccagcccaggctgggtgtcctcgggcaacttgggcacgttgaggttggggtagagctcggcgactttggcagcgaagtcgctccagtgagagatggactcgacgcagatgtgcctcccggacgctgatgggttctcgaagacaaggatatgagccaaggcaacgtcttccacatgaactggtcccatgaagatatccgcgtactcctcggtgcaaccttcgaggaggcgtagaaggatggacatgctagaattgatggttggtggaatcatcgggcccatcactgtccccgggttaaccacggccacatctactccgtcctcctctgcaaacttccacgccgccttctctgccagtgtcttcgaaacagagtaccaaagcccgttcttctcgcagtagtcgatgtcagtccagcagcgttcgtcggggacctcgccggccggccaccctgggctgggcatgatggccgagctggacgaggtcagcaccacccgccgcacgctcccggcctccttggcggcgcgcagcacgttcagcgtcccttccaccgccggcacgatcagttgcttctgagggtcgctgactgggtcgatggtgcatggggaggcgaggtggaagacgcccgagcagccccgcgcggcgtcgaggatcgccgcgcggttgaggaggtcgcagcggaagatgcggaggcggccctcgccggcgccggcggcgagcgcgaggaggtggtccgtctccgccttgtcatctgggttgaggacgccggcgtggacgttgtagccgcggtcgaggaggcggcggacgagagtcgagccgatgaagccgctggcgccggtgaccaccaccgttcttccccctttct

SEQ ID NO: 34309 - DNA, 747 bp, Setaria italica
  Peptide Sequence Number=SeqID_100283
caggcgcagggggagggagaaggagagcgccggcggcgagtacctggagctgaggagccgtaggctcgagaagctgccgccgccggtgccggccgggaggaggtgcggcgggaagaaggcggcggccgcggccgccgccgctcaggaggaggcggaggcgtcgttcggggagaacatgctcgagctggatggcatggagaggagcactagagagacaacaccttgcagcttgattaactcggagacgataagcacccctggatccacaacaagacccagccattcttcccaccgcagggtgcaagctccagtgcgcaccatctcaatctcgaaggagttgaatgagttcttcggtgccgcagagcgacggcaacaacaggctttcattgacaagtacaactttgatcctgtgaatgactgccctctcccaggcaggtatgaatgggtgaagctagactgatagattttcaggacaagagagcagcagcatggatctctcctccgctccctccaccaccgcagtgtcgtggcagtggcgcataccatcgcgttagctttgtttctgttgtaaaacttagggttagcctgtagccttaatggtcctgtgtaacaatacagaactgatgctgagttacaacaccctgatctgatctgatttctcaacttcaggtgctacaacagatagacacaggacaggttaataactgtgataaacatcattatctagctctacttcattaatccagc

SEQ ID NO: 34310 - DNA, 595 bp, Setaria italica
  Peptide Sequence Number=SeqID_100284
gaggtggggagtgctctcgatttctcggacgccgccgccggcgccgtgttccccgtcgacaccgatgaggccgtgcgggagctggtggagaaggagacggaccacctgcctctggagggctatgcggagaggctggagcacgccggattggagtcatcttggaggagagacgccatggattggatttgcaaggtccattcctactacaactttggaccactcagtctttacctcgctgtgaattacctggatagattcatctcctcgtataatctcccacatgacaagccttggatagtcagttgttgtcagttgcttgcctatctcttgctatcaagatggaggagaccgtggtccctcttcctgtggaccttcaggtctgcgatccggagtgtgagtttgaagcaaggaatattgggaggatggagatccatgtcatgaccaccctgaaatggagaatgcaggctgtgaccccgtttgctttcatcagctacttcctggacaaattcagtgaagggaagcctcctagttttgcactagcctcacggtgcgccgatatcatagttggcactctgaaaggctctgcattcttgtc

SEQ ID NO: 34311 - DNA, 491 bp, Setaria italica
  misc_feature (445)..(445): n is a, c, g, or t
  Peptide Sequence Number=SeqID_100285
cctacatactgggaccggataggtacagctaatgaaattgatgatactggagctgacaaatcagtggtgacctcggcaactaatgcaaagggcacttcttctgcatttgtacattgatttaatccttcaatattcgccaaccatatcttcacacttccgtctgagcatccagttgctaaaagaagcgaggattttgaagagcccgcggaggaaacttcccaggttatggcactgacccatgatttatgagcttgcagaaccccaatgagaattggatcactggtaaccacgccagcatctatcgtgtagtattctggcttatgcagtttccaaaaagacacatttccagatttggagccaacagcaagaatgcaccaattgctcgactaacaagagttccatcacttgatgacacaagtggagaccatgcaacggacgagggaanacagatgtgcatcacgacgagcatactgtttgccgtgataagagga

SEQ ID NO: 34312 - DNA, 264 bp, Setaria italica
  Peptide Sequence Number=SeqID_100286
ctccttgttccttttcgtttcgtggacgagggagggggagcatggaggaggaggaggcgactgacgggcgctgaacggcggatggcgcgtcggattggaggcggccgagctgcttgggggattccgagctcctcgggaggggatcgaatgcggagcctgctcggcggcgggttgtgaggagctctagtgccagtcggagtcggtgttcttggcggcttcgtcagctaagctctccctttattcagtttcagtcctcattgcaag

SEQ ID NO: 34313 - DNA, 1728 bp, Setaria italica
  Peptide Sequence Number=SeqID_100287
agcctggggggcgccagcctcggcatcctctgcgccggcctcgtcatcgtcatcgccgccgcgtcgctgctcctcgcctacttcttctggcggtacaccgagaagggcaagggaggccaccgccgccagaggcgcgggggcagcgagtcgggcggcgccgccgtggaggacgggagctggtgggcggagaggctgcgggcggcgcacaaccgattggcccccgtctccctcttccagaagccgatcgtcaaggtcaagcttgctgacctgatggcggccacgcaggacttcagcaccagccacatcgtggtcgccggcagctcacgggcggggacggcctaccgtgccgtgctacgggatgggtctgcgctgacggtcaagcgcctgcactcgtgcccgctctcggagaaggctttcagagcagagatggggcggattgggcagctgcggcatcccaacatcgtgccactgctggggttctgtgttgttgaggatgagaggctgctggtgtacaagcatatggagagccggggctctctcatcggtgatgaagaagccaggggaagcgcctctggattgggcgacacggctcaggattgctgttggggcagcaagaggccttgcatggctgcaccatgggttccaggttccgcagattcaccagaatttgagcgcaagtgctgtgcttcttgatgaggattatgaggctcggatcacggatgttgggctcaccaggctggtccggatggcacctggcgagggtggcgatactagtccattcctgaatggggactttggggagtttggctatgttgccccagagtatgctagcaatccagttggtacaatgaaaggcgatgcatatgcatttggagtgatattgtttgagcttgtgagtgggcaggaggctgctgctgtggtaactgatgtgacgggcgaagggttcaagggcacattggtggattgggtaaatcagctcaaggcttctgggaggatcagtgatgttgttgataagcaattgcgcggaaagggccatgacaaggagattgatgagttcttgaaggtagcttttgcatgtacccagcctcgtccgaaggagaggtactcaatgtatcgggcttaccactctctgaagagcattggacagggccgtgatgtctcagagcagtttgatgagttcccgctggcctataacaaggaagattctgacaccatgtagctgatgccgattgcgcattggattgtgaaaccttttggtgaggctcaatgatgctatacagccttgttatgacaggatcagaggcataatgattggtaagccaaccatattgaggcaccaaagttatcgctggatgccaggtggtcaatttgatcgttgcatcaactcgggatgcgataatcacgtaagctgtaagatcggttcgcaattctgtatctccttttcagttaccgctagtgcttgtagtatctgtatggaactgtaattcttgatgtgcctaaatcctgatatcgcatttcaatgttccgtcttggaacaaccagcatgctgttgagtcattagattggcacttaaagcttcattaccttaattggaatcttagcagttagtatcatctgggccttgggtagttagaaacgttctatttcttatgcttaaactgtcaggaagctgcatacccatgagcccagatactgtagctataaatgttctgtttgaaactttgaatg

SEQ ID NO: 34314 - DNA, 611 bp, Setaria italica
  Peptide Sequence Number=SeqID_100288
cccgtccccccctcgatgatggtgcttacatcctgcattcaacaatcagaataccgactcatctatccagtcctcagactacccacgaaacaagtgtgtctgatctcgcagcagcggtcagtggatgaccggcttcagtgggtgcgctcgtagcttcgacagatccaaccttgcatccaggtcttcatccacctcacccacaacgcttatgttgtcacccctgataatgtacaaaccaagaacaagttgctggactccctcctttgtcgaatagaccctctcgtgggactcgtcgaggataatgttggtggcctggtcaaatcctctgagcgtgcccacgatgttgcggccatcgttggtgatgacggagatgacctggttgacgagagactcgagcgccgggcctccggacgccatctgcgctaccgaggaaggagattaggggccgccgccgccgccgccgccgccgccgccgcctactactactgcctcaggcctgaatcctctccctcgccggagttggatgcggcggcgtcgatggctgcgatttcggacgccaaaaccctagcccctttcctttcttttctctctctctttcttttcgtattttt

SEQ ID NO: 34315 - DNA, 149 bp, Setaria italica
  Peptide Sequence Number=SeqID_100289
tcgcttagcaagtcatggcctttagaatttatttgttcgtgcaccatcctgcacctttcagaaactattaattcggcaggccttttgcttgttcctgattttgggtaaagtagctagaagggccactgactttggcagccccttcgatt

SEQ ID NO: 34316 - DNA, 286 bp, Setaria italica
  Peptide Sequence Number=SeqID_100290
acgccgctctcggccccgagctcacgtacggcgccatgaacccgtgcacccctctcacccaccccaggtgcccctcctcctcctcgccgccggcgccgccgtgccacttgacgaagtactgcacgttgtacaggtaccctcgccgatgcgcgtacggtgttgcggactccggcgtcgcgcccatcgcgccgccctgcgggtcgatgtcgatcgaacccgcccccgtcctcgacgatcctcgcgagcaggccccgtcaagccggcggccgggatcggggaggtcagg

SEQ ID NO: 34317 - DNA, 465 bp, Setaria italica
  Peptide Sequence Number=SeqID_100291
ttacacgctactgctcaggcacgtttcagccgaaataagatctacacactacatgcttattatacacaggttttctgaatgcaggatcacaagattatagcctatacagagcagaaaaagaaaggtaacatgtcaagattcaaaagtgtctagctatctgactctacggtttcaggtttatttctctgttgtcctggtgttctggcgaagtttctgcttcgcgtaagtcagtttcagttcctctctgttcaggaataggcagttgtgaagcagctccagaactgccatcctgaacctgatatggtgcatctgatggtcctacttcacacaagtcagtttccatccctagctgctcaggaacaggcagctcgagggatccttcagaactgccgcccagtgcctgagatggcgtatctgatgcttctgctgcatgctaagtttatttcccacccctccctcaggaac

SEQ ID NO: 34318 - DNA, 377 bp, Setaria italica
  Peptide Sequence Number=SeqID_100292
ccgcccttgcccagcttgggcatccgcgacggcgggagcagccgcacctcggcgctccggcggggcggtcgggcggcgggggcgccggtcgggacgggtcgtaggggagcgggatctcgccgcacagccacagcgacgcggcgaggtcccccaggcgggccttctcgtccgggtcggccgtggagaggatctgcagcgcccagtccaccagcgtcttgggaggctgctggtcttccgggacgccgctgctatgtccgccggcgtcggctgtagcctccatctgcagtagcacacgccgcggaacgagtatcggagtttaccggcgccgccgccgctggcggcccgcagtaccagctgcctaggtttgtttctttgtt

SEQ ID NO: 34319 - DNA, 527 bp, Setaria italica
  Peptide Sequence Number=SeqID_100293
tttttttttttttttttcgttctacatataaaacctcttctttgtaaggaattcttttgtacaatttctgacgctccgcagtgtatgcacagactcgagttatttacttgttactgcatacagtactaatcaagtaatcatacacggaactaggaaaggttgcatttttaccttcccttgtggtaccacaccaaacaccaacctcacccctccaagcttcaaagttgccacttttatccggtcacttcatcgccgccgccgtcggcgtcaaccggctcaccgtggcatctcgtcggagctgacgccggcggccgatggcccggaccttgccggagggtgctggcagctcccggcgctgaaagaaactgaccgccctgccccgatgccggtcatctccatggagtctgagaacttcagaagcctcatgatcttgccgagccccgtcatgtccccctcccgcccgctgctcgacgctggcgcccggaacgagacgtccggccacgcccgccgcggcagcgccaccatgg

SEQ ID NO: 34320 - DNA, 715 bp, Setaria italica
  Peptide Sequence Number=SeqID_100294
tagaaaggaaattgatatccgtcattgaagatccttctctgctgcatcttctgtaagagcggaagcagaatttacagtttctagtctggaagaaactttgattgaagttaacttgatccttgacatattgtttcttgctttctatgataacttctcaagatgtaatggtggattgtggataagtttgtgttcccttttcaaggacattctctgtggttcttatgatgttgggaaatttgctgtatctgttgaggcaaagaattcgtttcattatgctaaagctcagcttcttctcattcttattgaaactttggactttgaaaatcttctcagaatgattcgggatgaagttcctctcagtgtggggtgttctacattttctgttggtgatattcttgagatggatgttgaaatatcaaaaattcctgaatttttaatggtagaatcaggaccacttgtactcgcttgggcagtttttctgtgcctagttctgtctcttccagaaagtaatgccaacttggaaattgatcatacactgtatgcccgacgggcttttgagtttgcaccattcaattatttactaggagttctttgctcaagcatcttccgggagtcagatggtcctgtttctggttatcgaggtatattgcgaacatttatttcagcattcattgcttcatatgagataattacttacaaggtactaagtaaagta

SEQ ID NO: 34321 - DNA, 720 bp, Setaria italica
  Peptide Sequence Number=SeqID_100295
gttccttctcaaggttcgctccccgccgcatccactcccaacctccatcaacgacgctgaggcttcccccaggctgaccagttagattcatcgccttccgtatcgctggcctcagccttcctctctgccaagaaggtgggagaagcgactcgcgcacgcgctcggcgcagaaggcggggccaggtacgcagaggcgagcccgacggccggcgagaaggtttcgaggctcacgaggctgccgccgtgctgaattgccaaacccggctgtcgcttgagggtttttggtcgagtggtgggggaagcggagggttatggctgcgccgaggaagggaacagcgacgccgctgggcgccgttttctcgccggaggagaccaagagggccgtggcgagggtggccgagtctatcgcggaccgccgcgccgagctcgggcgactgcagggcttcgtcgccgacaacgccgccctcgtctccctcgtcaacaggctccccgatgaactctcgcacgaaatcatggttccctttggtggtgccgcatttttcccagggcgtttaatccacacaaatgaactcatggtgcttctaggagaggggtattatgcagagagatctgctaagcagacaactgatattttgcataggagggggatggagttggaagctcaagtggaagtgatgaaggcaactatctctagaacctttagtaaagtactagaaagaa

SEQ ID NO: 34322 - DNA, 435 bp, Setaria italica
  Peptide Sequence Number=SeqID_100296
gcggcggcggcgaacggcggccctgacctccccgcgccccgttccgtcagcaagccgccgcctgggaagaagttttccaccagagcagctggcggcaacaagcccaggaagccggcgccgccgctctggcagtggcaggctgccttcttcgtctccttcgcgctcaacgtcgggctcttcctccgcacccacccctacgtcaacagcacggtccctccgcaccacgaggagcaccagcaggcctgcctgatgcatctcgacgctgcagacaacagcggcaggagaacggcgaggcagcaggaggagcccgtggcggccggggcgccgtcgacgggcaagccggcggtgacgccggagtccgtgatcaacctcgaccacggtgacccgaccatgttcgaggagttctggcgcgggacgggttcggcggcggagatc

SEQ ID NO: 34323 - DNA, 963 bp, Setaria italica
  Peptide Sequence Number=SeqID_100297
gttgtcagcgtcatgtcaacagagccattcaagatgtagtttccttgctccggtgtacaaggcagagcctaggagtcatggcatcaagcagaggggccctgattgggcgccttgtgttgcatgaaccaggtgaagaacaaattgactgttctattcttggagcttcaggacatgcaattactggagacctgaatgtattgagcaaattaaatttgtcttcagatgcccggtatatcattgtagtggagaaggatgccatattccagaggctagctgaagaccgcttgtataatcagcttccttgtatcctgatcactgctaagggatatcctgatatcgccactaggttctttttttacctcgaatgtgcatgagagttgcatgtcattgaattagagacagcataagaaatgccactttgtttacaaagaccctagaggcaaagaaaactggaagaacaaagaaaaaaagaagaagaaaaacagcttatctagtagagctcattttcttcgatataagctccatctttttgttgataatatttggttatttggtatacttattccatttatctttgctgttatgatacaggtttatcttgcatcgattgagccagacttttccaaatatgctgattttcgcattagtggattggttaagccatttcctgtgctgatcactatatagtagagatgacagatattcctttaaccatttcagataacatttattttccaattttcaggaacccagcagggcttgctattctgtgcacttacaaatatggaagcatatcaatgggtttggagtcatacagatatgcttgcaatgtgaaatggcttgggctaagaggggatgatctgcagcttatccctgatcgtgcatttcaagagctgaagccacgtgatttgcagattgccaaaagcttgctgtcatcaaagttcctacaggagtctcacagag

SEQ ID NO: 34324 - DNA, 1384 bp, Setaria italica
  Peptide Sequence Number=SeqID_100298
agagagacccaagctactccaagcggagccagagcccaacccagcccagcccatttaccacttcccgcaccagtggcggctcgcctccgccgcgaaccgcagcgccttcatcgatggcggaggcggcggcggacgtggcggcggcgtcgctgttcggtgccgaccgccgcctctgctccgctgacatcctcgcgccggctgaggtccgggcaaggatcgaggtggcggtgcttaacttcctggccgcactcgcttcgcccacctcgccggccatctccgtcctccccctgattagccggagctctgccaactgcagcctgcgcagcgggttgctgagtgatgtttcgtcgatttacctctcatacgccttctgcaagaggtccctgatgagagaaagcaatggaaaggcgttcgtaagagtatggaaggtcatggagatgtgctacaagatcttgggggaggggaagctggtccaccaacgggagttgttctacaagctcctctcggactcgcccaagtacttcagttgtcagcgtcatgtcaacagagccattcaagatgtagtttccttgctccggtgtacaaggcagagcctaggagtcatggcatcaagcagaggggccctgattgggcgccttgtgttgcatgtgtgctccatgatatatttaaatatgtcctaattattggaattatctgccgagggaatacatgataaactcttgtttatcttttcacaaagcacctaaactgcatgtttaaactaccttaggaaccaggtgaagaacaaattgactgttctattcttggagctacaggacatgcaattactggagacctgaatgtattgagcaaattaaatttgtcttcagatgcccggtatctcattgtagtggagaaggatgccatattccagaggctagctgaagaccgcttgtataatcagcttccttgtatcctgatcactgctaagggatatcctgatatcgccactaggtttatcttgcatcgattgagccagacttttccaaatatgctgattttcgcattagtggattggaacccagcagggcttgctattctgtgcacttacaaatatggaagcatatcaatgggtttggagtcatacagatatgcttgcaatgtgaaatggcttgggctaagaggggatgatctgcagcttatccctgatcgtgcatttcaagagctgaagccacgtgatttgcagattgccaaaagcttgctgtcatcaaagttcctacaggagtctcacagagctgagctgatgctgatggtggagacgggcaagcgtgcggagattgaggccctctactcacacgggttcgatttcttggggaagtacattgcgagaaagattgtacagggc

SEQ ID NO: 34325 - DNA, 672 bp, Setaria italica
  Peptide Sequence Number=SeqID_100299
aatttgatcccaaaatgtcaggagatcagcaagactggagggaatgaaatgcacttcaatccttcagttctttacacgtgcctcaaattgcaacatcgtctttagcaactatgtttgcaactgcatcccaattatatgcactgagcactgcctgcaagttcttcccaccaagatgtgaggctgactgtcgtgctggtcgcctggtgccttgtatggattgtgctttgacagtctgctcgtgccttctgccacgtaggtggctctccaagtcagactcagatgtacagttagccttgcagatgctacaattccatcttgaggtgggtctttggtccatgttaacaagctgtacctctttcttttcatacagctcaacttccttgaacccactttttccttcactttccttgctttctccccataaaacttctgcattttcttggtgcctcctgccctttaggtgattatttaggtccaactcgcctaaacacttaacttggcaaatgctgcaattccatgcagttggattgtgctgcatgccaatgctagcctctgctgttgatatcctctttgctccagcagcttccttagtccattcaaactctgctaaatttgactggtgccggtagccagcacaatgctcctcgaaagagacttcactgtatgtattca

SEQ ID NO: 34326 - DNA, 190 bp, Setaria italica
  Peptide Sequence Number=SeqID_100300
cggggatggagcaggagctggtgccggtgccgtacaaggacctcaagaccatgggaagctctaacagttcgttcaagtaaggcttgaatcaacgagacggttggtgcgacggagtggagtggattgctcgtcctcaggttggatgaatcgcacaacgtgaggttgatcagaattcagagctctgctcctt

SEQ ID NO: 34327 - DNA, 229 bp, Setaria italica
  Peptide Sequence Number=SeqID_100301
cgcacgtgcaagctgcagcagcgagcgggccgtcagctgctaggcggaccagcccagcacgctactcctagcggtccagtccagcacgggccagagcaagtgcagctagcgcaggagcttgcggcctagcagttcacgcacggcccaagcaggtgctcgtggcccaggtagcaaggtagagcagcagcccagcttgcacataagctggcccaagcttcaaggcagcact

SEQ ID NO: 34328 - DNA, 474 bp, Setaria italica
  Peptide Sequence Number=SeqID_100302
tgagcggcaggtggggtacagccacaccagtgcctgctacgacgagctcgcggaggcactgagttttgaggaccgtgctaggaccgctgagaggctgctgagggagattggggaggatgaccgtgaggtgctcggcagattgctcaatgtgcttgtgcggaaatgctgccgtcatggagcatggaccgaggcattggaggagcttgggaggctgaaggattttgggtataggccattgggtgcgacctacaacgctctggtgcaggtgcttgcaacagcagggcaggtggatatggggttcagggtgcagaaggagatgtctgaatcgggattctgcatggataagttcacagttgggtggctttgctcaggctctatgcaaagaggggcgatattcagatgctcttgacatgatagagagggaggatttcaaacttgacacagtgttgtgcacccagatgatcagtggactga

SEQ ID NO: 34329 - DNA, 364 bp, Setaria italica
  Peptide Sequence Number=SeqID_100303
gggcggcgcgcagctgcggtggctggacggcgtcctccgcggcgcggcgcggcggcgggagagggtcgtggtgtgcagccacctgccggtgcaccccggcgcggcgtcgcccacggggctcatgtggaactacgaggaggtgatggccgtggtgcggcggcacgaagggtgcgtcgtggcgtgcctcgccgggcacgtccacaggggcgggtacgccgtggacgggtgcggcgtgcaccaccgcacgctggaggccgccgtcgagtgccctcccggcaccgacgcgttcgggcgcgtcgaggtgtaccccgaccggctcaggctcgtcggatccgacaggatggccagcacggagatgctgctg

SEQ ID NO: 34330 - DNA, 545 bp, Setaria italica
  Peptide Sequence Number=SeqID_100304
ccgccgcggttgccgtagcccccgccgccgccaccgccgtagccggcagcgtggtgcccagccactgccagttcttcccggccgccgttgaccggacaggacagagcacgtggaacgccgccgccgcgccgctcgtcaccagagagctgttctaagaacggtggatcggatccatcaatcgatctcgatcgccatggccgcagggtgatggatcgaccgatgatggatgattgattagaagaatgaacacaagttctgattaggatctcgcaggtggtggccggagtaattaattaatcagttaatcaggagaggagattttcttttttcttttccctttttttttcttttggattaattcatcagttgggtttctgaaaacaacaacgacgacgacgaacgaacaacaaacaaagatggctgtccgctttttcctggacggcgtgtaaaccagttcacctaatctgctggttggtgaaataacagcgtgattgattgtactaattgattggtgaagaaagttaatgcaaatcaaatctttaact

SEQ ID NO: 34331 - DNA, 536 bp, Setaria italica
  Peptide Sequence Number=SeqID_100305
cggtacgtacgttctttacttacaacacacactttgacagtataagggtttactaaacttttctttgaccagaattagttttaccagaacaataacagaaatccacattagagtcaacatgaacatatttccagcaactttgagcgtaattaacttttacataaatacataacactggaactaatatcgatccagcccaacagccaaaaccaggcattgaggctcagcctgacaccaacttcacaacaatgataagaacattaagggctatcaagggcatcctcagaaattgcgtagcgtagataagacccacgatctggcccttcaacgactttgtttgcccatttcctgacacctcagacatgctccatcccctgggagcaagaaaacgatcttcgttcagtattgccaacgcatttgcgagaagcaaaaaaccctctagcaacgtccacagtcccattccggcgaatgaagagcgagagcggccgcggcggcgggacgaatggcgagcaccggtgaggcgacgcaagcagtcg

SEQ ID NO: 34332 - DNA, 286 bp, Setaria italica
  Peptide Sequence Number=SeqID_100306
cgacctcccgctgccgcctcccccgccgccgcccgcgtcgcggcacgagccggagcccgccaaggcgcaggcggcgtcgtccaagtccaaggccagcgtcttctcccgcatcagcttccccggcgccggcgccggcggcgacgccaattcctccgacgccaagcgcagccgaagggcctcctccgacaagccccccgcgcactcctcttcctcctccaagaagagcggtggcgccgcggccgaggacggcgacggccgccaccgccgcggccaccgccaccaccag

SEQ ID NO: 34333 - DNA, 612 bp, Setaria italica
  Peptide Sequence Number=SeqID_100307
ctttgaaactacggcgacaacatcaacaacatctgtcttagaaactactccctccgtttccaaaatttataaatttcatttccaactttctctaagagtcaaagcagtcaaagcatttttatgttcgaccaaaaattataatgaggatcacaagggttaattaaaataaataaatacactataaaaatatatttattaaaagaactaatagtatttatttgatatcacgaatgttaagtaatttattgtataaatttgatcaaacttgagatgttttattgtaattcggaacggagggagtagatcccgcgccttactctactgaccaagcaccaacctaaccgactgatttcctcaccgcgtggtctcactctcacctcaccaaccttgcagcatcaccgcctccgcttcctggagagtatcgcagccagcctctccttcgcggtggtgaagcccgtcgggtgctgctgcccagcctgcccagagcgtcgcatccttttcctacgcccggtcttcctgccggcgaggcgctgccgacggatctcgggatcggcccagcccctgccccattcagaggcatcagagaacggtcctttggtatttgtttctatt

SEQ ID NO: 34334 - DNA, 765 bp, Setaria italica
  misc_feature (716)..(765): n is a, c, g, or t
  Peptide Sequence Number=SeqID_100308
agaaaccttccccttccctcccctccccgcctaccctagggtttcgcgcgccggccggggggcatggcgtacgtggaccacgccttctccatctccgacgaggacgacctcgtcggcggcgccgtcgggggcccgcgcggcgcgcccgtcaaggagatcgccttcgccgccgcgctcctagccttcggggcgctcggcgccgtcgggggcctcttcatggcggccaaccaagtcggaggggaccgcgcgcacggaatcttcttcatgattctaggcattgtgatgttcatccctgggttctactacacacgaatcgcgtactatgcatacaaaggttacaagggcttctcattttcaaacatcccgcccatctgaagaagcagtgtcattggtctggagtttagatcaaaactgcaaggaccctgctgaagtagtggcattgcctcattggcctggagtttagttcaaaactacaggtgctctggtgatgatagtgtagacgcccatctgttacacgtttgtgtctatttcttctcaacctcaaccttgtactgggaatgaactggtggatgtacagataagtagagctgcatattatggtgtggccacccagtggaacgttgtgtgatgtcaaattactgtactgtgatactttaccccttgattacacagaaccgttccataatattcgcaagacttcgttccagttcaaaatnnnnnnnnnnnnnnnnnnnnnnnnnnnnnnnnnnnnnnnnnnnnnnnnnn

SEQ ID NO: 34335 - DNA, 498 bp, Setaria italica
  Peptide Sequence Number=SeqID_100309
caagttcaatagtgtactcctgaacatttttaatgatacctagacttgtgaacaagtgcacgtacggattaagccgaagaagaattcctcttatcaagcgaatcaaattttcatcaagattaggtgacctatttacacggtgagcaatactatcatccgagtcgtaaaagtagagctgcatatgttgtagacctttaccacttcgcgtgagtggatcaaatttatggtaaagctacccatgcgccttaaaaaattacacaccagaaccctttgcatttgctaaacgctgatcaatggaaaccccaaagctagtgaaagagaaatgtgagttgaagtaccgtatgtgtttcctgaaatattttgcatccctgatggtttgactggtaaacaactggcgcagctcatgcggcactttcaggatatatatgtggaccttcccttgcctcaaagcgtgatgctttttaggaagctccttgtacactccataaaatgggttag

SEQ ID NO: 34336 - DNA, 565 bp, Setaria italica
  Peptide Sequence Number=SeqID_100310
acatcaggaaaaaaccgccatctgcaagacatttaaccctagaatcctttggtagcagcgcatgaaaagcatcacagtgaatgtaagtggctagccaccagcagagcatcctgttaggaaagcctgaaagctgtttagcatttctgagccccttgaatacaagttcattcattactgcctcccagatacgctgacctctgaagaagaatcttgtgccattctgcaagaattcacagaataagactcgttatacacactgactacaaagcagatttgatggaaactaagcaagtcggacctgcaactcatctttgacgttcccagagaatgacgccccatcgcaataccttatcttcactttgttccagttgtaaaaatcaggattctgggatttataattgctcaagatcccggtaaactcaacctggagttccatgtaccgggatgagcccaaaatcgatctctgacgtgaggcacatgacttgagattacggcaccagcctccaccctccaagtggattagccagctttccgatccactcccaaagcctctccgcagatggta

SEQ ID NO: 34337 - DNA, 623 bp, Setaria italica
  Peptide Sequence Number=SeqID_100311
tggacaatgcagagcttcccgtcattggtgtccccagtcatgtagaggtggccttgcccctttaagtcctcgggcagatcgatgaaggagaattgcagagtcgcggtgtccagaagcgccttgtaggcatgccacgagtgtgaccagcacaagaacccgttcacctgcctcccgccaagaagccagtacttgccgctcgccggctgtgccggcgcagggtctgaccagggcagaatttgccacttcttggtggctgacgagaagacggcggcgcgcacccgcgacttgtcatggcaggtgtagaccacgcggaacgacgacctgtctgtggcttcatcgtcagatgggagcaagaagtaactcttggggatgaacttgccgcggtggcctatagagatctcgtcaggcggcatggggacgagatccagagcccgggtgaggggattgtaggaggcgatctgcttggactcccagttaaggaggaggagacagccgccgcggcactcccttatctgccacccggggaagacgtcgtcgtggaacgggacgcgggtgaggaagacgtcgatgccgcggacggcggcggcgaggtccggatcggagcggcggcggatgggcgtgaa

SEQ ID NO: 34338 - DNA, 441 bp, Setaria italica
  Peptide Sequence Number=SeqID_100312
cgcgtcatcatcagctggaggccggcgcctgcggctcgtgggggtcgcggacgggatggacgacggagaggaccgcgacaacctgctccggctcaacgccaccatgaaggaggccatgctgccgcagctggaggctctcctcgacggcgaagggggcgctgctggcaaaggcctgggcagggtgacgtgcgtcgtggtcgacgccggcatgtcctgggcgctggacgcggccaagcggcggggggtccccacggccgcactctggccagcgtcagcggcagtgctcgccgtgatcctgggcgccaagaacctcattcacgatggcgtcatcgatgacgacggagctccggttaaacttgagaacaattcgttccgtctggccgagtccatggcgccaatggacgcgaccttcctctcctggaactacatgggcaaccgcga

SEQ ID NO: 34339 - DNA, 532 bp, Setaria italica
  Peptide Sequence Number=SeqID_100313
gtttaggtgaaattagtatatttagagagtatcacttaatcctggcttagatagctaatgtgttgagcatacttatttgtttatgtttaggtgaaaatagtatattagagagatcacttaatcctggcttagatagcatcggagttcgtgtaccggatctggatttcatacgatccattgctcgtggagctggaagtgcacttgcacttactagtgccaacttaagcggacggcctagtagtgtcagtgtcaaagatttcgaggatttgtggccacattgttcatatgtctttgatggtggaatacttccttctgggcgtgctggttcaacaattgttgacctaataacaccaggagtctacaagatattgagagatggaaggtaagcagtactagtcatatcaattccttgaaactctaatgaaacccccctcagcaaagtgagcgatggaagcataaaactgttttttaccacaatgtttagatagaataacctttgacatcaaatttgcagttcaagggaggaaacaac

SEQ ID NO: 34340 - DNA, 639 bp, Setaria italica
  Peptide Sequence Number=SeqID_100314
cttgtagcctcttcatttgtggacttggtcttaatttacagatacacacaaactgttcccatcagcagttggtttgtcctgttgtgtgcattacagatgtgaacatgtagttgccgtgagtagttttatttattagacctgcaacaacactaatgtaaatgtgtaatagttggcatcatcagaaacaatccacaccgcaggatcctgctcttgtgtacatggacttccttattttgatagatttttatttattcctagtcttcgtggaagctgtgatgtagaacttgtatatttagtcatgtgcacctttcttgatctggttaaatgacaaacataaattcaattcatcaaacatatgtgaatcgcacgagaatcataattcacaactcaatagacaaagagaagcataactaaggtagcccatatgttgatctacttatcttgacgtataatttggcgttacaagacactaataaagtactatttaattgtgaaaagaacaacgaattttgtcttctttctattatttctattattcgtaaactagtttctagtctatttatttagttttgttctttattttggtttcttttaatttttttaactttttatttcttccttttcttctattttcttaaa

SEQ ID NO: 34341 - DNA, 213 bp, Setaria italica
  Peptide Sequence Number=SeqID_100315
ggatctggcagcaccggcggggtgtggtgatagcggcggccgtcctccgctccggcggccgctgcaaccgtcggcgactggcccgcggctcccatttcacctggcaaaccctaggtcgtcgccatggtccgccgccggccgctggtggcggatctgccacccctggccccggatctaagcgtccccggcccgggggcccatcctcgacgacga

SEQ ID NO: 34342 - DNA, 273 bp, Setaria italica
  Peptide Sequence Number=SeqID_100316
cttctgtgagttctagtccttatccgcctcgccagtcatgaactaaatccagctttgccccttctctgcagcaacttagatcctatgcctactcacatcccagcgccaccgagcatgccgctccacaggcccagcacgcccagcgagctgatggcgctctctagcgcgcggctcgccgtaccagtccagcgacagcagcctctccgctagaatccatggtggctgctatcatactctagaaggaagaagactccaccgtgagaggcaccaacc

SEQ ID NO: 34343 - DNA, 503 bp, Setaria italica
  Peptide Sequence Number=SeqID_100317
ttacatctccaaactgcgaagtgactagaccgttgagagtccatgcgatggggcaaatccagtagaaccacctccaccatactggaattctctgtaggggaagttgtcatttagcagaggtgggttagtatataatgaaaagtaggagcgcagtttggttagaagtgaaagtactagacctctgaaagagtcactaattcttaccgttcttggtattaaaaatcctgagaaaaggttccaaatggcataaaacgccgtggatgcaacggaggagacgttgtagtttggagtcaggcccaccatcatcatgccataaaatgtgtagtacgctagagtgaagtacatgaagaacaggtaccaaaagaacttggcagctgtccattcaaacccaatcatagcatacactagcacaccatatattaaggactgaacaaagatatatggaagttctattgcaacctgtcccaaggcatatggcaaaggtgagtacatgtgagctgccc

SEQ ID NO: 34344 - DNA, 713 bp, Setaria italica
  Peptide Sequence Number=SeqID_100318
gcaaagaaccgaccaatgtaacagaggttcggagctttcttgggcatgcaggttattatcggcgtttagtgcagggtttctcaattgttgctaagccaatgactaatctcactaagaagggtgttccattcatatggactaaagagtgtgaggccagtttccaaactctaaagaataagttagtgaatgctcctatattgacattacctgagagcggcaaacgcttcactttgtatacagatgcttctcgaatcgggcttggttgtgtgcttatgcaagaaggtaaagtgattgcttatgcatcaaggcaattgaagaagcatgagcaaaattaccccacacatgatttagagttggctgcagttatttttgctctaaagatttggaggcattatctttatggagagtcatgtgatatatttacagatcaccaaagtctcaaatatattttcacacaaaaagaactcaacttgaggcaacggagatggttagaattgattaaggactatgatctcactatccagtaccatccaggaaaggcaaatgtggtggcagatgctcttagtaggacaggtgttcctaagacagtgatgtccttgattgttgatatggatcgcatgggggtttcattttgttatgcgggcgttgcacatcaagagactcaaatgcttattcagtctcccatagttgatcaggtgcgtgaggctcaacaa

SEQ ID NO: 34345 - DNA, 274 bp, Setaria italica
  Peptide Sequence Number=SeqID_100319
ccgggccgcgagcctcgccgggtaccctgacgcggtggagcggacgccgtggtggctggcctcgttctggcggtccgtgtcgtggcagcggcagggccgggcggaaacggacgcctcggaggaccacggtggcggcagccagcgggttgtcccgatcaccggagcgccggcggaaagacccagcggatcaggggctgcttgggacgacaaggagaaatcagctgactttggcgcattaaaccaggtctgattgatttgcttttgcgtggatagg

SEQ ID NO: 34346 - DNA, 446 bp, Setaria italica
  Peptide Sequence Number=SeqID_100320
acagggtatctttgtgcagcgactgcaggaaactttgaacagatacttgatgcaacccttgatggcagtagatgcccttcggagctatcaaggatatccgtgaaactaaatggaattcagctaccaacttatgctctgaatgatatattggtgtcacacccttgtccagcgagcgtgtcgcgcttctcatttaggaaaaggagcaacacaggagaaggctcgcatttaattaattgtagatcaagtggtttaagggtctcaacggctgctggatcaactgctgctatgctatcagctggaggatttgtgatgccattatcaagccatgagcttcagtatatgataagagagcccatttctccaacagatgctgacaaaccactgctgcatggtttagttaagcaagagcaacatatgcttgttgtctggtacaatcaagagggtgc

SEQ ID NO: 34347 - DNA, 295 bp, Setaria italica
  Peptide Sequence Number=SeqID_100321
gagcccagccacctcgtcctcctgccgctctggcgacgtgtcgcccgcgtccgccacgtcgctgtgcatcatgttctcgagggccttgatctggttggtgatcgcctcgagctcgttgaggcgccacgtgcgcgcgctatcgtgcaccacctccttgaccacctcgtcgccgtcggccgccgccgaagcatcctcctcctcattggcttctttcttgtcctcggcctcttccttcggaggattattcccttctcttcttgcccttcgacgccccttgtcgacgatgtacgaaact

SEQ ID NO: 34348 - DNA, 382 bp, Setaria italica
  Peptide Sequence Number=SeqID_100322
tctcttgataaatttaacctcagcaggttcccaagcattaagcttgagctcgttcgtacctaaccgagcaatttgttaatgttgccagaattatgatcttggatgtgttgttcccccgatttttggatttatcccaaggttttggataacttgcattacctgtacgcatcgtgttcaattgttgtgtgggttttaccaggatcttgtggttgcttacatgctagcaattaacatcccaatttcgcgccaaagcaagttgcgtgaccctggtccaattgtgatttctcaacagatgaaatgagtcaattcaatttttggacatgtgatgtgcctgattattgaccaatttggttcaggtaggtacgctgttgtgcaatgttag

SEQ ID NO: 34349 - DNA, 997 bp, Setaria italica
  Peptide Sequence Number=SeqID_100323
tttttttttaaattaagactctgttttttttggattactcaactactacattttattgcctttggtttactgaaaggtatcacactataccacactgaatattacatgatcagtgacaaggtgcccagggttttcagtgtgcaggacgcttgtccagctcaaggccagtcatcatttcttcctctgcttcgccttggccttctccttctcgatctcttccttccacagcacgggccagttggccctggcctcgtcgatgccgagcagcgacccttccttgtcggggtcccagctcgccgatagcgtgccgtaggcgatgcccagcgccgacgtgccgaaggcgacgaggatggtcagcagcggcacccacgtcggcacctccaccccctgcccgcgcttgagcgcgtcgtacgcattgagcagcgccacgcccgatgccatgggcacgcccactgcgaacatgatccggcgcaggatgcggtcgaacacgggctgcggcagctcctcgtcgtcgtcgttgccgccatcctgcttctcgccgctgcggcggccgctgttgctgtcgccgtcgcgcttcgtcgcgagcgacgacgcctcttccatcatcatcagctgctgctgccggtgctgcaggtcctgctgccgccgccgctcctgctgcttctccttccgggtggtcttcttattctcggacggcgctgcgccggcgccgatgctgctgtccgtggccgccgagcggatggttggggcgcgtcgacgtcgcctggagagcggtgagaggctcaggctgggcgtcgggttgagcgcccatgggtggggtggttttgcggccgggagagccgcttggtggagtaaggcggccatgtctaccgccaccgtggtctcaccgttgtagacgacgacgacgagctcactcgtggtttggcgtttcagtgcgtggttccgccgatgataaatggccttatcgccttgagcgagtggtggcgcgtagttcgtg

SEQ ID NO: 34350 - DNA, 487 bp, Setaria italica
  Peptide Sequence Number=SeqID_100324
taattgttctacggtaaaaggtacttgtaaccttagtcgttggtagttcggtgttgcaacatcggcaggcagcattgagcaaagtggaaacctctatggattgtatccacctacaaatcaaatggcactcaagttgagattatttatttgcactgtgcaggcagtgggcaactaaccgtgaaaaaaaaatcaccgcttaaccataaattgtataaaataattcccatgtcttagctcgtagtgcagacaatacttttggtttgctaccagtatgaccagcatggctattgcatttgttctcttatacatgaagacgacagaacaggcagctccagcttgccattgtatgtttttgtttatttgtacgagcaattgttcaaaaggatagatagtattctattctagggtccatctactgtgtgatggacctctgtctacttgtaaatgacactttatgtactagatgtgattacttataattgacctt

SEQ ID NO: 34351 - DNA, 261 bp, Setaria italica
  Peptide Sequence Number=SeqID_100325
ccttttttctatttttcttttttcctgatactaccatgaatccaggacatctcaataggggtctgtgtaatcccaattgtgaacttaagtcaatctgtcagtcaaagatcacagtctacatcctaacaattccatttagtttcttataaatgcatcatcagtacacgagaagaattcttttgtaatttacaaagaatatgcttgttttagtggattgattgacttttgtttgttcttgaatccagaatatgcagatgaaag

SEQ ID NO: 34352 - DNA, 243 bp, Setaria italica
  misc_feature (229)..(229): n is a, c, g, or t
  Peptide Sequence Number=SeqID_100326
atacggcctgtacaggccgagccagctcgactgcagcccgcgcagccccctgagcccattctgtatatcgccagagctcctgtcgcccgagagcatgggagtgaagctaaagccgatcaagacacgagtcaggcttgaagtgtagaagaagtgagtaaaggcggtggtgcttagggcagacatggtaagagtttaggctagctattaacttaagttagggttgtcggtntttaaagttttagg

SEQ ID NO: 34353 - DNA, 940 bp, Setaria italica
  Peptide Sequence Number=SeqID_100327
tgaaccaggcgcgctccgtccggtggaacctgagcgccggcgcggcgcgtcccaacccgcagggctcattccggtactcggccatcaacgtgacgcaggcgtacctgctgcggagcacggcgccggtgtcgatcggcgggcggcggcgcgcgacgctgaacgggctctcctacgcgccgccggagacgccgctgcggctggcggacgcgtacggggtggagggcgtgtacacgctcgacttcccggagcggccgccgccgggcgccgcgccacggatcgcgcggtccatcatcaacggcacctaccgcgggttcatggagctcatcttccagaacaacgacaccaggatgcagagctaccacatggacggatacgccttcttcgtcgtcgggatggactacggcgagtggacggaggacagccggggcacgtacaacaagggcgacggcgtggcgcgcagcacgatccaggtgtacccgggcgcgtgggcggcggtgctggtgtccctggacaacgtcggcatctggaatgtgcggtccgagaacctggactcgtggtacctggggcaggaggtctacgtcagggtcgtcaacccggaggacaccggcaacaagaccgagatggccatccccggcaacgcgctctactgcggccagctccacaagtaccagaaggagcagactccgcaccacaagatgggggtgtctgctgcggcgccgcgctcgtcgttcgcggcgcgccggctggtctcggcggcgctgctcctggccggatccttcgtgctcgcgccgtagtgcgggcgtgcggcgccgttacttccgcggagaggtcgctcagtttatgtagggttttttaggatcagaggtgtaggccgtggttgtcctcctgtcgatatgagaattgcttcgttgttgtcctagttgtcttggtacactgcgaa

SEQ ID NO: 34354 - DNA, 1835 bp, Setaria italica
  misc_feature (1)..(78): n is a, c, g, or t
  Peptide Sequence Number=SeqID_100328
nnnnnnnnnnnnnnnnnnnnnnnnnnnnnnnnnnnnnnnnnnnnnnnnnnnnnnnnnnnnnnnnnnnnnnnnnnnnnnttttttttttttttttaagttatagctgatactctattcattttttttgaaagaggatgatactctattcatagaaggtatagaatatggtttatcaaacaaagatagaatattacccgcaaaaaacaaaacaaagatagaatatcacagaaaaagatagattgttagaaggcaaaaaggtaacaaagaaacagaacaaactacaaatccatcactcggcgggctgctctccaaggttctccacgtccaacaagaattgaacaaaagccgcacgtgaggagccaccttcctctaacgccgcctccgcttctttcttgcgagccgccactcgtgtcttgagctccctcccctgcttagactccatcacctgcctcacttttgcctccacctcctcggccttgataaaacccgccgtatacccctgcatctccaccccaacgcccatatcctctgtcatgaacaccttgttcatcttctgctccgcgtacaagggccagcacagcattggaacccccgccatgacaccctccatcgtcgagttccatccacagtgggtcacgaatgcgcccgttgatgggtgattgaggacgtccacctgtggcgcccatgacttgacgacaaggcctctatccttggtccgctccaagaacccttccggtaagagggcatcaaggtccggctcacactgtttctccaataacctcttcggatcatcgatgttggacggcacgcgcaccacccataggaaccgttgcccagacttatcaaggccaatggcgatctcctcgagctgctcctccgagaacgtacccatgctcccgaagcaaaggaacacgacgctgtgctccggctgagcatcgagccatgcgaggcactcatggctctctgttttttcgccatcccgtgcgccgttgccgactaacggcccaacgcagtatatcggaggcagcaccttgccagggacacatagtgggtccctgagtgcctgcaccgcccggctctccaacgattcaaacgtgttcaccagaactcccctggtgtccatgccgcgcttaaagatgctcgccatggtcctgcacagctcgtcctccgggtgcacgagcatttccgcgaccaggtgagacgccggcatgggcggaacgccaaggaaatcgagaggcgtgtcccccagctccttcaggcccgtcttcctactgcccaacaccgccgggagctgggttaagacggcaagaggcgacgctcccgatgggacgaacgtgtaggcagggacgcccaacttcgcggcgacgtcgatggcgtcggcgcagaacatgtcgatgaccagcgagtgcaagcgcttccgcgggatggagcggaggaagctctcgagctcgtggttgtactggcgctgcatctggagcatgaggaggaacgggtgcttggcggagccggcgaagtcaggggccgggatcggggggaggacatggaaggagacggacggattagccgcggcaatccgctcggcctggctggcgcccagcgcgggcgacttgaagggcggcgggacgatcaccatggtgacgtcgtagccgtggctgaggaagaccttggcgagctccgccatgggcacgacgtggccaacgccggcgctggggtacagaaccacggtctgcttcattttcctcagaaaagaagtggctccccaactaggaactaggaacaaatatttcggaacccaaacagataaggatgaggttgcttttgctcgaggaccggag

SEQ ID NO: 34355 - DNA, 271 bp, Setaria italica
  Peptide Sequence Number=SeqID_100329
ctgtaggcttgcccatggccggcctcactgccctccaaggcctcaagaccattggcaacaagttcgacggcacagacaccggcgccaacatcctgataaccgccggctccagcggcgtcggcacgtacgccgtccagctcgccaagcttgggaaccaccacgtcacggccacctgcggcgctcgcaacctggagcttgttactagcctcggcgccgacgaggtcctcgactacggcaccccagaaggagaggcactgatgaactccttggg

SEQ ID NO: 34356 - DNA, 327 bp, Setaria italica
  Peptide Sequence Number=SeqID_100330
acataagacccattcagaacgcagcagtttcacaagaaaccatttgaaccttacagcattttccttttaaataatcatatgtatcctggaattaaacgtaaattcagatagcggtgtttggactaactgaagggatcagagttgaagtggatttttggttagggttcacgcatgacagattagcgaagcggcgagctggtttagcacaaataattgagagctttctgcacatgctttaggagagattcgaagccttttcttttcttttccatttctttgtttttctatcggtagaatacaacctgactactcacactgagtcggaga

SEQ ID NO: 34357 - DNA, 128 bp, Setaria italica
  Peptide Sequence Number=SeqID_100331
ctctccttgtgccacctagcactgtctgaggcggtaacttcacactgaagcggtcataaccacctttggaatgtcacgaggagccgacacgtggaagatgggctccgaggggccaccagagtggtcgg

SEQ ID NO: 34358 - DNA, 366 bp, Setaria italica
  Peptide Sequence Number=SeqID_100332
agacaagacaagacgcatctcgacgacctcacctcacaggtatacatatgtgctatttatgtccaaacataagtctatcgtagttcatgatggaagcattgatccaatgattttgtccaatcgtctcaattattctacttttttattcatgtaggcttgcactgatgtgcaggtgaaaaaagcaaaacagatgtgaacaaagggccacttgaaatatctggccaaacaagctcaataattgtactgccttttccctaaaggccccacaaaatcatgtgttgcttgctagctaattcactgaagaaagctataaataaataaaatccaccatcatgatttgctcttatcattttttttaccaaggcc

SEQ ID NO: 34359 - DNA, 446 bp, Setaria italica
  Peptide Sequence Number=SeqID_100333
agggtttcacttagtagatcattaatattgcagagagcgtcacagcaaacacctcaacggagtcctttgatgcccaatggacaccgtaggtactaagagcaactccaagaggctgctaatcttacccccaataccttttttaggaaaaaagagagaaaaaaatgaactccaacaatccacctaaaccttcccaattttttagcgacgctaaaaaacagcctgccaccgcgtatattttagcgttggcgttcctcccccaatcctgattcccgcacgcccgcgcgtcccttccgatgggcccaatacgatgacgtggcctgtgtttgaaatattgggggctatttattagcgatctgctgtggactgataagggactttgcctattgccctggattggcaccgaaatttgttttgggaaaacccctaatacatagttttggggaaga

SEQ ID NO: 34360 - DNA, 293 bp, Setaria italica
  Peptide Sequence Number=SeqID_100334
agagtatgtagcagaccccaaggccttgagcaaagctctaatcaatcgcttctgagagtacaagacatcctcttctgatttcacggcgtcagtaaccattgaattatgaccatcaacagtaccaataacgcgctgcacttctacatgtaacctctgagacaaaagctctacaccacccaagtctttgaacagagaaacagcagggctgctgtactccatcagcttttggagagtcttcactgccaaacatacaagatgcatatgagaaggatcattatcttgcaggagaggct

SEQ ID NO: 34361 - DNA, 219 bp, Setaria italica
  Peptide Sequence Number=SeqID_100335
atgttcagaaacctagtccaccatttggtggcacaaaacgttgccattccacagaaagctcaaatcttatttagaaaatgaactccacttgccactgtagagtgctaagtgaagcatggcatggcaccattgatggtctgactggccaagtggccatacaggcatttggcgtggcactgcagatattaaggattaaaagctaagagaattacatatcta

SEQ ID NO: 34362 - DNA, 181 bp, Setaria italica
  Peptide Sequence Number=SeqID_100336
tctgcagaatagaatgcactccttgtgcccagctatctggtcaaaaggagtgcattctattctgcagagcacacatgaatttcagtcaggacatgtaacacagaacaagctagcacacacacacttgaagtgcttaaataggcatgaccgcatggtttgaacacccctaatgtgtactaat

SEQ ID NO: 34363 - DNA, 320 bp, Setaria italica
  Peptide Sequence Number=SeqID_100337
cgaccccgtcaacaacaacgtcctcaccagcctcaagttccactagagcattgctgcctgttgtgttgtagtggaagcgagacgtgatgtgtgcatgattcatggcctactcgctgcttataacaatttctggtctcaattaacaggatcgattactaatttgttataagcagcgagtaggctatgaatcatgcacacatcacgtctcgcttccactacaacacaacaggcaccgtgactttgagagttcagtagttgcacgcggagacctttggaggttagagtcatcacatggcagtttaattctggaatgatagttc

SEQ ID NO: 34364 - DNA, 672 bp, Setaria italica
  misc_feature (649)..(649): n is a, c, g, or t
  Peptide Sequence Number=SeqID_100338
aggccagacttcttccatgctaaacaagacttagtagcaactccaacttgaaggagaagctcacttttgtttcaccagggcactttccatgagcttggagcaatccaccaaataaagggaagaaaccacttgctgttattccctcaccagcaacatatgtcaattgtccatttggaaattgcacatccatgaaagaacaagttacagggttgaggcacatcattgacatcagcatccattttctatgttttgaccagatagctgggcacaaggagtgcattctattctgcagagcacacatgaatttcagtcaggacatgtaacacagaacaagctagcacacacacacttgaagtgcttaaataggcatgaccgcatgattagtacacattaggggtgttcaaaccagtttgtgccaaaccagcccgcacctgctggatggggaaatggcttagcagaaattgacatgcaaaataatacactgctaaattattcaaaaagaatactgcatgcatgactctggcaaataggaccaatatttgataacataaatagtttatatagatatggatacagaagttaaacaatgaacaggtgcatgttcatctgtaatgttcagaaagatataaggcacgaagctaggggtaancaataacaattgacaagtattcg

SEQ ID NO: 34365 - DNA, 640 bp, Setaria italica
  Peptide Sequence Number=SeqID_100339
aacaaactaagaaaagactaagaagattaacgaaaaaaatgtcacagcgcagcagtgaattataccaatcatcgtgcttctacaaaagaccatgtcacagaaaagaaacattacattcttcatgggcttcgatgctaccatgtaatgctatgttgctctataaatctctatgtttaaagtcaattaccaaagccaattacatcagccagtgatttatggggaaaatcctacaaatgtaatggaaacatatatccctttgatagcatgacagcaacataaaatgagaaagcatgctaaccagctaacctggtactaacttccaagcatcaagtgactgttcttagtatatcgagtgacaacaggaaaatgtctattgcattgtgaatttgctatacaatataactgaaatctgatagcaaccagaaatcggataaaggagttggaatggagaacaagagagcaaaaggtgaatgggagaaggtgaaaacgcatgtacaagtaaacttacacaagttacagggttgaggcacatcattgacatcagcatccattttctatgttttgaccagatagctgggcacaaggagtgcattctattctgcagagcacacatgtattcagtcaggacatgtaacacaag

SEQ ID NO: 34366 - DNA, 772 bp, Setaria italica
  Peptide Sequence Number=SeqID_100340
gagctttggagcaacccgccaaataacggaaggccagctttatccgttcaactgaatggcggctttgagttgtgatgtcttggcttctgcgctgaagttgtacataccagtgtatatattgccatgactatggaggacggacattagtgatggcaatatatacactggtatgtacaacttcagcgcagaagccaagacatcacaactcaaagccgccattcagttgaacggataaagctggccttccaatgttattaagaggtgtttccaaggtgattaccactccagaactgcccacttgaccattccacttggaccggccaatagagagcgcggtaaaagctgatggatgtcttgtgcaagagaggccacacatcaaattcaattcctctttcagtgaatggacaacttcttcacgtaccccaggatcacttccaccaaatgtagggcacaaactgacttgtatgctgggtctcaccataagaccagatcttttccatgccaagggttgagtaactcctaacgaaacagacttgtcgggccactgaaacataggagtgaaccttgtgccacgtttattctaaaaaaaaatacaagtgtcagattgaactcatctgctatcggaacacgtgtgagcatgatatgaccaacaaacaacgtaaaatatttctgatcagccatggatttggtttttatgtatgataagcatttaatacttattaccattgtatcatgcctcactgggtactagcggatcttgcatgataatctc

SEQ ID NO: 34367 - DNA, 559 bp, Setaria italica
  Peptide Sequence Number=SeqID_100341
cgttcaatccagaagctcattcttttagtgaaagtgatcctggggtacgtgcagaagttgtcaattcctctttcagtgaatggacaacttctgcacgtaccccaggatcacttccaccaaatgtagggcacaaactgacttgtatgctgggtctcaccataagaccagatcttttccatgccaagggttgagtaactcctaacgaaacagacttgtcgggccactgaaacataggagttgaaccttgtgccacgtttattcttgacagaaaagctcactcttgtttctccaggatatttttccttgagcttggagcaacccgccaaataacggaagaaaaccacttgctgatatcccctcaccagcaacatatgttaattgcccattagggaactgcagatccataaaggaacaagcaactggattgagacacatcatcgacatcatcaaccatctactatttgttcgagactctacacttctcttgcctgttcatctatcaaagcaacacctgctttggtatggttatgatcgcaagaatggagttcattccctatgt

SEQ ID NO: 34368 - DNA, 1743 bp, Setaria italica
  Peptide Sequence Number=SeqID_100342
ttttggttaattgcaagacgcaagctttcaaatttattccatagcgggtcaaaacatggggcatcaaatgaaatcccacattacaatttctttttaggattatatacagtttgagaagatacctacatggctacgaaaatcgtccaatatatacaatttttttaaatacatatatacagttgtatcgtcttctcgaatgcacatatatacagatgtatgagctcacaggggagacgtcacaggtcaaaactcaaaaccaccattcagttgaacagataaagaaggcatggccatgttgtcaaggggtgtttccaacgtgattactagtcccgaactgccgacctgaccattccatttggatcgtccaagagaaagggctgtgaaagccgagggatgtcttgagcaagagaaaccacacattacattgagctcctccttcaatgagtggacaaactcggcacgtattccaggatcacttcctccgaaagtggggcaaacactgacttgaatactgggcctcaccataaggccagacttcttccatgctacagcttgtgcaactccaactgaaagggaattgtcaggccattgaaacattggggtaaacctagttccttgtttgctcttgaaggagaagctcacttttgtttcaccagggcactttccatgagcttggagcaatccaccaaataaagggaagaaaccacttgctgttattccctcaccagcaacatatgtcaattgtccatttggaaattgcacatccatgaaagaacaagttacagggttgaggcacatcattgacatcagcatccattttctatgttttgaccagatagctgggcacaaggagtgcattctattcttgcgatcataaccataccaaagaaggtgttgctttgacagatgaacaggcaaaagaagcgtagagtctcgaacaaatagtaaaggccccacttgaataaggaaaagaggtgaactatcatttccagaatttaaactgccatgtgatgactctaacctccaaaggtctccgcgtgcaactactgaactctcaaagtcacggtgcctggtgttgtaagctgcagagatgtttacagttcccttagcattcttaacgttctccaatgtcccaatttcgcatccgaatccgtcttcctcctcatccaacccgtcagcacctccagccccaaccccgctcgcgctagctgcagtggcacttccagtggccgccgccgcagcagccgctgccacctcgagggaccctatatctgtagccctttccaaagcacggaacggcaagggcacgggaacttggcgcgcgagctgctgaaccgccgcgccgagctcgtaccccgcctgcccgagccggccgccgatctcgacgagcgacgagacggccacggcggggaggtcgacacccccgcggcgcaccccgtcgacgaaggggacgacggggaggtcgatctcgaaggggatggcgagcttgggcggcagcagcgccggcggcgaccacgggggcagctgcggcggctgcgcgtggaggagcagccccgagaagccctgagcgaggcggtccgcgaggtcctgcccgtgccgctgcacgcctacccacgaggcctcgagcgagatctccatggcggatccgatccgagccccccgagcccgtagggcttcgaggggaaggaggaagaggaggattcgcgaagcgcaggcgtgtggaggggaagcggcgagtttagt

SEQ ID NO: 34369 - DNA, 590 bp, Setaria italica
  Peptide Sequence Number=SeqID_100343
agcaccgccgcctccaggactggtacaacccgggctccatgggcaagcagtacttcctcggcctcgagaagttcctcgccggctccggcgacccgtcctaccccggcggcccgctcttcaacccgctcgggttcggaaagaccgagaaggagatgaaggagctcaagctcaaggagatcaagaacggcaggctcgccatgctcgccatcctcgggtacttcatccaggggctcgtcaccggcgtcggccccttccagaacctgctcgaccacctcgccgaccccgtcaacaacaacgtcctcaccagcctcaagttccactagagcattgctgcctgttgtgttgtagtggaagcgagacgtgatgtgtgcatgattcatggcctactcgctgcttataacaaattagtaatacgatcctgttaattgagaccagaaattgtatcacacatggtaaatcattgtacaattccgaccgactctagtgttatatatatggtgagcgaacgtgttatttcatcttaccatgggtacattgtgttttaagaacaaattcttttgaaaaaaaaaaaaaaaaaaaaacaaaactga

SEQ ID NO: 34370 - DNA, 622 bp, Setaria italica
  Peptide Sequence Number=SeqID_100344
ctgcgacaacagcaatcttcaggttgcaagaaagcaccagccatggcgatccggggcgtggcctcctcccgcgaggacatgacgctggaggagttcaaggagtggctgaagcagttcgacgccgacggcgacggcaagatcagccggaacgagctccgggaggccctccgccgccgcggcgggtggttcaccacctggaggagcggccgagcccttcgccaggccgacaagaacaacagcggcttcctggacgactccgaaatcgagaacctcgtcgccttcgcccagaaagatctcggcatgaaggtatccacgtggtagaaggacgcagagtcacagctgcatgatcctgcatgcgtgacacccatgaacctggctgcttctatgaactgatgagccagcacccacacccagcagtgtcctcctccttgtattgtgtagcacctaaattttgagctcctatctttgttttctccccttaatttgtgtggtgcttgatatgccgatcacttctcctgaatggtggtatgtgtaaacgccacacatgaggcttgtttgtatgttaagcatgacgcagttgtggctatgtccaggggtttgatgcttgtagtgcataagaaaa

SEQ ID NO: 34371 - DNA, 261 bp, Setaria italica
  Peptide Sequence Number=SeqID_100345
aggtttcggacttcggtgcctcgagaggcatcgcaatcgatcaatctggagtgacaactggagtacaaggaacacacggatacatggatcctgagtattaccacacacgacgattgactgacaaaagtgatgtgtacagctacggtgttatgcttgttgaactactgacgagaaagaagccaagtatgtacttgtcgcctgaaggtgtcagtttagtggcgcactttgtcatgttactgaatcaagataagcttagtgaga

SEQ ID NO: 34372 - DNA, 273 bp, Setaria italica
  Peptide Sequence Number=SeqID_100346
aactttcttcatcctgttctgcttgattggaactctgtaatgcatcggtgttcgatgatttttcagaagatttcttcttccaaggccagctccgtcgatccatactgattgtttatctagcgcggccggcaaggggaaagtctccggcgggtaggcgggcggcgcctccgaccggtgccgatccgatcggcggggaggccctccgctctgctctgctgtggtggcctcgcctccggctttgcgtcgcgcgcactcttcctcggctgctcccaa

SEQ ID NO: 34373 - DNA, 257 bp, Setaria italica
  Peptide Sequence Number=SeqID_100347
cagacgaagtgttacaccaccaccaaattcacgtaaagtatctcttgtgggatccaaatcactcactcaaagtcctaagacatcagcatcatcctatgactcgtgtttaccccgtaaaagacctgagacagctgaaactaggcacccatttgctagggggcacataagtagctctgtcaccccccaaattacttctctgaaggaccctgcatcgcccagttgcaaatcttcacaacctttgagtactaattggaata

SEQ ID NO: 34374 - DNA, 483 bp, Setaria italica
  Peptide Sequence Number=SeqID_100348
ggaccactctcctccggcttggctgctcctatacaaccggccatatgccaaagctttgccactggatatggtccgtgagatcagtcgccacattatttgcgacaccgagcgtgtccggaccctccgcgtgtgctgcctggtgctctctgaccctggggcgcgggccatacagccacagcttccgtggctgcttgcagcttccaccgacgggcccttattgtactgtctaaattgtggcagtggcgggaatggtaccacgcacactactggcgccccaatgtacgtgcatactgcataccactatggtgcatacgatggccgttggttgttctctacattggagaatggtgacagtgtgatggttaacttacttaccggaagcaggcagagacttcccattgagattacataccgccagagtggtttatcatacccacagaaaatccttgccgccaccctctccgccgcaccagatagctgcag

SEQ ID NO: 34375 - DNA, 139 bp, Setaria italica
  Peptide Sequence Number=SeqID_100349
tccaggtaatcaggtccaccaatgctcaagttcaaaacatccatgccggttgctatcgcgtagttaaatgcatccaagaaccatgaggtgtaggatatctgagcatctgtgaacactcgaaaagcatatatctcagtat

SEQ ID NO: 34376 - DNA, 540 bp, Setaria italica
  Peptide Sequence Number=SeqID_100350
gaatgttgaaaacctgcgtacattgatgctgtttgggagccaccatggaagctacgccaaggtctttggtcatttatttagggaggctagagcccttcgtgctacttatgtgtctggagcatcatataatgtggaggatatattgcataacttctcaaaaatttgtccatcttcggtacttaaggatcaagtcgtcggagtataataataatgacatatgcttacccgctgctctgtctagactttatcatttggaggtcatagacctacgagaatggagaggatgctttggtttcacaagacatatgagcaacctagaaaaactgcatcattttctggtgccagaacatgagcttcaactacactctaacatagttgaggtaggaaaaatgaaattgttgcaagagttaaggtgctttgaagttggaaaagaaagtaaaggttttgacctaagtgaactaaggcaattgttagaacttggaggttcacttgccatttgtagccttgagaggatacagacaatgaaggaagcagaagagg

SEQ ID NO: 34377 - DNA, 308 bp, Setaria italica
  Peptide Sequence Number=SeqID_100351
tggagtccgcgtggcgcgccggcgtgcgggtgcggccggccgcggccgacgggctcgtgcggaggggcgaagtggccaggggcgtcgaggaggtgatgggcggcgagaggagcggcgagtacaggcgcaacgccgccgcgtggatggagaaggccagggcggcgagcagggagggcggcagctcggacaggaacatcgcagagttcgtggccaagtactcctccaattccaagtgatcagagaaattatttgcgagaacaatgatctgtgtatttgatatggtaatgtatagctttttccataaaaaa

SEQ ID NO: 34378 - DNA, 451 bp, Setaria italica
  Peptide Sequence Number=SeqID_100352
agttaaccttcaatgtgctcaatttgtatgttcaaacacaacctgtctgagggttaaccaatgtctacgagatgcttgttctgcatcgaccattccttattgtgatacttttatagactgtggacgtggcgttgggagtggactgtacagacagcagtggttcaatgactcaggtgcagcagcttgttttaacactggaaatggtgctactttccaatatggaatctatgggcaggctgttttactaactacagaagaaagtgctgttaaacggtatatatattcattattttgggggtttcaggtattctccgtcatttgcttccgcctttctactcctttggtatctgtttgttgcatccaaaataatccctccttcccaaattactattcgttttggcttttctagattcatagcttttgctatgtacctagaaaagccaaagtggat

SEQ ID NO: 34379 - DNA, 1858 bp, Setaria italica
  Peptide Sequence Number=SeqID_100353
ttatcttcgtggttactttttacttgatttttttgttgtgcttccactccctcaggtgatgatactgctagttatccctaaatatgttgggttactcaggtgcaaactatgctaagaatttattgcgtgccactgttcttcttcaatatgtgccccgtatcatcagatttgtaccgctacttgatggtcagtccgccaatggattcatattcgagtcagcatgggctaattttgtgatcaaccttctaatgtttgttttggcgggacacgttgttggttcatgttggtatctctttggcttacagagggttaaccaatgtctacgagatgcttgttctgcatcgaccattccttattgtgatacttttatagactgtggacgtggcgttgggagtggactgtacagacagcagtggttcaatgactcaggtgcagcagcttgttttaacactggaaatggtgctactttccaatatggaatctatgggcaggctgttttactaactacagaagaaagtgctgttaaacggtatatatattcattattttgggggtttcagcaaataagtaccttagctggcaaccttgtcccaagttactttgcatgggaagttctgttcacgatggctattattggtttgggactgttgctttttgcattacttatcggaaacatgcaaaactttctccaagctcttggaagacggagattggaaatgcaacttaggcgccgcgatgttgaaaagtggatgagccataggcggttgcctgaagatttgagaaggagggttagacgagcagaaaggttcacctgggcagctactcaaggagtgaatgaagaggagcttttgagtaatttacctgaagatatccagagggacatacgtcgtcatttctttagattccttaataaggtccgattgttcaccttgatggattggcctatcttggatgctatctgtgacaaattaagacaaaacttatatatcagtggaagtgacattctttatcaaggtggtcctgttgacaagatggtcttcatagtgagaggtaagctggaaagcgtcagtgcagatggaagcaaggctccgttacatgatggagatgtatgtggagaggagctcctcacatggtacttggaaaactcatcggtgaatagagatgctgggaaaatcaaatttcaaggcatgcggttggttgctatacgtacagtaacatgttcaacaaatgttgaagcttttgtactcagagcaagtgatctcgaagaagtcacctcgcaatttgcacgatttttgcgtaatccacgagtgcagggagcgatcaggtacgaatccccctactggcgaactattgctgcaactcgaattcaagttgcatggaggtataggaaaaggcggctgaagcgagctgagcagtcaaggctgaacgaggagtcttacccctcgtactcgatcacggcgtttgattcttttcgacgtggacagaggggatgatctaacttttcagcactctgcatctacagcttctagagctctgaaattatgagtcctgtgtgcttggtcgaataacacattgagctgctatttttggtttggtgctcactagtctctcgtagcttcagattgtaggtacttgtagtctgtagaaatacgcttctgtatataataagatagttcattcatgcataattgtttcgttcatggaatgaaacatcaccgtcgttactgctagaacaagtgcacaaggtgttgcttgtttacacgcaccgcaaaattttgagggagagccatacaataaaatagtcggttgttcgtctgtttggaggagacgccaccggaacggagaggccccacctact

SEQ ID NO: 34380 - DNA, 315 bp, Setaria italica
  Peptide Sequence Number=SeqID_100354
catcacggggagacatcgggagctccgaattctctcattgactcttctggtgtttttgcaaattgcaaatatatagctcgtatttagtaggagtgcaccctgcctagtagcaagcaaatggtgctgacgtccttgggtgcgtaggtagcagcgattgacgaggaacgaggtgtacgcagaacagttttcaccaagtggaatggccgattaagccagacgcgcgagcccacgggtgacagcgacaaaccatggggttgggtgtccgtcaatgcagctcggctcggcttagctttggttgttcacgtagacctcatt

SEQ ID NO: 34381 - DNA, 246 bp, Setaria italica
  misc_feature (190)..(190): n is a, c, g, or t
  Peptide Sequence Number=SeqID_100355
ggagcgagagcgcgacgaggtctatgacgtgccgccgcggcgggaggcgcgcgaggttgcacggcgtggagacgaaggagacgtggtggccgcgcgaggccaggcgctcggcgagctccaggtacgggagcatgtggccgaacgcaagccacgggcagatcacgatgcgcagcggccgcgagggggaccncgacgacccggcagcgtccatggcgaggcgaggatcggaggatgccgctgtcgagg

SEQ ID NO: 34382 - DNA, 446 bp, Setaria italica
  Peptide Sequence Number=SeqID_100356
tttgcagggccagggaggagattctggtgacaggcaatctcctgttgtaaataggagcattttcaatggtgttgacgctgatgtgttagcccggtttaaagttttgcagtcccgaattgataatcttagttcctttggtgagattgactgtgagggacagcaagaagcaagcaagaaatcgtatgcggttgaagatgctgtgttggctagactgaaagttttgaagtcccgtccagacactttaacctcttcaagtcaggaaagcatcaaacaccagctagatgcaagcacaaacagagcagataatgctgatgacgctgttatggctaggctgagaattttggagtcccatcctaataatgcaacctttttggtccatggaagcagcaagcaacaactcgatgaaagcacaaatagagaaggtggggtgatgatgctgtttgctt

SEQ ID NO: 34383 - DNA, 2958 bp, Setaria italica
  misc_feature (2933)..(2958): n is a, c, g, or t
  Peptide Sequence Number=SeqID_100357
gttgattcatctgaaatggccaaaacaacagttaccaattgatgaatgacactattggggaaaattccttctccttttcttcatatatgaatccttgtagaatcaatcttgattattttgattgtgtgtggaatgaacaaaaggatcttggatatcaaactgctgataagcagcatggaaaatggagcaactctaacgatatggcaacagtgggtagctatcccctcaattctcttggagagaaccatgttggttccgagcattcagggaatgggatacctatgcaagagtctactgaaatgaaacatgatttgggaagtttcaattccaagctttcttcacctgaggttgggattgttcagcctcgtgatttttcatctgagttgcttgaggttaataacaccagtgttgattcgccttgttggaagggcacaccagcctcataccagccttcatttggtatcatggaaaataatgatgcccatcataatgtgatacgaacaataggttacatcagttcacatcagagccagaagatccctgagttgagttctgagtatccagggcgattccctgaacgccaggaagcatcaggttccgagaatgatccttataaggtgttcaagttgcctgcaagatgtaaaaacaccgaagatcacaaagaagtaccaccggtcaatatcgaggtccataatgacatggctactcatgctagtaatctggcttacaaggaaccttccagaacacagaaatgctacgattctagagaagattctaagaatgtgatacctttgagtcaacaggaaagtgcttgttctggcagcaaacccaaaattctggatgaacatggtggcaaacatacagcaagcataaatgaagtgatgagtaaaactgtgttaaatcctgttgctattactcctagagttgatgctgatcatttaacaactggaagcacacatggaaatagttgttctgcatcattggagaaagaaggaagcacacagaaaagaggtgaagacccttctcagtgttatccatgtgttgaggggaatgtgctgaatgtggcttgtgactccagctctagcactcgggcaatatttctgaaactaatgcacaatttgtcggtagtgcttctatcgacctgcaagggtggttcttctttacaggaagatgaagaagaacttctgcagtcagtgattcaaaatcttacagctgccagttcaaaaagaagcaaggttgaacaaaaaaatgatgatggcttgagcaattccagtctaatgaaattcaaaaatattaattgcgcgacgaacaacttttggatggcaatgcatgcacagttggcacaggagaattctgattcagaatttaagaccactgtttcacaggttcttactagtcacatggatgataagatgcctgacgacactgaagtttctcaggcttcaatctacaaaaacttgtgggttgaagcagaagcttcagcatgtaaactcaaatatgagcttcaacatgctcgtatgaagctcgcgacagcaaaaagccacaacagcacactaaaagctcctgactcatcagaaagcaacaaaggctctagctcatccttatccagtagcaaaccacaaaaccatgggaaagaaagcattacatgcactgcggctttgcagggccagggaggagattctggtgacaggcaatctcctgttgtaaataggagcattttcaatggtgttgacgctgatgtgttagcccggtttaaagttttgcagtcccgaattgataatcttagttcctttggtgagattgactgtgagggacagcaagaagcaagcaagaaatcgtatgcggttgaagatgctgtgttggctagactgaaagttttgaagtcccgtccttagttgaagaggttaacgtgtctggacttaactttaacctcttcaagtcaggaaagcatcaaacaccagctagatgcaagcacaaacagagcagataatgctgatgacgctgttatggctaggctgagaattttggagtcccatcctaataatgcaacctttttggtccatggaagcagcaagcaacaactcgatgaaagcacaaatagagaaggtggggttgatgatgctgttttggctaggctgagaattttgaagtcccgacctgataatataacctcagtgggtggcgccatcaaggagcaggaagaagcatgtagtgatcgattgaatggggatgaccttaataccatggccaatgggggcattaccaacgctaaagtatccgctgagcacatatggaagtttatgcagtctgatgatttggcagatcacttgggaggaaaagattcagttggtggcataggcacatttggcgatggagcctgtgctggggagaacaacgagacaggtggttctgcagatgcatctacccccaagaggtgcaaagctacatctgatgaagtgaacattgaaggggcggtacacggtgaaaaccacctgtcggttgaaacggcagggccttctcatgtttgcacagaagggtctcatgaagcgcacctaatcgcgtctccagttcaccagtatggcagtacaccgtcagaatgggagcatgtgctgaaggagaacttcttccatccaggcaaataggctgcagaagcaaaccatgaactgaaaagctatcgtttgagctcatgttacctcaaaatgctgatgcttcttgtaaatatgctattatataccctcgctttcttaccttttctgtatgtctaataatctgcataatcggtgatatgtaaacccaccgtctggtgtatctgcgtggatgtatcccaaagttaacttaaagtgatacttatatgtgctggagttgacatggattattgtatatattacttgcagcaaatgtggatgttacgattgatttactgtattcaaaannnnnnnnnnnnnnnnnnnnnnnnnn

SEQ ID NO: 34384 - DNA, 250 bp, Setaria italica
  misc_feature (195)..(195): n is a, c, g, or t
  Peptide Sequence Number=SeqID_100358
tattttcttcttcggcaaggggaagaggctgacttgacctgacctgcctcttagtagttaatgtggcctttaggtttgtcggcctacggtcgtcagaaaagagaggcactgctgtactcattccgtcccaaattattatttattttaattttattaggtacatagcttctactatgtatctataaaatttaaaangaatggtaatttgggacggaaggagtaccaaatgcacgctactaactctaactcg

SEQ ID NO: 34385 - DNA, 482 bp, Setaria italica
  Peptide Sequence Number=SeqID_100359
ccatcagtaagtaagtacatggaaaccagctgcagctggcaggaataaaaatcactataggcgtatagcgtggttaatacggagtaactaacaagctctatccggaagctgaagccgttcctgtacacgacgcaagagcccgatcctcctcttctagctgacgaagatgatggaggggtcgcagcagcactcgtcgatcaagcagcagcagcagagcgcggccaggcagccttcgaggaagctcggctccctcctcggcggcgcggcggcgtactgcggcggcgccatcaccggcgggccctggtacggcccctggtagtaaccttgcgctgggtaggggtaggcgtacttgggatcgttcatcttcttcttcccgtgccctcctctgttcctcctccggtgagctctcggaagctggaagaaggcgagcagctgctgggagcttaaaggttggttggcgcgtattgtacgtctaggtctaa

SEQ ID NO: 34386 - DNA, 576 bp, Setaria italica
  Peptide Sequence Number=SeqID_100360
tttgagcttcacatacagaaataagccccttgaggtggttccagtcccttaacacaacctcagtaaggttctccacataggtgcccttctctgcatcatcccagagtctaagaggagtgttttccgcgctaagaagatcccttacaacttcattatatatttcgattgctgagaacttcagaacaaatgctctctcttcatgcttattaatgtaatcatatatgtctgctactgtatattctgttactccagtcatggtatatgtctttccactacttgtttgtccatacgcaaaaatacttgagttaatgccactaactacagagaggcaacttccctaaccccttcctcatagacttccttggtactgcagtcagaatgaaaaacccgatcaaatgcgtatgccgtcggagctgtcggtcggtccgggaaggtgctccggaacatgacagtggtgtcattgatgcactcccactctgcaggctcccccctcgcaatctccttctcgctcagcggcctcagcctgaccagcacctgtatcctgtccatcctccccgcacctcctccgccaccatt

SEQ ID NO: 34387 - DNA, 397 bp, Setaria italica
  Peptide Sequence Number=SeqID_100361
ctgcaatctcagggcagaaaaagaatatgaaaaaagaatgaacaaagacctaatctaatagagaaataataacatgacagaaaggttgatagaaaccacatttgatggagtgaaccccccaaatttggtcaaagataacctcaggaactctcttaactcctactgacaaggccagcctactgttatgcgccatcttgtttcaggacagaaaaatgacctctggttgagatttatattaaagaaattgaaaagatgttgatacacagtattaactttcttcatttctattttctagctacatttccaaccagactcgtactttccagatctaccaccaagtactgatgtacaatgaaaaagagaaggaaccaggcagtctgggacctccttgtgtgca

SEQ ID NO: 34388 - DNA, 369 bp, Setaria italica
  Peptide Sequence Number=SeqID_100362
ccatcccatgccggcctccctcccagttgaggttgaggagccgtgcccggccatggccatgtgcctagtccccgtcattgtacagtttcaagggggacaagctgccccatgttctgctggcactcccaaaaaactgcgccttcgtcttgttctgtatccatcagctggtggtccgtcacctccacttgacgtccaattagtacgctacaaaggtgggaggcaacgcgtaccaggtgccgtcggggcggcgggacggcaacgtctcggtggcgcaggagacgagcgggaacctgccaccgccgacggcgagcgtgagccagctgaaccagatcttcgggagcaagggcctgacgcaggcggaggtcggta

SEQ ID NO: 34389 - DNA, 823 bp, Setaria italica
  Peptide Sequence Number=SeqID_100363
accacttccaacgactgcttcgtcaggggctgcgacgcgtccgtgctgctggactcgaccccgggcaaccaggctgagaaggacgcgtccccgaacacgagcctccggggcttcgaggtgatcgacagcgccaagacgcggctggagcaggcctgctacggcgtcgtctcctgcgccgacgtgctcgccttcgccgccagggacgccctcgcgctggtgggaggcaacgcgtaccaggtgccgtcggggcggcgggacggcaacgtctcggtggcgcaggagacgagcgggaacctgccaccgccgacggcgagcgtgagccagctgaaccagatcttcgggagcaagggcctgacgcaggcggacatggtggcgctctccggcgcgcacaccatcggcaacgcgcactgcagctcgttcgacagccggctctacgcgtacgggcccaacgccgggcaggaccccagcatggacccgtcctacctggccgcgctcacgcagcagtgccccaaccagagcggcggagggcccgacgggacggtggccatggaccccgtcacccccaccgccttcgacaccaactactacgcctccatcgtcgccaagcgcggcctgctcgcctccgaccaggcgctcctcgccgacccgaccaccgccgcccaggtcgtcgcctacaccaacagccccgacacgttccaggcagacttcgccgccgccatggtcaagatgggcgccatcggagtgctcaccggcaccgccggcaccatccgggaccaactgcagggtcgccagctgatcccgtcgtgtccatccatcggtgggc

SEQ ID NO: 34390 - DNA, 447 bp, Setaria italica
  Peptide Sequence Number=SeqID_100364
cgtaggtgaaatactagatggctatttctttcaattggccatatcgtatcatcctgctcatcgccattggagtgctcaagaacaagttcagcgatggcttcctggactgtgctttctgtttgcctccatggccaaaacttaatgactatgtaaatgatgcccgcaataccccatagaccaaaggttataaagaacactccttttaaactgctccaggtaacaacagagcccatctcaagggcgttcgtcatgctgttgcaggtcaccttgtccagtcccaaccacttcctctcaatgcccacaatctcatccccttctgtcacctttagtatagcccgggacacatcagcaacaagcggagagcccttagggaagacaaagccgaatccaccagtcttgtaaacacgaccaatgatactgtggttcctgcaatgcttggacataaac

SEQ ID NO: 34391 - DNA, 254 bp, Setaria italica
  Peptide Sequence Number=SeqID_100365
ccaggttgctgttggccttccggatctcgttcagcttatcctcgaggtcggactccgccatggcgaggaggagctcgtcctcgtgggaggtagccggcacgggaagcagcgtggacgccgggatcagcggcggcgacggccactgccgcatcagcgcagggaactggagcattctccgctccctgccgcggcttcgcttgggctgtggggaactgggcaaccggggcaggcaggcaggcaggaggacttgcggg

SEQ ID NO: 34392 - DNA, 568 bp, Setaria italica
  Peptide Sequence Number=SeqID_100366
tccacaccgaagaacaaattttaaactaatgtctatgtagttcattgtagtgattcaatgggaacatgactgtttagaataaccgggttatgcaatatctttgatggatataaaatttctagtggtgcaagtagctcagactgggctttgggtagacccactctatcaaatatctatgtgttacaaaggaataccacaaatattatgatgttctagtcatataaagacaactagactccatattgggtgtagcaaagtgcaaagatcagtactgcataacatacctttgactccaacaataaagaaaactcatagaaagcagtatagacgtctgacattgagtttgtctcataaatcactagtgccgtgagccctaagaggggaaatatgttaggtaattatatagacaacacctaagtataatagaataaatcacatgatgttaagcaatggggtaatctttagataaagaaactaaagcttgcatttcatgttagttggatcagtgattatgaagaagaggcaattgtagtgaaatgcagatccacttgcttaacatcatgtgatt

SEQ ID NO: 34393 - DNA, 1874 bp, Setaria italica
  Peptide Sequence Number=SeqID_100367
tgcttaagcctttttattaagccctctgcagacaaggtacaccacatgttaacgccggtacataggttgcccaacacgcaatccattgtagctttttacacgagttttttgcgagaaaaagcatgccaacaaaactacagtgtgtccactgctagctaaataaaaacacaagtttacaggatacttttcccttgaaacagcttcaaacggtacgccacgcgaggaaagaaaaaggagcaaaagaattgagattagcacagcatcatgtggaagctaagccatatccatcattcatctacagtcagtaccgctggatatttcgcagcctttggagactacagagtacatggtcggactgacatactttgccctcttaagtctccatatgaaaaaagggcaacaagggcttcacttggtatacagcaccccaaatataatagccaacagcagaagaacaatcatgatcagcataggcttgtaaggtgacttgtccaaatggtaaccccttctctttagcaaaccagatgacttgcaagtttgctttattgaatccacacgttttcgtgttagcgcagcatttggatcattgtcgtcaatctttgactccaacaataaagaaaactcatagaaagcagtatagacgtctgacattgagtttgtctcataaatcactcgtgccgtgagcccacgtctcatctttacaactcctctaaagacattcacgttattgtagcaaaaggcacacgttccaattgccattatctggggtattgcacaaaaacggaaaatggtatgatccttcaaagctgacatgtactgaaggcagtcttcagcatgaatcaatgcattagtcaccagatcattcaagcactgtactgccttttctgaattttcctcatatttgaaatcctcaagtttatccgcatatttactccatatctctcgaggccagaacatgcgggaccttggtatctcatttatgtcctccaaatagtccctaattatattagttttctgcaaaaataaacccattgaattcgacagtgaatctggagccagatcttcagtcccagtagcatgaaagagtctagaaagtccatatccaactagcccagccacatagtgacaatattcatcatagtcatcaatagtttcaacctccttgcatataaattttgccattcctgctcccattcgcctagtgatttcttcaattgccttttggtaaccttcaccaagctctaggaaagcggtggatacgtggtgaaaattatccatcagcactctgtagttatttgttccacatgaatagtgccagttgcggtcgtagatgtgccggtagaattcctggaggataggcaccttcacgtcggttggaatgctagtgtcatcctcgacggtgtcgagggcacggagcacgaggtagaagatgcacacggcattgcggaggtcggtgccgagctgctggatgacgagagcgaagctgcgggagaccttctggagcatggagtaggcgaaggcccagtgctcctccggcgggatctggcgcttcatctgccccgccgccacccgcagcttcaccagcgccaccacctcctccggccgcgacagcgcccccatcgccgccgccgggtctcctccgatccaaccgaccgaggagggagcagcctcctcgcgagtacccgagccccgatcggacgcgactgggcagcccgatgatcccggggagatgccgatgcgatgcggggcaggctcgtgcgtcgagcgcccgctgcgtgggagtatttctagaattctagcggcctcgggcctccctcccctgggaagcgactactagttgatgagaagggtgtcgctgtcgccgtccgccgcgc

SEQ ID NO: 34394 - DNA, 2507 bp, Setaria italica
  Peptide Sequence Number=SeqID_100368
ttcccgatgaccagcttccggctcggcccgtacgagtcgtgcagcacgtgcgacctcaccgtggcgccgccgcgccccgccttgcaggtgaaccgcaccaggctccactggccccgcggcccggccatctccggcgactcgccgtcgtccaggaacagctccccgtccgccgagccgtcctcggcgagcgcgaccaggaggtggaacacggtctggcgcgcgcgcgacgtggtcagcgccggcatctgcagcggcagtatgttgccgccggcgacgtgcacgttcaccgtgtcggcgggggccgggagcgtcacgcgcttgccggtggccgaggcgacggcgagggagtagtcgaagaggctgaaccaccggccagcggggaagtaggcatcgacggcggttgcccccggctcgagcaccggcgacacgagcacgccgcggccgagcaggaactggcggtccaccccgtaggtttgcacgtccttggggtaggagaagaagagcggccgcgcgatgggagcccccgtggcgtgcgcctcgtgcatcaacgtgtacaggtacggcagcaaccggtagcgcaggccgagcgccttcctcgccgaccgcgccaccgtctcccacaggtacagctcccgccggacggtgccgatcgccgagtggtccctcgcgaacgggtagaaggcgccaagctggatccagcggctgcagagctcctcggtggtgtcgccgctgaagccgcagatgtcggcgccgaccatggggatgccgaagagcccgaagctgagcatggtgtttatggagtagtggaggtcgtcccacgtcgcggcgttgtcgccggtccagtgcgcggtgtagcggccggagccgacgaacgtggaccggctgagcacgaaggggcggcggccggtgtcggcgcgcagcgcggcgttcgtggctcgcgcctcgaggaggccgtagaggttgtgcgcgtcgtactcgcggacgccgccgaagtgcaccgcggacgccggcacggtcttgttgttgatggggcggcgcacgccggagttgttgatgcggtacggcgggtcgtccagtgcgtccagcggcggcgggtcgacgaagttggagatctcgttcatgtcgatccagagcccgtcgacggggagcgtccgccggaacagggagatctcccgcgcccagaacgcggcggcgcgcgggttgaggaagtccgggaagtagacgttgcccggccacaccttgccgaggtagttggtgccgttccacttcaggaacacgtcctgctgcatcccccggatgaacgtcccgtacgtctcgttcacgttgatccctgggtctaggatgacgacgtatttctggccgttccggtgaaggcggtcgacgaactgccgcatcgggccggccgggaagttcagcgggtccagggtgaagtccttgaacgcgtccatgtaatcgatgtccgtccacatcacctccagcgggatcctggccttggcgtagccggccaccacgccttccaggtcagcaacgttcttgtacccgtacctgcactggtggaacccgaatgaccagtacggcatgggggccgggcggccgatgagctgggtgtactggtcgacgacgttgaggggtgccgggccggcgaagaagtagaagtcgagcacgccgccgatgaccctgtacgtgaggtacgacccgccgtactcgatgtccatgccgttgctgtttagcaggagcacgccatgcgccgcgccggcgccgttcccggcgccggcgggggacgccgagcgcacgtcgaggtagaacgggtgggacccgtagaggttgaggtcgacgttgccagcggcgatgtcagcgttccagagcgtgaacgtgtcgttgcgctgcagccggaacgtgcgcttggtgtgctccccgagcccgtagagcgacgctcgggcggcggggagcgccgtggtgagctcgaggtaccggtccttgaagaagacgctcggggaggtgtcgaagaggacgtcccccgtggagcggcgggagacggtgaagcggaacggggaggcgtggagggtgaaggtcaggtcggaggtcgccgcggagaggacgcggctgcgtggcgaggcgcccgtgctcgcgtcgaggacgatgtcacgcggcgccttgcgggggatgatgtcctgggggacctcccatctagggtgttcggcgtcggtgatgcggacgtgcagccggctgtccgtctcaaggctggcggttaggctgagcctctggacgtcgggcccgagctcggccttctcgccgtcgccggcgagctccagccgcgcggacagctgacccccgcccccggcgacagacatgacgcggtaacctccctgggcggccgcaccgggccacgggacgacggcgaggaggaagaggaggaggaggacggcgacgcgcgtgtgcgcggtcgacagcggcggcgtcgaccccatcgcatgcggcgcgcaggggagctgcccggccgatgctac

SEQ ID NO: 34395 - DNA, 710 bp, Setaria italica
  Peptide Sequence Number=SeqID_100369
agctggtctgcaaatgtttgtgggagaaaacaatggctgtttctaccaccatcacaaagtcatcgtatatttgataggtacatgagatcctcggtctataacttaaatgatgatgtttctgaaaagcagtttcccgaattcaataagactgaatggatagagtgcattcaggagcagaatgaaatcatatttgttcccagtggatggtatcaccaagtccataacctggaggatactatatctataaaccataactggtttaatgcctacaacctacactgggtgactacaaagttgcaaaagaatatatcgaagacatccgagatatttgtgatgattttgaagggctttgccaacggaacttggcagcaaatacaggaatgaacttctatgatttctttgttttcatagtgcggtttgctttagccaatgtaattgagctttaccatcttcagcagccagaggttgcaacattttcaacagaaactgcacaccattttgtctataatctgaagtcaattcgtaatgttgcatcaaaaatgacaacaacagaggctttcactactgagaatcttcgtagtatctcggaagataaccgtagtgctttctccaatgttaaacaaatattagaagaggagagtttcagaaggctattgatgacactgtcaaaggcatatgcacacatagacagagggcaaagaaattgcccc

SEQ ID NO: 34396 - DNA, 289 bp, Setaria italica
  Peptide Sequence Number=SeqID_100370
accgcctcctctgcctctttcacacagagcaagcactagagcagtgactgcacgcacccgttgggtcggcggcatggccatcccgctccaggggaaggacgggaagggcggtggccaggtggggagcgacgaccatccgtcggcgaccgcggagctgcgcgcgctgtggggcatggcggcgccgatcacggcgctcaactgcgtggtgtacctgcgggccatggtgtccgtgctctgcctcggccggctgggcccgctggaccgcgccggcggcgcgctcgccatcggg

SEQ ID NO: 34397 - DNA, 448 bp, Setaria italica
  Peptide Sequence Number=SeqID_100371
cgcatcttcattctcgctgctggtctcagcagcttcctcttcacacttgccgtcggtctcggcaccttccgcttcacccccacgtacagcagcgccatctttgggtgtggacagctcaccactgattgtagccaccgaaaaggcaggcggccaatgcatttgcatggaaaagcagggagatccctattgaactcaaacttctccatcacacgaaaagtcttcaggtcaataacaaaatgcagattgcgcccagtcgagcacaaaacagccattccatttgtcaccttacgagcttgatagtacaaaggtccagcaggggcatgcttgccgagcacctgcgcaactttcattgccttctccagcttccagtccagcttctccagcctccacactctcaagtgggggatgttcaatttgccaactggctcaactgctgcaagacagcaca

SEQ ID NO: 34398 - DNA, 1416 bp, Setaria italica
  Peptide Sequence Number=SeqID_100372
gtggtggctgcaaacgaagtattgaggaaacatgcccgtaggctgaagtttgatgtggtcacaccgttgctgcctgtgaggggaagtatctttgaacaaggagcagaggaggatgagtcgatgtacagttcacttctggaggaggatgcagatggtgaaaccgcccaaattaacacatccttgcctcagtggatgtgggcttctcatgtggccatctactcaaatcatgggactagagttggttcccctgatagctcaagaccattgtggggttggagtgaaggagaagcagatacctccacgcataacatctccaagctgtttttgtttatggagctgcccttgactataccaagaaggttgacgattccaatagtcgaggaagaccgctggtcgaaagaatatgctgttgcaagtgcttgcttggcacctgttcttttggcgtttctgtggagcagtcaggatggagtatccacaaaagctagcatagcagcatatgtgatagctagcatttttgggattggatttgctgctctggcttttctgttcaccagtagtgaacgccctccacggagatatttgttcccttgggttttcggagggtttgtgatgagcatcatttggttctacatcattgctaatgaactggtcgcacttttggttgctttgggtgcgatattggggatcaatccttcaattcttgggttaacagttctagcatgggggaattcgatgggtgacttaatgtcaaatgttgctctggcgatgaatggaggtgatggagtgcagattgctatgtctggatgttatgctggacctatgttcaacacacttgctggtttgggactatcaatgctgcttggagcttggtcaacagcacccgattcatatgtccttccacaagatcgctctcttatttacacaatgagctttcttgttgctggattgatctgggctcttgttatgctgccaagaggtgacatgcggcctaacaagatacttggagttggcctcgttgctctttactcagtttttctttttattagagtaagcagtgctatggggatattgccactacctggcttgagttagtatatttacttgtactgtaaagatgagatgcagatgcatatcagactacttgccctttattgtcatttatacaaatgaaatggagttatatggtgccgttctgtttaaacgccgttctgtttcgtcctcgtgtgtcaagttgtatgttcttgggttcagtccgtctgaacaaaaacttggctgcaactggtgtatctatttgtaaattttaatattgtaaacactgccatgattttcctggtacacatttgtggtgttggtcttccatgaactagcttatcaatgcatactgcacaacaataaacaaaaaaaaaaaaaaaaaaa

SEQ ID NO: 34399 - DNA, 228 bp, Setaria italica
  Peptide Sequence Number=SeqID_100373
acatgtctatgaaaatgggggagaagatggaaagaaagtggtggcaagattagtaagtttcacctttttcactgtcacgtaattaattctttgcagttcaccagctccttttattctagagctgtcctagagccttctccaagaatgcaggaggatctaaatgtgtcagtaccatcatggaactaaagtacaattggatcaatgaccgtcattggttacttgttagct

SEQ ID NO: 34400 - DNA, 756 bp, Setaria italica
  misc_feature (732)..(756): n is a, c, g, or t
  Peptide Sequence Number=SeqID_100374
tagaataggggttacgaccaagacctactacccgtacgtagggaccccgcgtgtcaataggctcgatagccccgcaagcggatccctcccctgcaaggccgcggaacggagctgccgccggcgccatggcgggcggcggcctcgcggcggcgtcggagctcgccgtcgtcttcctcttccggcccctcctcgccgtcgccttcgtcctcaccctcatcctcttcagctggtacgtggcgtggaggacggtgctggttcacgtgccgctggtgcaggagatcgccggcctgcgcccgaagaaggccgctaaacccaagccggctaatcgcggccgcttcgccaggttctaccagtcccaggctgaggccgcccaaaggaacagcaaatcagaagggacatcttaagggaaaacctttacgcttggcaataagtacctgctgaagactatgcatatgaattccttggatcccattagaacgcagtactgcagatgatggcagatttttaggagagaatggatatctgcatctgatggaagcttcctcttgcttggcaactgtctatacatcaagatttcacaacaaaaattacaaaactgcatcaaatgtatattgcatgagcttgtaaagttgaggacgttgtacatatacctgtacaagaataaagagaactgctcgtcctttggaatatcaatgtaccttctcttgtagaaacaagaaagaactagacaannnnnnnnnnnnnnnnnnnnnnnnn

SEQ ID NO: 34401 - DNA, 504 bp, Setaria italica
  misc_feature (435)..(435): n is a, c, g, or t
  Peptide Sequence Number=SeqID_100375
tgagcttgactctatcagaaaccggccagttggtcatatcctcaataggttgaaggcaatgttcatatgtgttcttgaatgattcaactgaataacaactcgcaacgtattcatccaggctattggtcttcaaaagaaatgcatgaaatagcatgaggacaaggcaatcctgacagctgccaatatctacataaacactccttctcctctagatcaactgtgaacctggtgtcaaaatgcatcacttcaaagtttgatgccccattacaaattgcatggcacttgcctgactgagtgatgtagacattcaatttcttcaaaacattggggcagatcttggtgacccaactctctgacttggtcctgttgtcatgaatcctagccataaccatccttctgatggtttccagcatggtgatgacaggaaaaaaccgngcctcaactatccacttattgaaggacccacataagttgttgtctacagagtcacagttacgaccccaa

SEQ ID NO: 34402 - DNA, 187 bp, Setaria italica
  Peptide Sequence Number=SeqID_100376
gggagcagtagagcgggccgtggcgccacccgcccgccgaggcgaggccgcgggtgtggtcctggtggaggtgcgtcaggaagtaggcctggctgccagcggagaacttgtccacagacaccaggccctcctccatggctcgccgccccacccgatggcgatccggccgagccgatgcttcacctcg

SEQ ID NO: 34403 - DNA, 278 bp, Setaria italica
  Peptide Sequence Number=SeqID_100377
tgacatttccgaagcaattcctaagtcaacatcaattaatacccttgctttgtttgtgtccttgcctggtaaaccttctggtggaagcatctacaataatctattcacaatagcctgtgccacagttaaatttcatttggaatcacttcagttgtctgtcttttctggatgctgcttgcttgcttcccttcctcaatccatatagtgaaactatcactgccggcttcaagctgttatgacatgaacagagattcttaattcgtatgtgtggattggag

SEQ ID NO: 34404 - DNA, 582 bp, Setaria italica
  misc_feature (580)..(580): n is a, c, g, or t
  Peptide Sequence Number=SeqID_100378
tttagtttgttaaattgtctgttttttgtgtaacagataagttcccttaagcctggagattgttagtattagatatgtatacaaggcaagtgtaggctataatatctaatagtttgtttaaggatcaagtcaataagtcatcccaatagaaggggcagcatattagtttccaataaataagaacaaagttgtactctctctcaaatcaaattcctttgtcccataatgcagttcattccctcttcaagaactactagttcctttcttagccctcaaaaagttttagttccctatttgacaccgagttcaactttcattccttatacgacactattggattttccattcgggaaccgttaaatgccctacgaaaagacgattttgcccctatgggccccaccacccttctccttcctcttctccccttctccctcctctgctccacaccgggccagaccgccgttgaggggacggcccgccgccgtgcctcctccgctcggccgccgtcgaccgtcccgccctccacgccgccgcccgggcccagctgcgcctccctcgttcctcctcgtcgccgcgggtnct

SEQ ID NO: 34405 - DNA, 666 bp, Setaria italica
  Peptide Sequence Number=SeqID_100379
tttcgcacgtctcttgagtcttcttcttccttctcgtcttcggatcacacagcggtgcgtgctaggcgagacagcgggagcagagcaggggagtggggcaggggcatcatgttggaagggaaggcgatggtggaggacacggacatgccggcgaagatgcaggcgcaggcgatggcggcggcgtccagggccctcgaccgcttcgacgtcctcgactgccggagcatcgcggcccacatcaagaaggagtttgacacgatccatggaccgggatggcaatgcgtggtgggctccagcttcggctgctacttcacgcacagcaaggggagcttcatctacttccggctcgagtcgctcaggttcctcgtcttcaaaggggcggcagcatagcaaagcaggctggtaacatcacggccaggaaaatcagatgcaccgtgctattttctcctccggcttttgtggagggcgactaggtggcgccgcagccggcacggcggatggcgtgtgcgtgcgtatgtgaaattagttgggtgtatacggtagtagatgtaacattgagcaagaatgcaaacagtggaattcatctctggtcaaattgcttttatgtacgaaatccaaatggatggatgctagtgatgtgtaaatcgaaacttgaaaactggggac

SEQ ID NO: 34406 - DNA, 502 bp, Setaria italica
  Peptide Sequence Number=SeqID_100380
acgggtaggggggcctgtatgaggccctctcctcgacctcgatgaggccccggaggctgacgttgcgcacgacaacgtccatggcgcggcgttgtgcgtcgacgagcgaggtctcgacgcagtggcaaagcgcggcgccgttgggggacgccgcggcggaggggaggaggcggcggaggatgaaggggagcggcggggaccgcaccgtgatggagcgcgcggcgtggaggcggcccgtgtccgagtcgaggcggcggtggagggtgtggacgtcggcgacgtgggagagcgccgtgcgggaggccgggtccgtgaacttgcgccacaccgccgccgtcacacggtcccacgggtgcaggtagacgtgctcctgcgcgtacaccaccatggcgccggccgccggtcttggcctagtggggctccgggggttttggctggatttgattgatttcctctttcttgcggcgagggtttgggcctccagggggtggctggcgacttg

SEQ ID NO: 34407 - DNA, 241 bp, Setaria italica
  Peptide Sequence Number=SeqID_100381
ttattgaggtgctgcaagcgtcagatgttttcggcagcgtcaagaaatggagcaggttgcagcttgtcaccatgacagggttggtggcatgtgtagttctggtagtcccttctgccgacgcggtggacgctctcaagacatgcacttgcctgctaaaggaatgcaggtgactagtcttcattatcttaatttgttgcagcacatttcaagctagctagctaagaacgtaccttaaacctta

SEQ ID NO: 34408 - DNA, 1288 bp, Setaria italica
  Peptide Sequence Number=SeqID_100382
ctcttccacctcctatatctcctgttatatcctcctcctccgtacggccgtggaagcgtagccacggcggcgcaggcgcggcgcaagagattcagagacatgatgtcgcggcactgcgcgaatcgcgtctttccacccggaggttccaacatcctccatggtccaaaatctagagctagagcagccactgggcgccacagcgccgtcagattcaggcggtgctgcgtgagagctaacttttggaggagtgatcacctccctctcaaggttaccccgtcagagattattgaggtgctgcaagcgtcagatgttttcggcagcgtcaagaaatggagcaggttgcagcttgtcaccatgacagggttggtggcatgtgtagttctggtagtcccttctgccgacgcggtggacgctctcaagacatgcacttgcctgctaaaggaatgcagaatagagctggccaaatgcattgccaacccttcttgtgcagcgaacgtagcatgcttgaacacatgcaataatcgacctgacgaaactgaatgccagatcaagtgcggagacctgttcgagaacagcgtagttgatgaattcaatgaatgtgctgtttcacgcaagaaatgtgtcccgagaaagtctgatgtcggcgagttcccagtccccgatccatctgcccttgttaagaacttcaatatggcagattttaatggcaaatggtacatttcaagtggactgaacccaacatttgacacatttgattgccagcttcatgagttccatgttgagggagacaaactaatcgcaaacataacatggagaatccgcactcccgactctggtttcttcacccggtcgactgtgcagcggtttgtgcaggacccttcacaacccggcatactctacaaccatgacaatgagttcctgcactatcaagatgattggtacattatctcatccaaggttgagaacaaggatgatgactacatatttgtatactaccgtggtagaaatgacgcatgggatggttatggtggttctgttttgtacacaagaagtaaaactgtccctgaaacaataatacctgagctggaaaaggctgcgaaaagtgtaggtcgggacttctcaacgttcatcaggactgacaacacctgtggtcctgagcctcctcttgtggagagaatcgagaagactgtggaggaaggagagaaaaccatcatcaaggaggtgaaggaaattgagggagagattgaggaggaggtcgaggaactggagaaggaggaggtgacactgt

SEQ ID NO: 34409 - DNA, 465 bp, Setaria italica
  Peptide Sequence Number=SeqID_100383
gataccatcgattttaagctcttcatctgcattttgggtccacgcttaaattccagtaaaactcaaattcctagatttggaaagtttcttgcacgtgcagacgtgcggtgcaaaagagacacccagcatcaatacgttggtgttccaattgctctcttcttctctcggtcaacaaaatagcgaggcgtcaggcttccatcagcagtaaccaatccatcatcatcgattgtgaagtcagtgtccaaagccatggtacaaaatgcatggacaactccaatccgtttgattgctagaattgcattcttggctggcacaaacactctcttttgcgacgcaagatgaacaacgtctgccctggtggcctggcgtcggctcgtcgccaacaagacgcaagcaactgcagctgggcatggcgagcgcgctggagacgctgtgcggccagtcctatggcgccgagcagtatca

SEQ ID NO: 34410 - DNA, 487 bp, Setaria italica
  Peptide Sequence Number=SeqID_100384
gggaggagaatggaagggcgacgcccaagccaattcggcgctccgcgtccatggactcaccattgttccttgtagctgttcctgaagctcaggatgatgtcgtgcggtctaattgcaagttccaaatgggccgagagacgaagatcttcaaggtgaaagagaaggaggcagcaggcacttcttcatcctcgtgtcagtcaggccggtttaagattggcaggtccatgtcaagcagtggccaggggttcttctttgcacggaatggccgcaccagtggcactgtgatgccactgtgagtcggcatgttttttagtgtccaggggatgcagcctcagcaaagccgggagctggtagtgtgtcggtgtctgttgatagaaagcatatgcaagagagctgaagtcgctctcggagaaaatctcctttgaggtgtgagttgatgagttgttggtgataaggatttcttgagtgatgcggcagtgttagcttt

SEQ ID NO: 34411 - DNA, 1247 bp, Setaria italica
  Peptide Sequence Number=SeqID_100385
caattgaagaagggtcaagaaatcacaatttccacagattatagcattaagggtgatgagaaaatgatatctatgagctacaagaagctcgcagtggatctgaagccaggcagtgtcatattgtgtgctgatggtaccatcactcttactgtgcttcactgtgataaagagcaaggcttggttcgctgccgttgtgagaacacttctatgcttggtgagaggaagaatgttaatcttccaggagttattgttgatctcccaacactcactgacaaggacaaggaggatatccttaagtggggtgtcccaaacaagatcgacatgattgccttgtcatttgttcgcaagggttcggatcttgtggaggttaggaagatacttggtgagcatgccaagtctataatgctgatgtctaaggttgagaatcaagagggagtagctaacttcgatgatattctggcaaactctgatgcttttatggtggcaagaggtgatttagggatggaaattcctatagagaagatattctttgcgcagaaggtgatgattttcaagtgcaacattcagggcaagcctgttgttactgccactcagatgttggaatctatgatcaagtctcctcgccctactcgagcagaagcaacagatgttgcaaatgcagtgcttgatggcaccgactgtgtcatgcttagtggtgagacagctgctggggcatatcctgagctggctgtgcagactatggccaagatctgcttgcaagcagagtcttgcgttgactatggtgctgttttcaaattaatcatggcctcagctccaattccaatgagcccgttggagagccttgcatcatcagccgtccgcacagcaaactctgccagggcggtgcttatcttggtcctgaccaggggaggaacaactgctaggcttgtggccaagtataggccatccatgccgatactgtctgtcgtagttcctgaactgaagacagactccttcgattggacctgcagcgacgagggaccggcaaggcagagcctcatcgtgaggggtgtgatcccgatgctgagtgccgccaatgccaaggcctttgacagtgaagccactgaagaagcacttggttttgccattgaaaacgcgaaggtgatggggctatgcaacacgggggagtctgttgtggccctgcaccggatcgggattgcatccgtcatcaagctcttgactgtgagctaggggggagagaccatttg

SEQ ID NO: 34412 - DNA, 248 bp, Setaria italica
  Peptide Sequence Number=SeqID_100386
gggcgatccgatctgacaacaaggcgaaactgacggtgagggtggataggagagctggccgatcagaggtgatggtcgaagctgaactccttgtggacgccgcacttgcaggtcacgcgcaccaccacctcggcgccggagcaggccgcgctggatacttccacctctcgctccggcttgctcggcttctccggtgaggaaggcctcgccggcgacgtgcagcgtgacccagccggcgagcgggatcg

SEQ ID NO: 34413 - DNA, 268 bp, Setaria italica
  Peptide Sequence Number=SeqID_100387
cgacaaccgcaccaacctcttcggctcttcctccgctccgggaccagctccagcacccggcgcgcacgctcccacgccgggctgcgggggaggaggaggagattcccgtagaaagcgagcaggtgcgtctcgaaagcggcggtccttgccgaaagaagcaatccccgagaccggcaggagcaggaggaggagcggcagggcacgcacgcacactcccaatggggagcaggagcagaggagggagcggcagcggcttgctcatcccctt

SEQ ID NO: 34414 - DNA, 489 bp, Setaria italica
  Peptide Sequence Number=SeqID_100388
catgaagggaaagaaatgcctgaaaatttgtcaggtggagtactccttgatcaagtttatgctgttgcaccgagtgccttgaatgcacatcttttctctccaagttcagactttctgcaatcgctagcagagattcaaggaactactggtcttgaaattcaacagtggagactcgaaaatgatggtgaaatcttgaagagggtcgtaagctacacaaaagctcctactaaattagttaaggcagtgaaagcaacagaggacatgacatatttgaaggcagatggagagatgtttgcagttttagcagatgttagtactcctgatgttccttttggcaataatttcagagtggaggttttaacctgtataatgccagggcctcaactgccagatgatgaacaatcttcacgtcttgtagtctcttggcgcttaaattttctccagagtaccatgatgaagagcatgattgaaaatggggcaagacaaggc

SEQ ID NO: 34415 - DNA, 362 bp, Setaria italica
  misc_feature (59)..(59): n is a, c, g, or t
  Peptide Sequence Number=SeqID_100389
ggcagccagacagccagtagcatctgcatctcctacgacctcggccccccgagttagtnttaaaccccccaaaaccaccgccgcgcgctgttccccgatccacgaaaaggcgcgccaggacctccctcctcagctccagatcctcctcctccccgcccggcccagcaccgactacaatggggaactcaatttccgccgccggtccagcgctgtgcgccgcgatcggcgccatcgagctcgtaccaacttcctggacccgcagcggacgggtgcgcgcaccgcggcagccgcccaagccccggcgctcggcagcgtggtccgggccttcctcccgctgtccgcggcgtggggattcttcatca

SEQ ID NO: 34416 - DNA, 389 bp, Setaria italica
  Peptide Sequence Number=SeqID_100390
aaatggaaatagaatttgaaacacctgtcattgagatgtttgcactgcatagacacaaagttttttcatcaaataaacagccaaaatagatgatgctatgcatatatagcaacgctttccagaacacagatacaagtgggaaaggaaatcattcaggctaaaaaaagatggcatgcacaagtaatatagatggatcagaatgactggctgattacaggtgctatttttggttgtgcattgctccaatgatatagatatacagtgtgcttaatgatactactaccacataccactctatcaagctatttccaatagctgataatgctagccctgacgaggtgcattatagaaattcttaaatcctagtttacagtcattacacacatcaa

SEQ ID NO: 34417 - DNA, 583 bp, Setaria italica
  Peptide Sequence Number=SeqID_100391
ccttgacagttctgggatgattcggatgatgtcaacaagccttcgacgcccatcattccttgcacagcacggattctgagatatttataagaggatctccgtgggaagttcctatagctctgcgataaaaaccttggctctgcatatagcccatagctaggaagaccaatggaaatagaatttgaaacacctgtcattgagatgtttgcactcgccgccgtctattgcagatttttgttctcgctctcccgccctcccctcgctgcccttcgccggctctggccgctgggcgctgcccggctgcggcgtctcctcggctcccggctggggataagcggcagtgcacggacgggagtcccaggcgtcgagcactagcgatagcgagccacactagcatactcacgctgcatcgtgtgatgtgtaccactgggccacagcccacgggggaatagaaggggggctggttcgtgtatatgggcagcgcacggtggggacggccggcagcgctcccacggctccgaatggcagcagcaccggtggagacgctgagcgcggatgcgaagggcagcagcgaagatgcagc

SEQ ID NO: 34418 - DNA, 1643 bp, Setaria italica
  Peptide Sequence Number=SeqID_100392
atcaaaactggtaaagttggcaaggaactaactgtgcagtagcaaaggctagttgaatttactatacagaccaggagaaatttctacgtctatgaacaaaccatagtcacataaattgccaatgagcagtccagacacactgatgccactgaaggcctttataaatttgtgcaacaggaatacaggattaacactcaacagcctgcaattcaatagtagtttcaaagcctatcggttcagtcttcacttaaattagcttgcagtatgcaaattttgaacacctgagatatgaattccatgtgtcatttggtaccagcagtccagcagttccgacaagactaccagcagtggggtcaatcttcacataggagaatagaaccaaggaagaaaactaaaggtccctgcaatttaaatccataacatatatgccatacatctgccatgtgtgcggtgatcaagagcgcgggaagaagcagccaagcaggaggtaatgcagttcagctagcaagcttgaaggcatcgataaataggccatatgtgaaacccatcttgaaattgttgaggagtgcaatgggaaaagtaactttaggccggctgtaatagaacttagtcacatactccgccagcaggacgcaaacaactgcggctataacatcattcacacccaatgcaccaaaagacagagagattgtctgtgcgacataaaagccacccagcagagagatgccaccaaaaagggttcttcttgatcggcttctgaaatagttccttgacagttctgggatgattcggatgatgtcaacaagccttcgacgcccatcatttccttgcacagcacggattctgagatatttataagaggatctccgtgggaagttcctatagctctgcgataaaaaccttggctctgcatatagcccatagctaggaagaccaatggaaatagaatttgaaacacctgtcattgagatgtttgcactcgccgccgtctattgcagatttttgtctcgctctcccgccctcctgcatagacacaaagttttttcatcaataaacagccaaaatagatgatgctatgcatatatagcaacgctttccagaacacagatacaagtgggaaaggaaatcattcaggctaaaaaaagatggcatgcacaagtaatatagatggatcagaatgactggctgattacaggtgctatttttggttgtgcattgctccaatgatatagatatacagtgtgcttaatgatactactaccacataccactctatcaagctatttccaatagctgataatgctagccctgacgaggtgcattatagaaattcttaaatcctagtttacagtcattacacacatcaagaataatgggagtaaccaagcaaaaaaagaataatgggagtaacagattattagtcaacagaagaatgtagtagttcacatcacataattatactcacaatgtaaactagctcttaggttccacgtgtattgcttccacaataaactaaacctaaactgcaatctggactgtgaacagcatacaatattctgaggagaaaaaacaaggcactatctttccatacggatacggtgagttagcatgcaagatcaactccaacagcgaccgtcacaatt

SEQ ID NO: 34419 - DNA, 257 bp, Setaria italica
  Peptide Sequence Number=SeqID_100393
aaatctacttcatttgaggtaccttggtctacgacatacatatggtattcatgagctcccggaagaaataggaaaactgaagtttctacagacacttgacttggaatattctagcataggggtactgccatcgggtgtttgccagttaacgcagttaatctgcctacgtggcaacttcgatacgtgcgcaccggatgggtcgttcctgaggaaggtgacgtcattagagtacctgtctatatgtattaataattgga

SEQ ID NO: 34420 - DNA, 306 bp, Setaria italica
  Peptide Sequence Number=SeqID_100394
gtagcaggacggcggcgacggcggccgcgacggcgctggcgatgccccctcccggcctgcctgcagaaggcgccgtacatgctgcagatccccatccactgcagctcgggctgtcccctcttggcgatgacggaggcctgtagcgccgccgcgaccgccgccagcaccgcgtacgccagcgcctggtcgcacgagaagacacaccaggccagggctcggctcgtcagcgtgccgccgccgccggcgcgctgggctgcggttacgcagcaccgcgcgacctgcagcaggctgtaacccgcggccgcg

SEQ ID NO: 34421 - DNA, 370 bp, Setaria italica
  Peptide Sequence Number=SeqID_100395
caactaaaaagtacgcttagtgaatctgaggatagaaaccaggagttactcatgaaaactgaagtcactgaaaaagaaattgctcatttccaagaaactatccaaagacatgaagaaaatatggcagcactggaaacttcgttgagatctgaaaggcagcaaaatgatgcaatcatgaaacaacaagctgactctcaggcggaaataggagagctgcaaaggaagcttgaagatgctgatggaagaaacaagcttcttcaagattctttacagagactggaacagagcgcagttgcaagagaggcaactttactaacagaacgtcaggaaaaagatgcaatatcaaaagctttaggtcagtaggtctact

SEQ ID NO: 34422 - DNA, 360 bp, Setaria italica
  Peptide Sequence Number=SeqID_100396
aagctgactctcaggcggaaataggagagctgcaaaggaagcttgaagatgctgatggaagaaacaagcttcttcaagattctttacagagacttgaagaagatgctactgcacgagaggctttaatggttactgaaaggcaagaaaacgaagtgacaaaaaagacactaacagaagctctggatcaaatcgaggaattagtcaaagaagttgagtgtgctaaccacagtgtgcatcagcttcaagatagtatacagagactggaacagagcgcagttgcaagagaggcaactttactaacagaacgtcaggaaaaagatgcaatatcaaaagctttagcagaggcacaaggaaggatcg

SEQ ID NO: 34423 - DNA, 705 bp, Setaria italica
  Peptide Sequence Number=SeqID_100397
tggagaaaaactgcaaagaataccaagacagaaatatcagccttcccatcaccagcagccccaggacgatcagcagtggttactcacctgtatttcacaatatcttggattttctgggagcaaacctgttgcagctctccttatataccaatgtcttctccattggaaatcatttgaagcaatgaagacgggtgtctttgacagcattttgcatgctataaactcagccacagaggttcctgtcacttagtttgtttttttaaacaaagtcatcgtgatgctttttaagattgatgaagcactacttctacttggtgaaaagagaactagagaattttattcatcaaatcttatagtaatctgaacacaaaagcacatctattcaacatgtatatgaaataaagattggcgatattagagcctacatgcacactcagtcactctggaagcctagaaatttggataaaatggaaagtgaaaagcttacatgccaactttggcgattccttttccatttattttatattgcatacaagaccacatcatgctattgtactagaatttgactaattgtcctgttattttcttcccctcctcaaaggctcaaaatgatatgagaacattggcgtaattaggtttagttaccaaactttagttacttaacgtttaaactaagtttacttacctttactaaacggttactta

SEQ ID NO: 34424 - DNA, 252 bp, Setaria italica
  Peptide Sequence Number=SeqID_100398
tacaaatccaacctatctatttgtagtttacatcgagcttgaaatctgctgtacgtgaggaatcgaatatggccacaagtttttctatactcctagatgatgattccaggttcgttttatgtgaaaaatgttaagccatattatttttaaaaactattaccactgatatctcatgatttcactcattcctcaatgcagtatacctttttcacttgatgatattacaaagacattgccagccattgaggtggc

SEQ ID NO: 34425 - DNA, 1071 bp, Setaria italica
  Peptide Sequence Number=SeqID_100399
acttcgttgagatctgaaaggcagcaaaatgatgcaatcatgaaacaacaagctgactctcaggcggaaataggagagctgcaaaggaagcttgaagatgctgatggaagaaacaagcttcttcaagattctttacagaggttagaagagggtgcaacaacaacagatgctctttacttagaagaaaagcaagagcatgaccaaacgaagaaatcactctctgaagctcaagagataaacaaggaattactaacgaaaattgaggaagctgagaaaaacatagatcagcttctggagaatgtggaaagacttgaaaaagatacaactgcaagagagtctatactgcttacgacaaagcaaagttacgatgagactgcaaaattgctacttgaatctcaagagagaaaccaagagttaatgcacatagtagaggactcagcaagcaaaattgttctgcttgaagactcagtaaaaagactcgaagaaagtactgcagataaagattctttattggctatagaaaggcacgaaaacagtgaaaccaagaaagaattagctggttctcagaaaaagattgaggaattgctaactgaagtgcaagatacccgtacatgtattgcagaacttgaggaatcggttaggagacttgaaggcaatttgggagtaactgaagctttattgctaactgaaaaggaacagaatgcttctactttaaaattactttcagaagcacaattgagaattgaagatttaataaagaaacttgaaggtgcagatagaaaatctgatagccttcaggatacaataacaagacttgaacaagaggccactgccaaagaggctttattgcttacagaaaagcaggcacatgaggcaacaaggaagactctcagtgaagttcaggaaaggaatgaagaattgctgaagaatattcatgataatgataaacatattcttcagcttcagtttactatacagaggcttgaggaaactacagttgcgaatgagaatttgctgttgagagagagggagcagaatgatgcaacatcaaaagtcgtctacgttttgtta

SEQ ID NO: 34426 - DNA, 3167 bp, Setaria italica
  Peptide Sequence Number=SeqID_100400
acactgatgaaaaatccaccctgcttcagactgctatacaaagccttgaagaaagattaagggagaaggaggctctattggcaacagaaagacaagaaagtgaagcaactaaaaagtcgcttagtgaatctgaggatagaaaccaggagttactcatgaaaactgaagtcactgaaaaagaaattgctcatttccaagaaactatccaaagacatgaagaaaatatggcagcactggaaacttcgttgagatctgaaaggcagcaaaatgatgcaatcatgaaacaacaagctgactctcaggcggaaataggagagctgcaaaggaagcttgaagatgctgatggaagaaacaagcttcttcaagattctttacagagacttgaacaagaggccactgccaaagaggctttattgcttacagaaaagcaggcacatgaggcaacaaggaagactctcagtgaagttcaggaaaggaatgaagaattgctgaagaatattcatgataatgataaacatattcttcagcttcagtttactatacagaggcttgaggaaactacagttgcgaatgagaatttgctgttgagagagagggagcagaatgatgcaacatcaaaagcgcacgttgagagtcaagaaaaatatgaagaattactaaagaaatttgttgatgttgacaggaaaattgaccttcttcaaggtaccatagaaaggcttggagaaaatacaacaacaaaggatgctctgctgctatcagagaggcatgaaaaggatgcagttaaaaaagcacttactgaggctgatgagaaaaatgaagagttactgatgaaagttgaagatgctaatgaaaaaattgaacaccttcaaactatgattattaagcttgaagataatgtagctgcaaaagatgtttctttggaagctgcgatgaaggaaaatgacacaatcaggaaatctcttactgaagctcaagagagaaatgatgaattactcaagaaaattagtgacagtgaatacaggatccacttacttcaagacactgtacaaaagcttcaagtagatgcaatatcaagattgtcttcttttgtaatggaaaaacaagaaagtgatgctgcaaaaagagctgttactgaagctcatgaaagaaatgaagatttactgaagagaaatgaggacctcctcaagaggaatgatgatttgattaagaaaattgaagagtctagtaaaattgtcattcaacttcaggaagctctacaaagaattgaaggaaaagcagccaacttagaggctgagaaccaagctcttcgtcaacaagcaactgcaactccaccatctactgctaaatctccagcttcacgctcaaagatcacaaggatccatagaagtccagagaatggccatattttgaacggtgacatgaggcaaactgagatgaagccgtcgactagcacatcagaagcaataacatcagcaggcaatgttcctgactcgggtgaccaaaaggaatttgaacatggagaaaaactgcaaagaataccaagacagaaatatcagccttcccatcaccagcagccccaggacgatcagcagtggttactcacctgtatttcacaatatcttggattttctgggagcaaacctgttgcagctctccttatataccaatgtcttctccattggaaatcatttgaagcaatgaagacgggtgtctttgacagcattttgcatgctataaactcagccacagaggctcaaaatgatatgagaacattggcgtattggttgtccaacttgtctacgttaacagttctccttcaacggtcattcaaaactactaggacggcaatctcaactccaaggagaagattttcatcagagcggatctttcatggaaatcaagctccaaatgctgggctggcttatctcagtggacaatcagctgttggttctgctggattgcttcaagttgaagcaaaatatccagctttgctattcaaacagcagcttgtggatctaattgaaaaggtttatggtatgataagtgacagtgtgaagaaggagctaaaccctttgcttgaattgtgtatacaggatccacgaacttctcactcaagtcttgcaaaaggccatcttaatggcatgggtcaacagaaccaactcacacactggttgggcattgtgaaaatcctcactagctacttggatgtactgaaggcaaatcatgttccatcaattttggtgcacaaacttttcactcaaatattctcactgattgatgttcaactatttaaccgattacttttgcggcgtgagtgctgttcatttagtaacggggaatatgtcagagctggactagctgaactaaaacattggtctgacaatgctactagagagtttgcaggttcagcatgggaggctttgaggcacatcagacaagctgtcgatttcctggtgatttctcttaagccaatgaggacattaagagagatacgcactgatgtgtgccctgccctcagcatacaacagctagagcgaatagttagtatgtactgggatgatgtgaatggtacaaacactatttcagcagagtttacatcgagcttgaaatctgctgtacgtgaggaatcgaatatggccacaagtttttctatactcctagatgatgattccagtatacctttttcacttgatgatattacaaagacattgccagccattgaggtggctgatgatgacttgctgccttttgtccatgaaaacccaagctttgcgtttttattgcaaagaggggagtagtcagtttttctctcaccatggagatttcgcccacctgtggataaatcaggattcctgcctaggatgtacagtatgcgtgattctttttataccagatagcaaggcattgaagattaggtgctaggtgagtttataggcttctgattttcattgatttgtttgttgattgtatatttgtattcaggttcttgccattttttttcgttgtagtcattttttgggcatgtatactaggggctaagggcagaaggccctgccctgtgagcatagaagcacgaggtgttgctgtaagtagggaagctgtacatgtgttgtaaatgataaaagaaatagaaatcccattgtccagaaaaacaaaaaaaaaaaaac

SEQ ID NO: 34427 - DNA, 684 bp, Setaria italica
  Peptide Sequence Number=SeqID_100401
tggttgaccgaccagtcaccatgagcagcgcgggactcccgcttctcctcctcctcgtttgctcgtcgtggctcctcccccgatctgatgccaggaggacgatggcggctgcaggggcgccggggccgccgatccgggcggtgaacctcggcggctggctcctgacggagggctggatactgccctccctcttcgatggcattcccaacaacgacctcctggatggcacccagctccagttcaagtccgtgacccagaacaggtacctcgtcgccgaccagggcggcggcgccgccatcctcgccgaccgggtgcagccgtccggctgggagaccttcaagctgtggaggattgatgagacgactttcaacttccgcgtgttcggcaaccagttcgttggcgtcaacgccaccggcggagtcgtcgcgacggccaccacgccggggccgtcggagacgttccagctcgtgcgcagggacagcgacaagagcagggtccgcatcagggcgcccaacgggctcttcttgcaggcaaagaccatggagtcagtgacagcagatcacagtgaggacacagactggggtgacgatgacccgtcagtttttgtcacaaataatgtcgcccgcttgcaaggggaatatcagatatgcaatggctatggcataacaaaagccacagaggtcg

SEQ ID NO: 34428 - DNA, 336 bp, Setaria italica
  misc_feature (18)..(18): n is a, c, g, or t
  Peptide Sequence Number=SeqID_100402
tatctttacacagacaancttgtgtttaattcgatgaaccaaacatgtcagagatcaaaatagggtcaattcctagggacaagctggatgtgaaacccatctgggaagccaaggccaggggtccggactatgttcccgccttttactgttctccaactgtattttgtaaccaaactgtggatgaacgtcgccatcaggaccctgctgaaatcggtcccaacgcagaaccgaaggccacctccaaacgccatgaaatgcttcgttcctccggtgatttcaggcttgtcctgccacctccatgggttgaacgccaacgggtcttcgtatatgtcagcg

SEQ ID NO: 34429 - DNA, 263 bp, Setaria italica
  Peptide Sequence Number=SeqID_100403
ggagacgcggccgtgatcaaagaagggtacaagagcttcccgagcggccacacttcgtggtctttcgctggtctgggcttcctgtcctggtacctcgccggcaagatcaaggcgttcgaccggggaggccatgtcgccaagctctgcatcgtcgccatgccgctgctcctcgcggcaatggtgggggtgtcgcgggtggacgactactggcaccactggcaggacgtgttcaccgccggagtcctcggattggtggtggcgcg

SEQ ID NO: 34430 - DNA, 659 bp, Setaria italica
  Peptide Sequence Number=SeqID_100404
acaaccaaaggaattaagacaagttacaagaaagaatagacccctaggagttgttgcaaggcttggtcagcaagggagtttcgccagatataattacattttcttcaatcattggtgtcctctcaaaagaagatagagttgaagaggccattcaaatgtttcacgtagtgcaagatattggaatgagacccaaagctgtggtgtataacaagatactacttgggctctgtaaaagatgtgaaatagataatgctattgacttttttgcctacatggtatctaacggatgcatgcccaatgaatcaacctacattatacttattgaaggccttgctcatgagggtttgttgaaggaggcccgagatctactgagcgagttgtgttcaagaggagttgtaagcaagaacttaatagaagagtggcaataaggttgaagatcaagctgggcatacccttttagtcatgatgaatcagagcactaagtgcttattcgttatccacagtaaagcagattgatggctgccttctgtgcttcatgtagatggttgtttgagggcccataatctcgtatgaaggaatcatgacaatgaaccttacttcgaagtgtcaagactcaagaccaacgagaccaagaaatgaatccggagtaaagcacaagc

SEQ ID NO: 34431 - DNA, 328 bp, Setaria italica
  misc_feature (268)..(328): n is a, c, g, or t
  Peptide Sequence Number=SeqID_100405
ccttcgcgcagaggcacctcaacgtcaagatcacccagctcgggtactactagatcaccgatctcaggcgacggcggcgatcatcgtcggcgttgtgagtgtatttgtatgggggtggatgtgttgttacttctttgtgttttttacactccgatggatgcatgccttgtttaattcttataaatggtgtacggatgttttgctttcgcaatgtttcgtgtggtaattaactgtgtttccagcaataaacaaaaaaaaaaaaaaaaannnnnnnnnnnnnnnnnnnnnnnnnnnnnnnnnnnnnnnnnnnnnnnnnnnnnnnnnnnnn

SEQ ID NO: 34432 - DNA, 577 bp, Setaria italica
  Peptide Sequence Number=SeqID_100406
cgctcgagtaatgattaatcttatttatcatacattgtttttaaaatttggggtcacatgcaatatcttgtggcttgtgttttccatcttttctggtcatgtctctaccataccatattttctactgaatttttttgttactactgttgtgtgcgattatgcaaatcattcacattttcctagctacgtttatgactagagctgggaggctgtgagcattgcttggctgtgaatagctacttttgtgacgagctgggaggctgtgagcctggttggctgctttagcaagttgctttccacgtattagaccgattattgttgtttcaaactaccatgtgttagacaccatatattatctttaacgctgcagccttcttaatatctactacctgaccaataatacagttcaatttcgaggttataaaaaatatctacgttagtatttggactggctcaaaataattgctgtatactcatgcttatgttccctttcccatttctatctgtttttggaataaccatgggctatgttcttttcataatcatgctgacaatagaataagaaacaaagaaataa

SEQ ID NO: 34433 - DNA, 1148 bp, Setaria italica
  Peptide Sequence Number=SeqID_100407
cgcggccgccccggtcgcggcgctcctccgctaggcctccgcgtcccaccgccgcgtcgtggtcctgtacgacccactgaacggcttcgtcgccgaggaggccgcgcggctgcccaacggcgaggcgtacgccctgcactgcaccgccgtgtcgtccatcgtcgggcggatggaagatgggaacgcgctcgtgcgggagcgcgggctcgggttcctccccctcgacgaatacgtgacggaggagttcttggagtacgccatcaaacgggcgagggcggaggaagggatcgcttcaccagccggcttgctcgccaactcgtgccgcgcgctcgagggcgagttcatcgattttctcgccgagcaaatggcgaccggcggcaagaagttgttcgccatcggcccgttgaaccccctgctcggcgcgagcgcgcccgagcacagcagcaaaaggcaccacgaatgcctcgactggctcgacgaacagccaccagcatccgtgctctacgtgtcgttcggctcgatgtcctcgctgccaagggagcaaatcgtggagctcgccgcggcgttgcgcggcagccaccagcggttcatctgggtgctgcgcgatgccgaccgcggcaacatattcgcggacaacggcgagacccagcacgcgaggctgcttgccgagttcaccaagcagaccgatgggaggggcctggtggtcaccggctgggcgccgcagctggagatcctggcgcaccctgccacggcggccttcatgagtcactgtggttggaactcaaccatggagagcatgagctacgggaagcccatcctggcgtggcccatgcactccgaccagccatgggacgcggagcttgtgtgcgagtacctcggcgccggatttctggtgaggccgtgcgagaagcaaaccaaggtgacaccggcggcaaccatacagcaggtgatcgagaggatgatggtctctgacgaagggcgcgcggcgcggcagcgcgcagcggaggtcggcgaggccgtccgcgcgtccgcggctgccgggggatcatcccggaaggatttcgaggacttcattgctcacatcacaaggtgatgccagaatgcgccccggttgggaaacgtcttgtttgtttcaatttgaattcccg

SEQ ID NO: 34434 - DNA, 350 bp, Setaria italica
  Peptide Sequence Number=SeqID_100408
gcttgaattagattatattgataccatcaataatcacttgccgttgggatggaggtggaggaggaggaggaggaccaccaggagattggatgttcgtcaccatgatggtggtctggacattggtggcgaagttccccagcagtagtttcctcactatatcatcctggacccggcccagctccttggccatgtcccctgctcccaagaagacgccgaaagatgtgcttccgctggcactccgtgaccagctcgagggcgcgttcgagggattcggccagatcctccagtcgcgtcacgcatcaccttcgtccttcatcgtctccgtcatctcgtcaaggcttgctgaggag

SEQ ID NO: 34435 - DNA, 439 bp, Setaria italica
  Peptide Sequence Number=SeqID_100409
tatatcacgttttgcactgtgagggacggctgtatatgtcacttttcagagtacaactgtagttgtggcgatgatcaactgattactgatgtcagtaaactctgccactctcatagtcttcaactcttcatgacattcaacatccatcggaaacagccggtcctgctgatgcagcagtaaccgggtgccggtgatgggacaatttaagttgaagaactagtctctaggcaaactagtccgcatatatattagctctgcatcagaactgcactagaactccgcgtacagctgtatcactgtcgcattgacctatgtgattctttcatgttagatcagcaaatgacctcacaatcagcagcctctgcagggattctcttcgccagttattctgcagtccatgtagcatcattgcatcattgcactgaaataaatcgatgtt

SEQ ID NO: 34436 - DNA, 506 bp, Setaria italica
  misc_feature (490)..(490): n is a, c, g, or t
  Peptide Sequence Number=SeqID_100410
aggcagttttggttctgtattcaaggggtacctaagcgactcagttactttggcagtgaaaaggctggatggcgcccatcaaggagagaagcaattcagagcagaagtgaattcagttggaatcatccagcacatcaatttagtcaaactgattggattttgttgcgagggagataagaggttacttgtgtatgaatacatgcccaatcactcccttgatgtgcatttatttaagactgatgatacaggtttggattggaatgtcaggtaccaaatagctattggagttgccagaggcctagcctacttgcacactagttgtcgggattgcattatacattgtgatatcaagccagagaacatacttcttgatgcatcttttgtacccaaaattgcagattttggaatggcaaaggtcttgggagagaatttagccatgcaatgactacaatgagaggactattggatatctagcgcctgaatggattgntggacagttgttacat

SEQ ID NO: 34437 - DNA, 492 bp, Setaria italica
  Peptide Sequence Number=SeqID_100411
aagaaagataattgtaccaatggaaaattagcgagcctagatgtcctaatgctggcatgcattcaactacacatgccgttctacaaccactaaaattttgatggttggtcataacaggagcaggtaactaaacagtacactatgaagagcatatccatacatccttctcaggtgatgcctaaagactagttaacacaagaaaaaatataatacattgctttgtgcaagaaacacgcacttttgtattcaagcaccaaaaagtgggcagacttattcgatggtgcatggaacacctagagaacctcagctggttcatacataccatgacgaacagctgctgctggtggtaaagacattttagttcaccagaaaacactcttgtaatggcaattatgacccaattcattctttatggggttgattatttagccaaaggaacctctagctaactttagtacgtaagtaacctaaactaaaaagtactaattttta

SEQ ID NO: 34438 - DNA, 573 bp, Setaria italica
  Peptide Sequence Number=SeqID_100412
aagtaaggaatacaagaagaagaaataactttggaaaaagaaacagagggataaccttgtaggggcaacaggcagtagaaattccagaaaattactctatggacagcctaacagtagatgccatgagaaaaaaaatatctagatccagaaatataaaccattcagataacatatacaaatgccaaaaagatgataggcagcgcttggtagaagactatgggtacataaagccaccaaacagtagcaaaatttgtgatgatcagtcaagattttcaggaagtactttgtaaagatttataccaaataggtacttgtattttttatgcaccagaacattacaaatcgttggcacatgtagaaatggtatttataactgcggcagtagtgccaaacagagttagtagcatttctggtgaaccccaacaagaaagtttgctaccaagactacaactggacaaaaaaaacatcacaactcagaatttgtacataacatatttgtcggcaatgttctggaacctatatgctatatagttactattctctattcttagtgccatcaataaatcatttgac

SEQ ID NO: 34439 - DNA, 1115 bp, Setaria italica
  Peptide Sequence Number=SeqID_100413
ctgaagaacaaggagaaaacttctaagcctcagtcaacatctcgtttacatcaacacatgctgcatatggcattgttgagaaaacatagaagttctactgttttgtacaaggacagaacatgaatcaaggaagaaactggatgaggcatgggattgtatactacttcatgaaagcagtgtgaataatcaaagcagagaaagaatggacccttgtaatgaaatgcatagtaaccttttctggagaaaggaactaaaattcctcagtaaataagcaaggcatagaagtcagtgagtcaactaattgtccagcaaatactggctgtgaagtagtggtgaaacatgctacagggcccaaagatgatatttttggagatctcccgctcctggaattggaaagctccaagactatgtttcgaacaggtgttgatgaacttccgactgttatagaagaatcgttcataacaagtcaaagtgaagcagattctataccagaagctgtacccttgagactgatagatgcatctgacatcactgttcagacgccatctcctcttgttgatttggtgaaaagtgaagtaaatccgcacaacgagccagcattcatctctcacagtgatgttgcaggaagtcgcccttccactgtccggatggatggtctgccacatcataagaacatcagcgtaatggaaccagatcctggtaatatgcagttgaaatttaacgggtctgccttaagtactaattctgacctgaggtcaaaatgtggttctagaaaccctctgcagggttgttctgatgcgaataaaaattgctcgaaggaaataaagaaacatagtacaagttctaccagttcacccgccatgagaaccagaactgaagctactaaatgtaaagatgcattggttaagggcaagaagagtactgatatcgctgcagtggttgcactacctgcacccatgaaccatctttcctctcaagtcagcgtgttgccctctgcagtatcacaaggggttttcagcacaagaactaatgcagatgacatgtcttcattcagaagtatgcctgccaaggaatgcatcccgtctactagaccttttggatgcctgccaatgaat

SEQ ID NO: 34440 - DNA, 168 bp, Setaria italica
  Peptide Sequence Number=SeqID_100414
gcccactggtacaatcttctggttgcatcagtgtcctcagtacgtagcaagcttattgcgtcgtatagcaccagtaagttgcaagacatggcggctgcaacggtgaggtgcttgctgacgatcgccgtggtgctggctcccttcctcgccggcgccaccgcgggcggg

SEQ ID NO: 34441 - DNA, 307 bp, Setaria italica
  Peptide Sequence Number=SeqID_100415
tttttttttaaactaaaaaccggaaaagataaatacttgaacaaaattctagcactggcaagggcgggacttcgtgaccagcttatcaatggccaggcacgaagtcccgcccttgccagtgcactcttccgccgccttcttcagctggccggccctcgacctcatctcggcgccatccctgcccgtcatgagccggcggatggccgcctcgactctgcccatctcaagctcgcccactagctccaaccccaccctccacacgtgctccacgtacctcgcgttccccatctggtcgccgaagtagggg

SEQ ID NO: 34442 - DNA, 386 bp, Setaria italica
  Peptide Sequence Number=SeqID_100416
ctccccgccgccgggccgagcagccccgtccacctctccgcctcctccctcccgtcgctgttgaggaacagcaacgccgccatgtcatcatcctcaccgtgctccaagcccacattggccatggcggccgccggcgccgtcgcctccaagctgccgccgcactccgtgggactgagctgcgacgcgacgaacttgtcgagcgccctccagtccgtggctaccttgtcggcccgcgccttcttgccccgcctgccgctttcggcgccgtccacctcatcggccgacgacgcttggcttgggttagggcgcgagcggcgccgacgggctctcgagctgcggcagctcgaccaggtggctggagtactgcagcaacacggcggcgccgt

SEQ ID NO: 34443 - DNA, 514 bp, Setaria italica
  Peptide Sequence Number=SeqID_100417
gctcgattccgccaacccctcgacccgatcggctcccccgatcgccgcacccgccgggcgctccaatcggcttccttcaagatggagcacgaactagaaaagaggctatcagaatctgctaggatcagggacaagtacccagacagaattcctgtgattgttgagaaagctggcaagactgatgtcccagagatcgataaaaaaaagtaccttgtccctgctgatctcaccgtcggccagtttatctttgtggtgaggaagaggatcaagctgagccccgagaaggccatctttgtctttgttaagaacactttgccaccaactgaacaaggacgaggacggcttcctctacatgacttacagtggcgagaacaccttcggctctgcctaagcagctgccccctgccactgtaaataaacaagcttgaccaggctgctgcttcttgccgtcgtaaacatggtgtacatacacgtcgtctctactacgctgccggattgcttcaatggtttattt

SEQ ID NO: 34444 - DNA, 241 bp, Setaria italica
  misc_feature (234)..(234): n is a, c, g, or t
  misc_feature (239)..(239): n is a, c, g, or t
  Peptide Sequence Number=SeqID_100418
ttattaacgaatcaagtgagaggattagagttagatcaccaaaaggaggaaagcactggcttcagttacataacatttcctcttattagtgagtcaaatagagtgatctataacagttatataacagatcgtatgtgctcaccaaattaatagttgcaagtttcagtaaaggtgcaggtctccagagtccagacaggtgagaggaatagagttgcatcaccaaaagaggaaacnccggntt

SEQ ID NO: 34445 - DNA, 382 bp, Setaria italica
  Peptide Sequence Number=SeqID_100419
acgaattccatggtactactctccagtctaagctcgttttcctctgtaatatatatctccctagcatcaaatccctctgcaaatgcttgacaaggaccatgtattttcgtccaggataaacataccaatcttttgaggatggaatattcgttatcccatgaaaatgagcagaatcatccataacagggaccagataaaggaagagtgttcgtggaataacaacgtgtagagatgatacttgttcatgaccttctactcttgtgtcttcaacaataatcttagtaaagcccagacccaaagcatgtgagatacccaaggaactatccacttgggccacagaagagtttgttgcatgccatcgatgatatggtgatggtaattt

SEQ ID NO: 34446 - DNA, 437 bp, Setaria italica
  Peptide Sequence Number=SeqID_100420
agactttaggaaataatacattgtttgcagcatctaggcttgctgtcgttgagtccctccttcccagattgacaacccaagttggccctccaagcgtaacaacggaatcacgagctgcaacagcgaggatgtcagcgcatgataccacctgcggacagataccctcaatctgtgctttgatgctgtcaatcacatcaaatccacgtatggagttgttgttcggaacagcagtcttctcccctgtgaaggttggggtgtcatcaagcagcactgagccatcacaaccattgacaaagcagtcatggaagtggaggcggagcaacgatgcacccatgcggttctcctttgccacagcagactttacggctgtttggatggtgtacagtgcatttgggcatgacttgtcatagaaatttgcagtaagctgagctgaaacc

SEQ ID NO: 34447 - DNA, 434 bp, Setaria italica
  Peptide Sequence Number=SeqID_100421
gtgatcttgttaggtgaattgtacaagtttgagatcaccaaaggatgtaccttctcaatataagtttgttttcccaatttcttccacaaatctcgaacaaaagagtcttgaagaagggcaaccttcagatgcgaatattctggtgcctgtaagatcttctgaatgatgtgcagaatgagttccttagttgcttggatactcaagccctttataaattctttaagcagagacaaggccgattcagtatcaacatctaaaaaagatgatgaaacaagcgataagcagtaaggtgcacacatttcagcagcaaattctcccatagctttaagtgcaccttcacttgcaagcttagcagcatacttgattcgctctctagatgtacacaaaacttgaagtggagcaagaaacatatatgcagatcgaattgatggagg

SEQ ID NO: 34448 - DNA, 1039 bp, Setaria italica
  misc_feature (958)..(1039): n is a, c, g, or t
  Peptide Sequence Number=SeqID_100422
taatagataattatgccagtacatgggagaggtgggggctaattttgaagtttatcgcaatgatgagatcaccgtggaagaaattaagaagttggtagctgtttcttcctatgtaaagtcctacatgtctgcatgttgatttctcttaataaaaaagttatatgcagcgtgttgcttgttctacaggatttctcctagaggaatacttatctccccaggccctggcacgcctcaagattcaggaatatccttgcaaacagttacagagcttggaccctctatacccttgtttggggtttgcatgggtttacaatgcattggagaggcatttggagggaaggttgtccgatctccttacggagttgtgcatggaaagggctcccttgttcattatgatgagaagcttgatggaactcttttttctggtcttccaaacccattccaagccggaaggtaccacagccttgtaattgaaaagggtagctttccgcgtgatgccctggaaattgttgcatggacagatgatgggttgatcatggctgctcgccacaggaaatacaaacatattcagggcgtgcagttccatccagagagcatcataaccactgaagggaggttcatggtcaagaatttcatcaagattattgaaggctatgaagcattgaactgcattccatgattcgtctagttggaagcagcatgcatatgtggtgactgtaaaatgctgtaactatatatattctggtctcccatcagcgtatttccgctggtgctggaacatgtaaacttcagttgcccacgttcagatgtcgtcactggtcacaacactccatgccgaactactgtacatgttcgcacatttgggtcacattacaatcattggacatgccgaactactgtacatgttcaattaattagttaccactctaaatcccagcgaacaactcggtagaaaacnnnnnnnnnnnnnnnnnnnnnnnnnnnnnnnnnnnnnnnnnnnnnnnnnnnnnnnnnnnnnnnnnnnnnnnnnnnnnnnnnn

SEQ ID NO: 34449 - DNA, 604 bp, Setaria italica
  Peptide Sequence Number=SeqID_100423
ataacaaatacataaaggaatcagaaagcaaggtccgacgtgtaacaatgtattataaacatactggattcagaattcagacgacttgctatattaatcaaaagctcagtcaacaccgcacaattcaaattgccaagctgaatttcacaagatcaaagcatcttccagtccagcgaaagggcggacagccctatgctcgagcagatggttatgaaaatctgagaacttccacctgcagtgctcggctccaattacatacaggcttcctgagtatattaccctctaggcctctactaatttcagggtaatgatcacatctgtagcatattggtgaataccaattcaagtgctaacttcattgcacctcctctgaataacccttatactgaatatcatgtaaaattttccattgtaagttgaaccattcaaacatcaacacatgggaaggatgtccctaaactccaaaacctaataagacttatactgaatatcatgtaaaattttccattgtagtaggttggtactccaaaccccaagtatcagatatcttgtactaaatgtatagtctgtccctggaccacatttggcaccctcttatagaaga

SEQ ID NO: 34450 - DNA, 274 bp, Setaria italica
  Peptide Sequence Number=SeqID_100424
atctcgagcgtgtgggggacgaaggcgccgcagaagcggcagaagtcggcgtaggtcatgtgattgggcacggcgagcacgcacacccgcggcttcctccccaccgggagacgagacgaggaggcggcggcgggcggttccgggtggaggaggacgacgccgcgggtctcctcgatgcgggggttccccgaggagaagtggaccgaatcgagcgcgtgtgctgaggtggagggcgcggcggcagggggcagagaggcggcgggcttgccggcgg

SEQ ID NO: 34451 - DNA, 1228 bp, Setaria italica
  Peptide Sequence Number=SeqID_100425
tagccaccgattgaaccctagccgcgccggcgcgccgccgtcgaggcgtcgacacgtcgcttctcgccgggttctttggtatgggaatctttttaattgttgttctctcgactgaagcaaccaagcaacttcttcccaatcagatgatcatctaaactcaaaagaagagaagaaacaagaacaagagattggtcttcttgcagaagaagcagcacacctttgacaatatcaatgggagccacctgtagagcttgatcttcttgcagaagaaacagatgatcgtctataaataatggaatggtttagtaagtttcaccaaggtaacagctgagttagaaccatagcagaaagatgtctccacctgttaaggtcatcggccacatcgccagcccattctcccaccgtgtcgaggccgccctgtgtctcaagggtgtgccctacgagctgatccaagaagacctgttcaacaagagtgagctgctgctcacgcacaaccccgtccacaagaaggtgcctgtgctcctccatggcgaccgcgccatctgcgagtccctcgtcatcgttgagtatgtggacgaagccttcgaggggccacccctcctaccgatcgactcctacgaccgtgctatggcccgcttctgggctgacttcatggacaataagcttctcaagctgttctggctggcccactggacagagggcgaggtgcagaagggaataacgaaagaggcgaaggagagcctggcgcttctggaggataagctcagggggaataggttttttggcggtgacaccgtcagctaccttgacttggtctattgttggttagctccttggctcagcgtcgtggaggaggtgactggagtgactgtggtagacgaaagcgagttccctgctatacgccagtgggaaaaggagtacaattcttgcgaagctttgaagccgtgcatgccggacagagaccaaatcgtcgcctacttcattgaaagcaaggagagctacaaaatgttcgccaatgcatgggcggcgcagcagtaattgtgtgcaagaatacgaatcaatgtgtggaatatcatattgtgcccaaataaacatgcccatgtttcaggctggtttattttgtgtgaattcatatgtttatttgtgagttggtactacactccccgctttattaagacaaatgaataccatattttgtttttagtaaaagttctagtacttttgttgt

SEQ ID NO: 34452 - DNA, 381 bp, Setaria italica
  Peptide Sequence Number=SeqID_100426
taatgaccatatccttgtgaagtaaccctaacttattgaagaattaataagatcaagctgcagggaaaactggattctgagattagtttgtttagatttgtttcacatagcgggtgataaatatctgatttactaatagctggtcttaactgccatacatttaaaaacgaggaaaatagaaaatactcattataataaggaaaaaccttttcactaactatggagccaataaatcagatatttaacatctactatgtgcttggatgatggcatactagtgctttactttgtcaggactggaaaatataattggttagaagtgcatgcttatatttgaaagatagatcatttggataaagtagacaagaacaaagacctcgg

SEQ ID NO: 34453 - DNA, 296 bp, Setaria italica
  Peptide Sequence Number=SeqID_100427
gcttgcagcccaggatggaggtgtagaggtaaaggaaggcggagaggccggcggagagccggatcttggcctcggggatgtcttggccctcaaagagcttggcaatggcagcgagctcgtcaggggagcacggcgtcggcgccccggccttgccgcccacctcccccagcgccctgcggatgcgcgagcacggccacgagaaggtgaggcacgagtccctgaggtccagctccaccacgcctgcaccgccatcctccccttggggagaggctggagggagatgtggtgtagaggtc

SEQ ID NO: 34454 - DNA, 1966 bp, Setaria italica
  misc_feature (1944)..(1966): n is a, c, g, or t
  Peptide Sequence Number=SeqID_100428
aagagagagagagagagagaacatcccgctcctacaaaccccaaatccccagcggcggcggcgatggacctctcgtcggcgggctccggcggcaactcgctgccgtcggtcggccccgacgggcagaagcggcgcgtgtgctacttctacgacccggaggttggcaactactactacgggcaggggcacccgatgaagccgcaccgcatccggatgacgcactcgctgctcgcccgctacggcctcctcaaccagatgcaggtctaccgccccaaccccgcccgcgaccgcgacctctgccgcttccacgccgacgactacatcaacttcctccgctccgtcacgcccgagacgcagcaggaccagatccgcctcctcaagcgcttcaacgtcggcgaggactgccccgtcttcgacggcctctacagcttctgccagacctacgccggcgcctccgtcggaggggcagtcaagctcaaccacggccacgacatcgcaatcaactggtccggcggcctgcaccacgcgaagaagtgcgaggcgtcgggcttctgctacgtcaacgacatcgtgctcgccatactcgagctcctcaagcaccacgagagagttctgtatgtcgatatcgatatccaccatggagacggagtcgaggaggctttctacacaacagacagggtcatgaccgtctcgttccacaagtttggggattattttcctggaacaggggatatccgtgacattggccactcaaaggggaagtactactctctgaatgtccctctggatgatgggattgatgatgaaagctatcagtccctgttcaagccgatcatgggcaaggttatggaggttttccgccctggtgcagttgtgcttcagtgtggtgctgattccttgtctggagataggctaggctgcttcaatctctctatcaaaggtcatgcagaatgtgtcaaatacatgaggtctttcaacgttccattgctgcttctcggtggtggtggatataccatcagaaatgttgcacggtgctggtgttacgagacgggagttgctcttggtcaggagcttgaagacaagatgcctgtcaacgagtactatgaatacttcggtccagattacactcttcatgttgcaccaagtaacatggagaacaaaaatacacgacaccaactggatgatattagaagcaaacttctggataatctttcaaaacttcggcatgctcctagtgtccagtttcaagagcggcctcctgacacagagttgcctgagccagatgaagatcaagtggatccagatgaaaggcacgatcctgattctgatatggaagtggatgaccacaaggctgtggaagagtcaacaaggaggagcaacattctagggataagagttaagagagaatttggtgaaagtgacaccaaagttcaggatggtggcagagttacatctgaacatagaggactggaacccatggcagaagacattggttcctccaagcaagctcctgcagatgccaatgcgatggccatcgatgagccaggcaacgtcaagaatgaaccagagagctcaactaagttaccagaccaaccagccatgtaccataagccatgactgcgacatctgaacttgccagctgtctggtgtccaaattcctggacgctttcgacggtccaaaaactaaaagtgaatccatgatacagcgtgcgattttaaattcgatttgagttctacccatctgtaatctgttaatcccatgggagtattccatggcggtagtgaagttccatgagtccaccgggcaatgcttgaggttgagatagacgatagtctgacccatgtatacatgatatgccagttaagttgtacaggcattagttaatgcaaatatgcaatgaacttgaaggttaaaaaattaaaaatttaacttaacgaaaaaannnnnnnnnnnnnnnnnnnnnnn

SEQ ID NO: 34455 - DNA, 167 bp, Setaria italica
  Peptide Sequence Number=SeqID_100429
atcgagaccctgaaagggattttgacagatcaaaagtcaaaggggtcgttgcacgtcttattagaataaaggatagctcagcagcaacagcactggaggttactgcaggtggaaggctgtttaatgtggttgttgatacagaagacactggcaagaaattattgaaa

SEQ ID NO: 34456 - DNA, 1050 bp, Setaria italica
  Peptide Sequence Number=SeqID_100430
tttgtttttcttttgttttcttttcttttgtacttcgtaattagtactagaccacttggtcatcagtcactcggtcgcgccattaatccgagctggcaagctactagcacggccattattccatttgcttgctagtttcccactgcccctggaagaagaagccgcgccgccgtcacaagcatgcaggggaaggacgccgccgaggacgtcgtgatcgtgggcgccgggatggccggcctcgcggcggctctcggattgcacaggaaaggggtgaggagcctggtgctggagtcgtcgccgtcgctgcggacgtcggggttcgcgttcacgacgtggaagaacgccttccgggcgctcgacgccctcggggtgggcgacaagatcagggagcagcatctgcaggcccagaggttgcgcgtcatctcttccgccaccggagagatcgtgcgagaagcagacctcacgcagcaggggaaacgaggaccccatgaaatccgttgcgtcaggcgcaacgtgctgctgcaggccttggaggaggagctaccaaagggcaccatccgctactcctccaagattgtctcgatcgaggaggatggcgacatcaagatccttcagctagccgatggctcagttctgagagcaaaggtactgatcggatgcgacgggatcaactccgtggtggcgaaatggctcggcctcgcgaagccgtcctactcggggcgagcggcggcgagaggctttgcgcattacccggacggccacggcttcgagcccgagttcctgcagttcatcggccacggcttccgctccgggatgctgccctgcaacgagactgacatctactggttcttcacctggactcgatccgaacacgataagggcgtcgacgagagtgcggcgaagatgaagcagttcgtgctggataagctccttggctcgaaggtgccagaagaggcgctggcggtgatcgacaggagcgagatgagcgacgtcctcgccgcgccgctgcggttccggccgccgctctcgctggtaaccgcgagcatcagc

SEQ ID NO: 34457 - DNA, 955 bp, Setaria italica
  misc_feature (933)..(955): n is a, c, g, or t
  Peptide Sequence Number=SeqID_100431
ttccggttaacggttccttaacggttcttttcgttagttcccgtagtttccttgtctagtttctattcggtcctacggtctttccgctccgacgtgctgccctgcaacgagactgacatctactggttcttcacctggactcgatccgaacacgataagggcgtcgacgagagtgcggcgaagatgaagcagttcgtgctggataagctccggggctcgaaggtgccagaagaggcgctggcggtgatcgacaggagcgagatgagcgacgtcctcgccgcgccgctgcggttccggccgccgctctcgctggtaaccgcgagcatcagcaggggcaacgtgtgcgtggccggagacgcgctgcacccgatgacgccggacctcggccagggcggctgctcggcgctggaggacggcgtcatcctggccagatgcctcggcgaggcccttgcgggcaaggacgccaagggtagcggtagcgccgagaacgggagaatcgaggcgggcctccgcgagtacgcaaggatcaggcggtggaggagcgtcgagctcgtcgcgaccgcctacacggtcggcttcatacagcagagtgacaatgcaatcgtaagcttcctgcgggacaagttcctgtctggagtgctcgcagggaggcttctgaaaatggcggactatgactgcggcacgctctcaaactagctcgtcgtcttctacttttatgctcgtgcgtccccgtgaaacgtgatctcgaggtgttaggtgttgtggtaaactcatgaatttatatgttggaatttatattcccttcattagaaaatgaatatcctagtaccataaataaataaattgtatcgaagtaagcttctcggccttttttttattttgtatgcataaatctcatctaatatagtctccattcatctggtgtataccttnnnnnnnnnnnnnnnnnnnnnnn

SEQ ID NO: 34458 - DNA, 266 bp, Setaria italica
  Peptide Sequence Number=SeqID_100432
cgttttaaataaacttgaaatccagcggttgatgctgcgaagggacgacgcagctgaggtcccacacggcggcggccgcccgctccaacggcagggccttgcaggggtcccacgagccggcgacaggatgggagccgaagaggtgggggtcgaggtcgagctccgcgagccaggggctctccagcttgacggatacgaagagctggtcggagattccgccggagctcgccatcgccggcgagatgggagcctttgtgggacttgca

SEQ ID NO: 34459 - DNA, 232 bp, Setaria italica
  Peptide Sequence Number=SeqID_100433
gcgggggggtttggcgtctcagcgcctgtgctgctactgctagtgtgctgggcgtgcaaagtctagcgaaagcgagctgtgccgcgctttaccggcacagggggcatatcgatcggcatgccccggccggccacttgaccggctgcctgctttcctattttttttctttgaaaaggcggttcttgtcagtggcatgcctgtggttcgtttgtgcggttggtcgtgaggtttt

SEQ ID NO: 34460 - DNA, 937 bp, Setaria italica
  Peptide Sequence Number=SeqID_100434
ttacattgcagtgcatcatatacgtcaaatgaacaagcgtgcgtattcgtagggttacacatttacagtacaaactaggatctacaaaatggttgtacaacacgttgccttggggcctgttctcttctcggagaggaagtagaattgctacagattacaattgttagttgtcaagtagactatgcaaccttcggatgcaactgctcgagtgccaattttgggatattgattcatgtctaaagactccatccagattattggttcaggaagctcccaatttcagttcggaaagttatagtatcaactatcaattcggtgcaatttacttggattgttctgtaccctcagcaacgaagcccgatgcttctgccagaacttcaagttcctgatcaccgctcagaacctttccattgatgaaccatgttggaaaaccttcaagaccagcagcttgacattcttgagtcattttctttcctttaccagctccatttgggaaacattccacatagtctaaaatttttgtagcttcacgaccaaacatctgtttttgttcattgcaatgagaacaccagaatgctccatacatcttagcacctatagagtgcaaatgtctagccagtgaaatagcaaatggggatgattcggttgttatctctgtttcatatggttctaatacaaaatcatctgtgcctttcaactgagtagtagccgaactgtacgagtttgtcaaagcaagagctataatgacagctacagctacctgaataccagcgaacttctggatgcgtttaaaaccgaagtcctttactctgatgaaaagtagagagaacgagagaaatgctgacaacaagcagtatgaacaagataggccaacaaatttagtgcttaggatgtaaagaaaataagcactcgcagtcgccatagaagtagcaagcag

SEQ ID NO: 34461 - DNA, 509 bp, Setaria italica
  Peptide Sequence Number=SeqID_100435
cagcatgctcataatgaccagaagcagaagattcaaccagatcaaccttatcaagttcctaccagtgcggttctccctagcccaacgtcattaccaagccatttgcgtgaaaaatttggcttctctgatcccaatgtgaactcttccagcttcattagctctagcagcaacgaaaacatgttggaatcgaacttccttcagggaagctcgaaatgtgtggacctgtctagattcaaccaaccaacagttagtgagcagcagcagcagcaacaggcgtggaagcaaaagtttatgggctcacaatcaatgtcttttgggggctcggtttcgcttaactcacccactagcaaagatggttctgttgacaacaaagttggccgtgatgtgcagaaccagtccctttttagtcctcaagttgacaattcctccctactgtacaatatggtacctaatctgacttcaaattgtttgttggtattaactaattattattcttacgtatttccctt

SEQ ID NO: 34462 - DNA, 819 bp, Setaria italica
  misc_feature (57)..(57): n is a, c, g, or t
  Peptide Sequence Number=SeqID_100436
ttcggttgcatggattgttggggttttggctgttgccaataacaggtggtatagtgnggtttgtaggattcacacagcagcctccagcacaggagcttatcgcacgggatattcatgatgtagagtggaagttcaggcatatcttccgaggcaagttcagaaaaaaattcgtattgtcttttgtctcgagaggaactgggtcagatgtttggtattaagggtcagttggacgaccctgatagatcaggctggcagcttgtatttgtcgacagggagaacgatgtgcttctccttggagacgacccgtgggagtcatttgtgaatagtgtgtggtacatcaagatactttcacctgaggatgtgcataagatgggaaagcaaggaaacgatccacgctacctatcttaaattgatacatggagctgtttctggctcccatgacgattctgcggcgcatggtagcactcttgctcgtgacagtctgcaccgctgtgctcgcatgttcgcccatgtcctctcgagcatgtacaccatgcacgtcttcagaactccccgttatctgtatccggagcgggccaccgatactccggactgatattttgtaagttccacttaggaatcaagtatgagtaactctatcctagttggcttgtagctcgcacggcgctcgtgttgcgtcagatcttcggactaaattcttagttgaaactgtatcgtgattcgtaagttatgtatttgatgattcctcggcatgcgttcgacgatgaactgcaataatttgaatgcaggaggattagttttaaaaaaaaaaaaaaaaaa

SEQ ID NO: 34463 - DNA, 2498 bp, Setaria italica
  Peptide Sequence Number=SeqID_100437
gtcgtccgcggccagcatcgggcagccgccgccgccggttgttggctgtgtgcagagaagaagtgcctcaactcggagctgtggcatgcgtgcgccggcccgctcgtctgcctcccgaccgtcggcacgcgcgtcatctacttcccgcagggccacagcgagcaggtggcagcgtcgacgaacaaggaggtggacggccacatccccaactaccccaacctgccgccgcagctgatctgccagctccatgatgtcacaatgcatgcggatgtggagactgatgaggtgtacgcgcagatgacgctgcagccgctgaacccacaagagcagaacgatgcatacctcccggcggagatggggatcatgagcaagcagccaacgaattacttctgcaagacgctgacggcgagcgacaccagcacgcatggcgggttctctgtgccccgtcgtgctgcggagcgcgtcttccctcctctgggatttcacacagcagcctccagcacaggagcttatcgcacgggatattcatgatgtagagtggaagttcaggcatatcttccgaggccaacccaagagacacctgctgactactggctggagtgtgtttgtcagtgctaagagacttgttgctggagattccgtgctattcatatggaatgagaagaaccagcttttgcttggaatcagacgtgccagccggccacagactgtgatgccctcttctgttctttcgagtgacagcatgcacatagggctccttgcagcagcagctcatgctgctgcaacaaacagccgcttcacaattttctataatcccagggcaagtccatcagaatttgttatacccctttcaaaatacatcaaggctgttttccacacccggatatcggttgggatgcgattcaggatgttgtttgagactgaggaatctagtgtccgcaggtacatggggacgataacagaagtaagtgatgcagacccagtgcgctggcctagttcctattggagatcggtaaaggttggttgggatgaatcaacagcaggagaaaggccacctagagtttctctctgggaaattgagccattgacaacctttccaatgtatccatccctgttcccactgcgagttaagcatccttggtattctggagttgctgctcttcatgatgacagcaatgctttgatgtggctgagaggagttgctggtgaaggaggcttccagtctttcaacttccagtcacctggtataggttcctggggacaacagcgactccatccatccttacttagcaatgaccacgatcagtatcaagcagtggttgctgctgcagctgcttcccagtccggtggttatctgaagcagcaattcctacaccttcaacagcctatgcagtcccctcaggaacagtgcaacctcaacccgctgctgcagcaacagattatgcagcaagcgagccaacagcaacttgttagtcctgattctcaaaatattcagtctgtgctcagcccaagtgctatccagcagcagctccaccaactccagcaaatgcagcatgctcataatgaccagaagcagaagattcaaccagatcaaccttatcaagttcctaccagtgcggttctccctagcccaacgtcattaccaagccatttgcgtgaaaaatttggcttctctgatcccaatgtgaactcttccagcttcattagctctagcagcaacgaaaacatgttggaatcgaacttccttcagggaagctcgaaatgtgtggacctgtctagattcaaccaaccaacagttagtgagcagcagcagcagcaacaggcgtggaagcaaaagtttatgggctcacaatcaatgtcttttgggggctcggtttcgcttaactcacccactagcaaagatggttctgttgacaacaaagttggccgtgatgtgcagaaccagtccctttttagtcctcaagttgacaattcctccctactgtacaatatggtacctaatctgacttcaaatgttgtggataacaatatatctacgattccctctggatcaacatatctgcaaaatccgatgtacggttgtctggatgactcttctggtttgttgcaaaatacaggagagaatgacccaacaaccagaactttcgttaaggtttacaagtcaggatcagtggggaggtcattggacatcacccggttctctaactatgctgaacttcgagaggaactgggtcagatgtttggtattaagggtcagttggacgaccctgatagatcaggctggcagcttgtatttgtcgacagggagaacgatgtgcttctccttggagacgacccgtgggagtcatttgtgaatagtatcttgtacatcaagatactttcacctgaggatgtgcataagatgggaaagcaaggaaacgatccacgctacctatcttaaattgatacatgcgagcacagcggtgctagtacttgttcttacgttagttcttaagtta

SEQ ID NO: 34464 - DNA, 140 bp, Setaria italica
  Peptide Sequence Number=SeqID_100438
agccaagttcaaaccgacacggaagccctgataggtggataagagaatagttagctgtacagcattagatatttactattgataatgaaaattcaggttcgtacttggactccttttgtcccagttttaaagcctgggct

SEQ ID NO: 34465 - DNA, 250 bp, Setaria italica
  Peptide Sequence Number=SeqID_100439
gtcacttgtacaaccagagacagagcattcattatgcacatccacaacttcacttgcaacagatggagaaaggacaagctccagttcttccacaacaatctcgcaactagcagcaaatctaactagcagggattttatcgatccttctttcagcataataggagatcccgacaacttgcggtttattaaatcggcgttgagggcgaggtcgttgagctgcaccgtgccgcggccgagttggatgtcgaac

SEQ ID NO: 34466 - DNA, 331 bp, Setaria italica
  Peptide Sequence Number=SeqID_100440
tacagctgctaatatgtgtaggaaacttccttccgatgcatccgattttgtaatggaagcggttccacttcttacaaatctactgaactaccatgattcaaaagtactggagcatgcttctgtctgccttacccatatcgtggaagctttttcatcatccccagaaaaattggatgagttatgcaatcatggattggttgcacaagctgctagcctaatatctgttagcaactcagcaggacaggcatccttgagtacatcgacatatacgggtgtgattcgtcttctctcaatatgcgcaagcggatcaccattggcatctaaaacactt

SEQ ID NO: 34467 - DNA, 218 bp, Setaria italica
  Peptide Sequence Number=SeqID_100441
gcgatctccctcgacgtccccatgacagcgtagatcagaggtggcacaacgctcgtgtaaaggccgtactgagggtccagtttggcaagattggcgtatccaatgctctgcgggatgccaaggctggcgagagtgaggccggccatgacgtcactcctgaagtccttgagggtgtagctccttccccactgcagcaccgggaacacgcactgcagcgc

SEQ ID NO: 34468 - DNA, 401 bp, Setaria italica
  Peptide Sequence Number=SeqID_100442
gccggacaccgggtacacgctcatcctcatcaacaccatgaacgccagcgaccccgccgcgttcgaccgcgccgagaggaagctcatggcgcgggtggcggcggaggcaggggacgccgcgagcggcgggctggtcagggagacggccaggttcgggtcggcgacgaccatctacggcctcgggtggtgcaccagggacatcaccgccgccgactgcgggctgtgcgtggcgcaggccgtggcggagctgcccaactactgccagttccgccgcgggtgccgcgtgctctacagcagttgcatggcgcgctacgagacctaccccttcttcttcccggtcagcggcgccgcggctgcttcatctcatgccggcgagtacgagaaagtcatcttgaaccacc

SEQ ID NO: 34469 - DNA, 442 bp, Setaria italica
  Peptide Sequence Number=SeqID_100443
aggcattgggcaagtgaacaaggtcggccagggagaattcatcaccagcgaagtactggctctcccccagccgttggtcatacacatcaagcaccttagcgagcttcacttcattctgctcaaccacggccatgtcagtggccctgcccatcattggtgcaaatgcaagctggaagataatagccaagctcggtgggttgaagctctggccttcagcctctatccattgttcaatggcagcacggccaactgcaccatgttctttcttgccaaggagggccttgttgccacggtctgcatactggtcgcatatgtaacggcaaatagcccttgactctgccaaagatacaatgcataaagactgtggccatctaatatcttggttgattttatcagttacagttaagcatacatacacgcaagtgactgatagaatatatcc

SEQ ID NO: 34470 - DNA, 1033 bp, Setaria italica
  Peptide Sequence Number=SeqID_100444
cttgagttagtgcatttctaatggaatcagattattcatacccattcattatctggatggctagaccatatgcataattgtacaaacgtggataaagtcgaggaccaggggaaaaaagattcagccatacatatagtcaaccataccataaagatggatagcagaacaacatgaaatggtacaaacacgaccaagttgatgacaacatgaagaatgcaactaattgccatcaaaaggtgctcaaagaaaaacaacagagactctaagagggccccggtgcgctctgcatctcaataaccttcttccatgtaggacgcgccgagacatcatcccaccacctagccaggttctttctctcagtgattaacccagccttgctggtcctgttcacaaggaaatctgcattgggcaagtgaacaaggtcggccagggagaattcatcaccagcgaagtactggctctcccccagccgttggtcatacacatcaagcaccttagcgagcttcacttcattctgctcaaccacggccatgtcagtggccctgcccatcattggtgcaaatgcaagctggaagataatagccaagctcggtgggttgaagctctggccttcagcctctatccattgttcaatggcagcacggccaactgcaccatgttctttcttgccaaggagggccttgttgccacggtctgcatactggtcgcatatgtaacggcaaatagcccttgactcaaagacggtggtgaggtggtccttgaaggcggggacctggccgaagggctggagcttgaggaaggaaggcgacttgtgctcgcccttggacatgtccaccggctcgatctggaacggcacgtccttctccaggaggcaggccgccacgcgcgccaccgccggtgagatcaccggcccgtacaccgtcacaggcgccgccatcgcctcgccgccgtcggagacctaagcggaggagcgggtcgatgggataaggtagattctttgctgccgacagtggagggctgtttctgtttggac

SEQ ID NO: 34471 - DNA, 246 bp, Setaria italica
  Peptide Sequence Number=SeqID_100445
acttctcatacaagttcatagagttttgcagcagaaagttaattcattgcgctcatacgatacaacacaaaataagaaggttaacaatatatgtcgatagtgcccttctcatagccatagccatctacttcttcctcggacctccgccacggggaagaagtacccaaagatggcatctggctgcggatcaattgcaacaacttaacagcggcaccgtgagtaaaaaatgtactcagcaaatcttat

SEQ ID NO: 34472 - DNA, 263 bp, Setaria italica
  Peptide Sequence Number=SeqID_100446
ggaggccaaagggaggaggacctaggcacccttggggcgttctcctcctagttggggcgcacaacaagttgggcctaagtctgaagcaaacttacaaggcctgaggcccgacaaaaggtgacgcagcaccctgacagattctgtacgtccatttatttcgatgatttccattgactcaatggaatttttgacatgtgactagtaacattggaaagtgtatcttcttagctttgcatgcatatatagaacatccaaaatggact

SEQ ID NO: 34473 - DNA, 276 bp, Setaria italica
  Peptide Sequence Number=SeqID_100447
cgatataacaaatcaaatcaatgaaggattcatttaacagtggtgaagaaccaagtgctgtgcaatgcttaagctctgcattctaagttgtgagttacatccagattttagatgtatattgtattctgacacccaaaaaagtcaccaccagttcagcttgattcaaacaattatagtatttgaaaagcctcatatcatatatttcacttaacgccaaaaaaactacacgttcattttaagagagaaaacacaatccaatgaaagcacaacataatt

SEQ ID NO: 34474 - DNA, 433 bp, Setaria italica
  Peptide Sequence Number=SeqID_100448
agaagatcatgatcaggcatacattgtgcatggagtaggcagttcagcagaaaatggtaatgagttgcaggaaagtctcttactggtatccagggaaacacttgatgatgggcctctcggtgaggttttcaaaagcaagatttgccaatcagcatatgcagacatcttaactgaccaatggactgtgacccgtgatttgcaactgtctaatagcaacataacttgaacatgtaacaactaaaacaggagtgctagaagacaagactggatacctagtatcagcaaactcgtgccatgatcacagtttcagttatttatggttccaacaagacatgcctggtgaacacttaaaggaatgttggacagtctgagaattcaccattgttgccataagatagccattgctacttatgtggttctctactggcattgt

SEQ ID NO: 34475 - DNA, 874 bp, Setaria italica
  misc_feature (852)..(852): n is a, c, g, or t
  Peptide Sequence Number=SeqID_100449
tttttagtagtcgtctaacttaaaggtaattctattgtctttctattgggaaatcagaattgcataatacctccatgttaggcagccaacataaatacccaatctcagattgggattcaaattctttacagggcaaaataaaacaaattattagtacacccacctgcaccgaaaggaaaaggcaacataacttgaacatgtaacaactaaaacaggagtgctagaagacaagactggatacctagtatcagcaaactcgtgccatgatcacagtttcagttatttatggttccaacaagacatgcctggtgaacacttaaaggaatgttgggacagtctgagaattcaccattgttgccataagatagccattgctacttatgtggttctctactggcattgtgttgctattagacagttgcaaatcacgggtcacagtccattggtcagttaagatgtctgcatatgctgattggcaaatctgcttttgaaaacctcaccgagaggcccatcatcaagtgtttccctggataccagtaagagactttcctgcaactcattaccattttctgctgaactgcctactccatgcacaatgtatgcctgatcatgatcatgctgcaactccactggagataatggtactatgtcacggttctgggaagaacctgaggatgcgaagtcaaaggaatccatgggagcggatactgataactggttgtgtacattctgtttctccagcagcttcctgttagattctcttgagaaagaatcggtcatagtagcagctgagcttttcacctgctgctgccaaggcacagcatagctgtgcaatgatggtccacagaaacngccatggatggttctgctaagg

SEQ ID NO: 34476 - DNA, 1082 bp, Setaria italica
  Peptide Sequence Number=SeqID_100450
tgcagttgcaccaaagtaatccacattatcatcccaaaatacctcagggaaggctgctatagatggacaaagcatcagttctgatgttcatgttaacagtgctatggtggttctccgaaagctctttagggattcttctgtacctgatccggttgcatctgttgtgacaaattggggccttgatccatttagtagaggtgcttactcctacgttgcagttggagcatcaggaagagattatgatattcttggaaggccagttgcaaattgtttatttttgctggtgaagcaacatgcaaagagcatccagatactgttggtggtgcaattttgagtggtttgcgagaagctgttcgcatcattgacttagtaaacactggaaatgactatatcgctgaggtagaagctctacaaacttaccaaatgcagtcagacagtgaaaggagtgaagttagagacatgtcaaatagacttgaagcatgtgcactttctaccgctctaagtaaaaacacgtctgatgtgacgtatccaattgttagcaaggaatctttgctgcaagaaatgttcttcagtgcaaaaacaacatcagggcgcctacatttggctaaggagttattgaagcttcctacagatgttcttaaatcgtttgctggatctaaagaaggactaagcacactgaacacttggattcttgattcacttgggaaaaatgctactcaactactgcggcactgtgtgcgcttgcttgtgcttgtttccactgatctggtagctgtgcgtttgtcaggaattgggaggactgtaaaggaaaaggtttgtgtgcacacaagccgagatattcgtgctatagctcgtcagctggtcagtgtttggatcgaagtttttcgtaaagaaaaggccagcaatggactcaaattgctgcgtcgaatgccatcaattgaattaagtaagacaaagagtaaggatttgcaatcaggaaagcctaccttacgtgtgccaaatgaaactttggacaataataaagtagcttcccagcgccagcgtgcaagattcgcaagtagccactcaccaccgaaaacaag

SEQ ID NO: 34477 - DNA, 526 bp, Setaria italica
  Peptide Sequence Number=SeqID_100451
tgtcctattgggtcctttgtattgtacttgggtagtaagttaactcctcgagctcagtgttgttcccatgcccacagccgctgctgatggggtggtggccgacgacgatcttccagggggccttggattgcgtcagagcgtactccaggttcttgaggagatttgtgatgtaggtgtcccgaggagcaacccctctccaatcgaacttggtgttgttccagtagtggaggatgaacggcgtcgtgtcgacgaggaagaaatccgcaattcctgagttgacgatgaaggactttgcgatgacggtgtaccggctgtccacgttgcgaatggcagggtccagctgggcgagcgcattgcccgtgtagtcatggttgccaaggacgagataccaaggcttctggaggcccttggcagtgtagatgttggagaagggttgctcctcgggacacctacatcacaaatctcctcaagaacctggagtacgctctgacgcaatccaaggccccctggaagatcgtcgtcggcc

SEQ ID NO: 34478 - DNA, 1311 bp, Setaria italica
  Peptide Sequence Number=SeqID_100452
tttttttactaactacaatttttattctattttatccacaaaataacctttattctttattaagaatttgtcttacagggtgaacgaatttcccaccgtcacacgtgcacacaacaacaagaacaacatttcgcaaaaaagaaataagagcaacaacccactcaaaaaaagaagaagaacagcaacaattgcttcatgtttacacaaacgattaattgcatgccttgcgattgctcaactcatcgtacggctgctgcctgacagctataggagtccacagcaaagctagtgcccagcagctgctgcggtcttggtgaggccccagcagtgcaggacgctgccggcgacgtcgaagaaggcgaggtgggcctccgtcttgctcagccgcatcgacatgaacccctgcccgtcgtagaggaactccaccttgtccggggtcgccttgaacttgccagcccacgccttcgacccgcccccactagtcaggaactgaagaggactgtctctgctggtgatgcgctgcaggcagtggtcatggccgttcacgtacatgtcggcgccatgggccttgatgactgggagaagtaactcctcgagctcagtgttgttcccatgcccacagccgctgctgatggggtggtggccgacgacgatcttccagggggccttggattgcgtcagagcgtactccaggttcttgaggagatttgtgatgtaggtgtcccgaggagcaacccctctccaatcgaacttggtgttgttccagtagtggaggatgaacggcgtcgtgtcgacgaggaagaaatccgcaattcctgagttgacgatgaaggactttgcgatgacggtgtaccggctgtccacgttgcgaatggcagggtccagctgggcgagcgcattgcccgtgtagtcatggttgccaaggacgagataccaaggcttctggaggcccttggcagtgtagatgttggagaaggactccttgaagagtgggtcgctggtgttggcgatgccgtcatcgtagatgttgtcgccggtcgagatgacgaagtcgatgtccatcttctcccccactactcccatctgctgggcaaccaaggtctggttgaactgcccgcgccgcccccagtcaccgacgacgaggatggcgagcgacccgtcggccttcggcgggtgctccagccgtggcagtgccgccgccacctgaagcaacgccaccaccgcacccaaagcgacgagcatgatcccaacccgagccatggcactccaacactggtggcaaaggcgaagctagctctagtgttcgacgaa

SEQ ID NO: 34479 - DNA, 583 bp, Setaria italica
  Peptide Sequence Number=SeqID_100453
ccttccctacgtacgaggagcacgaggtggagggcttcaccttcgctgccgtcgcgcgtctgcctgccggtggcgcgttccccgacggccgcgtcggccccgtgtaccccgtcttcggccgcccgcggtcgccgccgctgcgggaggcggaggatccgggcacggccaccgcgctggtgccgctggggcagctcctcctggaggagcggggcgcgccgtcatcagggcagtccgaggacgacgacggcgggctcgacggggtgccggcggagacgtactgcctgtggtctcccggggcctctccagcgccgggatctcagtcgccgtcgtcgccggcgcgctgccggaagagcggctccacgggttcggtcctccggtggcggcagcgggtcgtcaggcggagccacagcgacggcaaggagaagttcgtgttcatggacgcgagctccgagtccgagcgcaacgccggcaggaagtcgacgttcctaccgtgcaagcaggatcttgtcgggttctttgccaacgccggcgcgtttcggcggagctacctcccgttctgacgcaatgtcatgttgttttacag

SEQ ID NO: 34480 - DNA, 244 bp, Setaria italica
  Peptide Sequence Number=SeqID_100454
ggggaatcagagctcagtgtcatgtccttggtgggcatgggtggtgttggtaagaccacgcttgccaagaaggtgtacaaccacccacatgtgacgaagcatttcgaccgcagttcatgggtctatgtttcaaacatgatggagcggcgaggtgtcctccgtgagatggccaaggggctgatgaggatcccctccgcagaggcgagctctctcagtgaggggcaactccaacaactgctcttgg

SEQ ID NO: 34481 - DNA, 277 bp, Setaria italica
  Peptide Sequence Number=SeqID_100455
gttggcgaggtaggtgcgtgacgggaggcaggagcagttcttgcgcacgaaggcgtaccccgggctggccgcggcgtctgcggtgaggtcccccggcgcggcgtcgaacatggactcgagcagggtggcattggcggcgcccgcaccggcggccgggaaggcgaggaaggccgtgcagacgcgcgagagctcagagcagccgagcggcgccgacgacgtggcgttcgccccggctgcggcggcgccggagacggcggcgaggggcaggacgaggagg

SEQ ID NO: 34482 - DNA, 254 bp, Setaria italica
  Peptide Sequence Number=SeqID_100456
ttctccaccccactggcgcagcctcccggcgcgttgatggggccttgcccttcgccgccgccccggccggcggagggggcggcgcggcagcgtcgacgtccatgggagtggcggcggtggctcccgccatggcagagggtggaaaccctagagctagaaggcgggattgtggggaataattggcgccaattcgaaaccctctcgccgctctgctgctctaccttgccgacttcacgagcgaggcaacagaaaat

SEQ ID NO: 34483 - DNA, 537 bp, Setaria italica
  Peptide Sequence Number=SeqID_100457
atggatccatggaatagcattacaacccccttccccccaaatcaaaatttccagagattccatgatatactaacccaagaccggaccctcttatctacatcaccaaagaccaaagggaaaaagatacaatgacaatgaactgacctgaccctaaactacaccttacccagttaccgcgttgaagctattacacagtttctccagcccctcctctaccagtctaacttattccttcacaccacaggagtataccccccacaatgtatttaccaccaaagcctctcctcaccttccacagtatacccccagaatatatttacctccaagcccgcctcaccactaccatgactcaaacaagagaaacaaaagacaggtgctaaagcactacgttatgacctcctaagcagccatacaaatgatcttttttttcaccatcatccatgcacttgcttggcaagataatggcaataccttttatctaggctggggtttttcaaagagaatcctaggttgttggacctgtgatgggccctgagg

SEQ ID NO: 34484 - DNA, 321 bp, Setaria italica
  misc_feature (287)..(321): n is a, c, g, or t
  Peptide Sequence Number=SeqID_100458
gagaatttcttggagattgataggtgtgtcagggaggaccttgttgatgacgatggttcaaatgatacgaggcagctattggagagcacaaaagcgctgataagatcagttctccctgaagtctgatgtacatagtattaggcggtagctggtgagctgaagttgtaacaagtgtccaggaagtgaaagtaggcaatgctcgctgactaagaccatttgtggcagcaactgggaattatgtacttacacgcatgcataatgcatttctgtatatgtgcaattaaacnnnnnnnnnnnnnnnnnnnnnnnnnnnnnnnnnnn

SEQ ID NO: 34485 - DNA, 385 bp, Setaria italica
  Peptide Sequence Number=SeqID_100459
cattatcattgcactgacaagtgagagcattgtagtaatggaagaatggaggcatgttcaagcgtatcaaggactcgaggtagccgattgtattgccgtacgaacaagagcagagcagcatgttttcttgccatcgccgccaaatgcactctgcagaaagccatcttcattgatgtggccgacgtccccgagcttctcaaggatccaatggccgttctcaccggaaatatggatctcgctgattgaagtgttggggattcttctgcgaaccaatgtcgtcattggattggcgtgcctgcagatttcctctatggtggcgccatgggagaccacaaccacacgcctcccccttgtgcttgtcagctatcatgttcaagtaggaaac

SEQ ID NO: 34486 - DNA, 522 bp, Setaria italica
  misc_feature (191)..(191): n is a, c, g, or t
  misc_feature (476)..(476): n is a, c, g, or t
  Peptide Sequence Number=SeqID_100460
caagcagcagtgcaatgcttcaaatttcagtgtggtattgtttacccacagaggaatttctatacaagttcattatcattgcactgacaagtgagagcattgtagtaatggaagaatggaggcatgttcaagcgtatcaaggactcgaggtagtcgattgtattgccgtacgaacaagagcagagcagcangtttcttgcctcgcggcatacagacgattacacagaggcgccatcaccaccaaatgcactctgcagaaagccatcttcatcgaggtggccgacgtccccgagcttctcgaggatccaatggcggttctcaccggaaatatggatcacgctgattgaagtgttggggattcttctgcgaaccaatgtcatcgttggatcggcgtgcctgcagatttcctctatggcggcgccatgggagaccacaaccacccgctcccctgcaaatgcaacatgtcagcgcaacancataaataataagttaccaagtttaggaagtttaggaagttagaaa

SEQ ID NO: 34487 - DNA, 367 bp, Setaria italica
  misc_feature (315)..(315): n is a, c, g, or t
  misc_feature (320)..(320): n is a, c, g, or t
  misc_feature (325)..(325): n is a, c, g, or t
  misc_feature (354)..(354): n is a, c, g, or t
  Peptide Sequence Number=SeqID_100461
cagccgcactcgcacacagtcagccaccgctcgagcacccgcaggggcgcgcgtgtgagcagagagcagagcacagcacatcaagggaaggagaagcccaaggacgccgcaccggcggaggagaagtccaaggaaggcggcggcggcggggaggagaagaaggaggaggcgccgccaccgccgcccccgccaccggaggaggtcgagatgcgggtctacatgcactgcgagggatgcgccaggaaggtcaagaagatcctcaggcgcttcgacggagtggaggacgtgattgctgactcaaaggcacacaagggngtggnagganagcgcgcgccgatgaaggtggtggagcgngtccagaagaaag

SEQ ID NO: 34488 - DNA, 291 bp, Setaria italica
  Peptide Sequence Number=SeqID_100462
agagcccaaaaagtagaagttgattcctcagtcgccttcaaattctcaaatgttccaaggatgatgcatattccccatgtaccttgtagttgctatcaaagggaacctaagattctgtagctcatggaatcatccttcatgacatctgaaatggaaattctgtgggttggtactgcaggagtggaggacgtgattgctgactcaaaggcacacaaggtggtggtgaaggggaagaaggccgccgccgacccgatgaaggtggtggagcgcgtcagaagaagaccggtcgtt

SEQ ID NO: 34489 - DNA, 661 bp, Setaria italica
  Peptide Sequence Number=SeqID_100463
cagccacccgcggatcttgcagccctttggcggcgcccacccgcgctacataaggtgacaccaccccccacacccccacaccgggcgtcacagccgcactcgcacacagtcagccaccgctcgagcacccgcaggggcgcgcgtgtgagcagagagcagagcacagcacatcaagggaaggaaaagccatgggcgaggaggccaagaaggaggaggtggagaagcccaaggaggcggcgccggcggaggagaagccgaaggaagcagcgccggcggaggagaagcccaaggacgccgcaccggcggaggagaagtccaaggaaggcggcggcggcggggaggagaagaaggaggaggcgccgccaccgccgcccccgccaccggaggaggtcgagatgcgggtctacatgcactgcgagggatgcgccaggaaggtcaagaagatcctcaggcgcttcgacggagtggaggacgtgattgctgactcaaaggcacacaaggtggtggtgaaggggaagaaggccgccgccgacccgatgaaggtggtggagcgcgtccagaagaagaccgggcgcaaggtggagctcctctcgccgatcccgcctccgccggaggagaagaaggaagaggagaagaaggaggagcccgagccacccaagcc

SEQ ID NO: 34490 - DNA, 256 bp, Setaria italica
  Peptide Sequence Number=SeqID_100464
tgtaatgatagggcaagagtgtttgtgtatagcggcccagaagaatcaagaacccactccccatggtatagatcacaagtaccttgctccgccttttgagattcatttgatgaatcctccttttgagattcatttgatgaatcctcatccggggttgacgtggtatcaccgggagcaactggatccggctctttgctttcgatttttccagtaaccgccgacggttggccagaatccacgtcaccgccctgaccat

SEQ ID NO: 34491 - DNA, 406 bp, Setaria italica
  Peptide Sequence Number=SeqID_100465
aaaggaaatcagtaggcttcatggtcaactggtactgcaattgctattgtagaaaaggaatctggttacacttttttttttttgcatctccatttgcagtagctgaaaagtacgtgattttgctacgattgtggaaaccggaacatttacatggtttttgcataatttcaggcttttacgagactcgagttgcttactattcgtggcgaggagcaccggggtacacctttgcatcaataccagattattagcctctcagttctcgccaccgttggtgcagtaaagataatgaacagcaagcgaacagcctgaaacttcaaccgccaaccaattttagcgataaacattgagcatgtagatgtagtgattctgctcattattgtgttaatagggattatattacttt

SEQ ID NO: 34492 - DNA, 978 bp, Setaria italica
  Peptide Sequence Number=SeqID_100466
aataggtacgaataattttacctttttagtttaattctgttattcactctttagaagtacctcttagtgtagttattttctttgttttatctcattactttagagagaaatttattgccctacacaagccatgctaaaggcactgcacattgttctataaccgttgctgatactgatagtgggactcctatggtacttggcagaaactaggaaatcagtaggcttcatggtcaactggtactgcaattgctattgtagaaaaggaatctggttacacttttttttttttgcatctccatttgcagtagctgaaaagtacgtgattttgctacgattgtggaaaccggaacctcgcgagcctcggcgcctccacctctcttccaccgccgccgtcgtcttccccacctccggccgggtcagcgtaactgcaccgggaaacgtttcctgtgcagatactgaagtatggcgtcgagacgcaatgtcgttactcacctcttcctgcagaggaaggggacgacaacaatcttactaaagaagatgttgatcttcggttcacttacacaccaaaatcctacaggaggatcccctggaagtcaatagccttggcattgttcctcctcctcctaggaagttcacttctcttcctttcatacttcatattcagtggtcacatggagggtgatagttctcaggcatatggtctcttgttcctgggtttccttgcgttccttcctggcttttacgagactcgagttgcttactattcgtggcgaggagcaccggggtacacctttgcatcaataccagattattagcctctcagttctcgccaccgttggtgcagtaaagataatgaacagcaagcgaacagcctgaaacttcaaccgccaaccaattttagcgataaaacattgagcatgtagatgtagtgattctgctcattattgtgttaatagggattatattactttcatcggc

SEQ ID NO: 34493 - DNA, 490 bp, Setaria italica
  Peptide Sequence Number=SeqID_100467
actacgtggtgtactgggagctgatggtgcgggagggcgggaagatgcccgaggcggccgtgttcgagcgctgctgcctggagatggaggaggcgctcaactcggtgtaccggcagctccggaacggcgacgccatcgggccgctggagatccgcgtcgtgcgcggcggcaccttcgaggaggtgatggactacgccatctcgcgcggcgcgtccatcaaccagtacaaggcgccgaggtgcgtctcgttcggccccatcatcgagctgctcaactccagggtgctgtccaagcatttcagcccggcgtgccccaagttcagcccgcacaagaagtgagaggaccagcaaccggattcaacatctgacggcccagattgagctggacgctacagtcagctagcagcactactacttccttcccagtcgtttatactgcgtgtctctcctgttcctcgtgcgctagggagaggtagtaattagtcaccggt

SEQ ID NO: 34494 - DNA, 405 bp, Setaria italica
  Peptide Sequence Number=SeqID_100468
ccttaattccttgttggttataataataatccgctctcaaccactactgaaaaactgagcattgatcctaacccttataccagttagtttttgatccagtactatacgagtatcagtaccggatctaacgcggatacaacgacaatgatacgatctgcttgctctcaacagctgcgggtgtcgagccttgtgagcaacgcgccctacttgctggtgctcgactgcgacatgtcctgcaacagccgctcctccgccctggaggccatgtgcttccatctcgaccgatccccgccggcgccggagagcctcgccttcgtgcagttcccgcagatgttccacaacctcagccccaacgacatctacaccaatgacctccgatccttcttcgcgactcgatggatccgg

SEQ ID NO: 34495 - DNA, 361 bp, Setaria italica
  Peptide Sequence Number=SeqID_100469
ttcgccggcgacgacggccaggatgacggcggcgatcgctgcggtgaggccgccgaggagaggcgaagaatgaagaaaatgtacgagacgttcaaaggggacatagaggaggccagtaaggagaacagtatttccaggagctggacgaaagaaaaacgtcaggatcacgatgcttatgtcgagataaatccaattcaatcaaagcaattcctgatcatcagttgagttgaattaactagcagcttcatctatatatgtaaatctgtatcttgcatgcaaccaattcaatccgcagatcatcaccgcgggcgaggaggacgacgaccaacaggggccgaaggcaaaacccttgctggttttg

SEQ ID NO: 34496 - DNA, 738 bp, Setaria italica
  Peptide Sequence Number=SeqID_100470
gggctgctggagtcccggcggcgcggggacctcccggccgtggacgtgctggtggtgacggcggacccagacaaggagccagcgttgggggtgatgaacacggtggtgtcggccatggcgctggattaccacggcgggaggctgagcgtgtacctgtcggacgatgccgggtcgccgctgacgctgatggccgcccgcaaggcctacgccttcgccagggcgtgggtgcccttctgcaggaggtactcggtgcagtgcccgtggcccgacaggtacttcgccggcgacgacggccaggatgacggcggcgatcgctgcggtgaggccgccgaggagaggcgaagaatgaagaaaatgtacgagacgttcaaaggggacatagaggaggccagtaaggagaagagtatttccaggagctggacgaaagaaaaacgtcaggatcacgatgcttatgtcgagatcatcaccgcgggcgaggaggaggacgacgaccaacagggcgaggaaaccatgccgttgctggtgtacgtgtcccgcgagaagcggagggcgtcccctcaccacttcaaggccggcgctctcaacgccctgctgcgggtgtcgagccttgtgagcaacgcgccctacttgctggtgctcgactgcgacatgtcctgcaacagccgctccggcgccggcggggatcggtcgagatggaagcaccatgtgcttccatctcgaccgatccccgccggcgcc

SEQ ID NO: 34497 - DNA, 411 bp, Setaria italica
  Peptide Sequence Number=SeqID_100471
ctgagcttccgtccattatgccaaatctttgtagactctttttaattggtttcggggtatttgaggtattcttaagacttcaggtgctgcagtgtagcgatacataggcataccctgtgtgtgatctttccaaacatgacatatttattgtgcaggtggttaatgcaccaatggtgcttacccaaattcctctacctcaagcatctaaccattctgatttcagaaaggacattttccccaccatataattatttttctctggtttatttctttgatgcgtctccttccttggagacttttttcttggacgaaacctatccttcgaaggtatctggccactttgttaggtccatgatctaatttacttttcatcatcaggtgcctcatgaagatgtgacgcatgaatcagtt

SEQ ID NO: 34498 - DNA, 723 bp, Setaria italica
  Peptide Sequence Number=SeqID_100472
cctctacctcaagcatctaaccattctgatttcggaaaggacattttccccaccatataattatgtttcttctggtttatttctttgatgcgtctccttcattggagacttttttcttggatgtgcctcatgaagatgtgaagcatgaatcagttttttggaggttcctcacatttgggggagctgcctgaacaacaacacaactgcctcaagattgtggagatcatagggtttagctctgcaaagagcttggttgagttaacatgttgcattgtcaagaacgcagtctcacttgagtgtcttacattggacacccttcgtgatccttggaggtgctctggggaagctaataaaacttgctggcccattcacaatgatgtgctcaaggaagcgtctagagcggttgtggccataagaatgtatattgaacacaaagttgcgcaacatctaagctgattgttctggagccttgtacacggtgtcattcccgttgatgatggtactacagatcaaattgcagcctgtaagatgttgataatatctggaggtggtagatggcataagttattgcgattgcaccatgtgttatcattttagtgtaattggataagtatgctgaatgtactattgtcactataagttaggttgatatcgtaagttattgtaattgcatcatgtgcaatcgcttaatgaaccttgtttggttattggataagttacttt

SEQ ID NO: 34499 - DNA, 325 bp, Setaria italica
  Peptide Sequence Number=SeqID_100473
gggcataggcgtggccgtcgcggcggttgtcctgctcggcctcgccgccgggctcatctacttcttcgtcggaaggaagcgccgccggcggccgccgccgtcccatcaagggttcccaggcgagttctacgacccgcggcggcctgtgacgccgccgcacatgtcgcacgcgccgtcgacgacgccatcgtcctcgacgccgccgctgatgcactcgtggcagagcagccgggggccgtccgagtcgccgctgccgccgctgaacccttcgccggcgatcatgggcgcaccgttcgggtacgacgacctggcggcggccacggac

SEQ ID NO: 34500 - DNA, 273 bp, Setaria italica
  Peptide Sequence Number=SeqID_100474
cccagctccctcggcttccttaccctctgctgccgaaggatctctcgaaacattcaggcccgcatcaacctcgctcctcctgcggttcttgtgccaggatctgtgccgtggtggcgtcgaacggcgcgcagatggacggcggcgggggcgacctgcggagcaccatcaagaagtggaacgtcatctacccggtctacctcaactccaagaagacggtcgccgagggccgccgcatcgccgccagcaaggcctgccccgaccccacctgcatcg

SEQ ID NO: 34501 - DNA, 494 bp, Setaria italica
  Peptide Sequence Number=SeqID_100475
ctgctccgtcaaaacccaccggatctccatctcttctcctacggatctgtgccgtggtggcgtcgaacggcgcgcagatggacggcggcgggggcgacctgcggagcaccatcaagaagtggaacgtcatctacccggtctacctcaactccaagaagacggtcgccgagggccgccgcatcgccgccagcaaggcctgccccgaccccacctgcatcgagatcgccgactgctgctcgcacctcaagatcccctacgccatcgagctggataaggcgtaccctcgggatttcttccaggtggggagggtcagggtgcagctcaagaaggatgacggctcccccgtcaatcctgctattaaaacgaagaagcagctgatgatccaaatagcagagctagttcccaagcatcatggaaggacaaagaagcaggaatcagcacccagttcttcagccagcggcagtttcgaagaacacaaaaggcgggaaaaagaa

SEQ ID NO: 34502 - DNA, 299 bp, Setaria italica
  Peptide Sequence Number=SeqID_100476
ccttttggcatctccctggcgctcgctcctcctccgccgctcgccggagcaccgccgcgggcgcttacctccttcgcgctttccccgacgcctacgcggtttccgcggcctacgcggcgccggagttttcgggagtcagttccgtacgctcgggacgcggcggatcggagcagtagcgagcgcggatcggagcgcgcggggacgccggtagcgcgctccgcaggggaatgtgggtccccgtttgagggggtctcggcccgggaagctgaggcgagatgagacgatcaaggaggcccatt

SEQ ID NO: 34503 - DNA, 340 bp, Setaria italica
  Peptide Sequence Number=SeqID_100477
ccggccggatctccagcgggaagatctccgacggcaccagccaccccaggggcccccacgaccaggcgaagcccgccacgtagacgcagatgaagagcaccaccaccgccgcgtagcccttgggcatctcgccgatgccgctggtgccgaacttggcggcgatcagcgaccccaccaccacctggcagatgatcatctgggcgccgccctggaggaacagagcgcgccgcccgaggcggtcgacggtgaagatggagacgacggtggcgaagacgttgacgagccccgtgatgacggaggacatgagcgaggcgtcgcccttgaagcccagcgtctcgaa

SEQ ID NO: 34504 - DNA, 587 bp, Setaria italica
  misc_feature (1)..(47): n is a, c, g, or t
  Peptide Sequence Number=SeqID_100478
nnnnnnnnnnnnnnnnnnnnnnnnnnnnnnnnnnnnnnnnnnnnnnntttttttttttgttttttaattttgcaacttgcattcatatacttcgatttgatccaatccataccccacaaagaaaaaagaagacaggggacgaagaccagttgactgttcgtcatcatccagtcatcctacctactgcgatgattataatacggtgaatccttaaaccattttaaatttcccgctaaacccgaagaataaagccgtatgagtaaattattgcccggccgacaccgtcagcagcgagcgacgtcccaggcgtcacgggctactgcatgccggcgagcttgccgttgccgttggcaccgccgcgcatctcgaggtcggcgccgacgtgcacgtcctcgtcgcggatgaagcggccccagtaccagtggttcttccacacgagcaccatttcctcgatgggcacgttcttggtctccggcaggaagagcgcgacgaagatggtcatgaccaccacccaggcgccgaagaagaagaagaggatgaacttgaagcggcaaagcatggggaggaacgcctgcgcgatgatgaga

SEQ ID NO: 34505 - DNA, 1851 bp, Setaria italica
  Peptide Sequence Number=SeqID_100479
ctcgttacacaaacactagtcgatcgtagctactaactcgatggatcacaaggcaagagaagatcgaacatcatgcatgtacaatcaatcaagtcgatccggatgggcagaatatataatgaatctcatcaggcgtcggcccccttgcgggcggcggctccgttgccgacgtgcgcgtcctcgtcggcgatgaacttcttccagaaccagtgcgacttccagacgagcaccatctcctcgatgggcacgttcttggtctccggcaggaagagcgcgatgaagatggtcatgatgacgacccatccgccgaagaagtagaagaggccgaacttgaagtggcagagcatggtgaggaacgcctgcgcgatgatgaaggtgcagagcatgttgacggacacgttgatgctctgccccgccgaccggatctccagcgggaagatctcgctgggcaccagccacccgaggggtccccatgaccaggcgaacccggccacgtaggcgcagatgaagagcaccacgatggcggcgtacgccttggggatctccgccacgccggagaacccgaacttggcgccgatcaggctaccgacgacgatctggcaggcgagcatctgggtcccgccctgcaggaacagcttgcggcggccgaggcggtccacggtgacgatggagacgaaggtggcgaagacgttgacgagccccgtgatgacggcggacatgagggaggcgtcgtctgcgaagcccagcgtcttgaagagcaccggtgcgtagaacatgatgacgttgatgccggtgagctgctggaacatggggatggcgatggccatgacgagctgcggccggtagcgcggctgcaggatattccgccacgggtgcgccacgagcttggactcctcgctggcggcgacgaggtcgttgtactcctcctccacgtcctccgtgccgcgcacgcgcttgagcatccgcttggcggcgtcggtgtagccgcggtcgatgagggagttgggggtgtcgggcaagaacagcgcgccgatggcgatgatggccgccggcaccgccgccagggccaggctcacgcgccacccccagccgcccttgatcttggcggtgccgtagttgatgaggttggcgcacaggatgccgatggtgatcatgagctggaacccgatgttgagcatcccacggaggcgcgcgggggccatctccgacaggtacaccggcacggcctggttggcgaagccgacgccgatgccgaggaggacgcggccgaggatgagcatgacgacgtccttggcggcgccgttgagggccgcgccgatgaggaacgtgacgccgccgccgaacatggaccacttgcgcccggccactcgcgtcaccgtggcggcgaagaaggaggccaccaacgcggcgaggtagagcgaggaggtgaacatggtcagcagctggctgtcgaacttgcagtactggttggtctggttccgctccgcctcctgctccttgcggtacaccgacgggaagaacttcatcaggaacgggttcatcgacgtcacgccaccagagatgccgatgtcatatccgaagatgaggccgccggtggcggcgacgatgcaggcgaagagcacgaacatggtgagcttgccggggtagtccttgccccctccggtgttcaccaccacgccgccggccatggcgactgcccaatactcaaaccacaaacacacaaagctttcgcctcacacgatcacaggctagctccacacaaaagacttcacgaaaggcctatgccaagaggaaaagaatggaagtgctcgtgagcgcccggagaagatgggaacgtctgcgagttcagag

SEQ ID NO: 34506 - DNA, 248 bp, Setaria italica
  Peptide Sequence Number=SeqID_100480
cacctgatggacagagacctggccgccctggaggagacgcgcctcttgctgctggaggtgacgcgcactgcggatgctgcagttacaagccaaaagtccaatgcacggccggacacgcagctgaaggacggcgccgcagcggcggcggcggcggccaccggagatgggcggaggacggcgaagagcgccatgggacaggacccgctttctctcttctttcttccttctcctctgctcttgaatgaatc

SEQ ID NO: 34507 - DNA, 814 bp, Setaria italica
  misc_feature (1)..(34): n is a, c, g, or t
  misc_feature (42)..(42): n is a, c, g, or t
  Peptide Sequence Number=SeqID_100481
nnnnnnnnnnnnnnnnnnnnnnnnnnnnnnnnnntttttttnttttttttttttttttttgttaccaggctggaaatttttccatccttttttcttcttttttctttttggttttgaggtaaagtttccgcatagcaggaactgttacaaacttagaggcgtgttctgtagatgactgtcagctactacattacatggtacagggaaaaaaaatgtctcgagggacaaattgggtgcgtttgcagggcggtagctgatgaactagcagtactgaatgctgatgatactgaaccgtgtggtgttcgatgcgtgccatccgcgtttcgtttcagtcccgcgagccgccggactggaggatgaagaagacggcgaggccgacgacgagccccgacacgaccagcgccagcgtcggcgccggcgtcgccacgccgaagttctggaggacgcctttgccggtggcgacctcgacggcgatggccgaggcgaaaccgaccatggcggcgcggcccagccacacgtccgggccaccgccctgattcgcgctctgctcgcacctgatggacagagacctggccgccctggaggagacgcgcctcttgctgctggaggtgacgcgcactgcggatgcacggccggacacgcagctgaaggacggcgccgcagcggcggcggcggcggccaccggagatgggcggaggacggcgaagagcgccatgggacaggacccgctttctctcttctttcttccttctcctctgctcttgaatgaatccttgctctctgctcgagttgtgcgcaagcctcgtgctcgtcg

SEQ ID NO: 34508 - DNA, 394 bp, Setaria italica
  misc_feature (5)..(5): n is a, c, g, or t
  Peptide Sequence Number=SeqID_100482
aacanatttagctgttcccaaatcgacatgctaatttcaatcagtacaggcagcagtccgtacgtacaaaagtaaagatcggtcagttgcatgcatcatgtatgcctgccactgccagcacgcgtccaccagatctgaaacaaaaacttccattcagagctgcgtctggaagatggtgacgtgtcccaggcgctgcaccatgtcggccacggatcccacggcggcgagcagcgagaccacgagcgcgccggcgttgagcgcctgcagcgccacccacttgcggctgcccggcgccaccttcgcctgcgccatgtacatggtcaccgggaagtacaccgtcagcggccagaacgcgatggcgccgagcaagcccagcacggcgttgaaagaaaga

SEQ ID NO: 34509 - DNA, 787 bp, Setaria italica
  misc_feature (716)..(716): n is a, c, g, or t
  Peptide Sequence Number=SeqID_100483
cctcagttcgtggagaagtttcacggctctgcaaaaagccgaaaacaccatgaaggacttcgccgggctggaccacctgttcgtggtgtccttcctgttttacttctcgtacatggtgatcccggcgatcaccgacgtcaccatggaggccgtctgccccgggcgcgacgagtgctccgtcgccatctacctcagcggcttccagaacgcagtcaccggggtgggagcgctagtggtgaccccgatcgtcgggaacctgtcggacaggtacggccggaaggcgctgatgacgctgccggtgaccatggccatcgtgccgctgtttttttggcgtgcaaccgctcggaggtgtacttctacgtgtactacgtggcgaagatcgtgtccgggatcttctgcgagggcaccatgcattgcctctgctttgcctacgtggcggaccacgtggggcccagccgtcgcgcggcggcgttcggtctcctctccggtgtgtcggcggccgggttcctctcggggaccctgaccgcgcgcttcctcacgacctcttccaccttccaggtcgccgccgccgtcgctacagcggccgcgctttacctcagggttttcctaccggactccggcggcacatcctgcgttgacgaagcctgcgatccgctcctccagccttcatcttgcacctcctccacctcgtcttccgcttcgtcctccgatgaagngctctcgccgaggctgccgccgccgcagaagggcgggctgccgtccgtatccgacatggtcgcgcttctca

SEQ ID NO: 34510 - DNA, 454 bp, Setaria italica
  Peptide Sequence Number=SeqID_100484
ctatgctagttacacactggggccttagtgggcctattgttcttcgattgtctgcatggggagcacgtgaactacatcaatgcaactaccaaggaaagcttatggttgacttcgtacctgacattcatattgaggacatgaggcgcatcctattccactacaaagatcagcatgcgaagcataaagtaaataacacctttcccatggagtttggcctggtgaagagattttggagattcctgctagaacaggagaatttagatggtgatatgcactgggcctccatgccaaataatcatctaaacgcaatagcccttcggttgaaacaatggatatttgaggttgttgggaagggccaatttaaagacgaatttgtgactgccggaggggttccaatttcagagatatcacttggcacgatggaaagcaagaacagccaaatgatatctctgtt

SEQ ID NO: 34511 - DNA, 917 bp, Setaria italica
  Peptide Sequence Number=SeqID_100485
accatggtgtggagctcaagacggaagatgatggcagagtctttcctgtcactgacaattcagcttcagtagtagactgtctgctgaacgaagccagaagacttggagtttctctgcaggccggcaaagctgtgcctagtgtatctgtgactcagcatggaaagtttgtcctcaaggttgagaagcgtactgctgatcttgttgattacctcaacgctaactatgttttggttgcgacagggagcagccaacagggctattcaattgctgcacaacttggtcactccattatttcaccagtgcccagcttattcacatttaaggttgcagacaagcgactggctgatcttgctggggttacatttccagtagtcaaagcaaaattgaagctagatggcgtacaaaagagtgctccggaattaactcagactggccctatgctagttacacactggggccttagtgggcctattgttcttcgattgtctgcatggggagcacgtgaactacatcaatgcaactaccaaggtatgaattatgatgcaatgaaagacgcagtagattgacaactgggcaaaatgtcaccgttatcatatttctaatttggattcctcattctatttttgctgtaaaacatattgtactcagtacatccagaagatgcagaacactccattgtactctttcgtcaatgcatctgcaatttgctactttaatgaaacggttgacctttttagattatcatttactgaattatgcatgttagcaaatttcttaatgatgcaactgtatttgaatttcatattagaattttttagtgtaaagagcatttggacatctgtaaactatatcaattttattatcatttagaatctttgttcctttcctcaaattcagatggttagccctttctgcta

SEQ ID NO: 34512 - DNA, 503 bp, Setaria italica
  Peptide Sequence Number=SeqID_100486
gcccgacggcacctgggaccccacctccgaccgcgccaagaagctccgcaaggtcgccgcggaggcccaggaggagaccgaggaggaggtcacggtggatgaacaatcgctcgacaagtgcctcgtcgggcttcccagggggtggacggctgataggctcaagggcttccttcaagaccagggaatctcctacgcgacagcaaagaagaagaagggaatgacagttggttttgtgactttcgaaagtgtcgaacaactaacaaatgcagttcaggtcctcaaggagaacccttctggtggaaaagaaataaagatagcagatgctaatcgtaggtctcatcaaaaagtgcacgctgaagggcctgcattggataatggaactgcaacagaaaatggtagtaatgctgctgctaccgctggggaagcatctgcagctgaagcggttgcatcaaaataaaaaaagtgcccgtgatgctgttactccccttgcccatatgtcttac

SEQ ID NO: 34513 - DNA, 280 bp, Setaria italica
  misc_feature (268)..(268): n is a, c, g, or t
  Peptide Sequence Number=SeqID_100487
tttttggaaagactatacatcctgtttacttgatctgctactctcctctaactcaaacatctgcacaagcttaattatacaaacttggagggatgtaaggaactgtacaactaaaatcaaatagagtataccacagaagctaacccagctctcaagtattattatatcttgacagaatatagagtaggagcaaaatatcatacaagcactgagattctgagaaccaagggctagcctagtagagctgttctctcctatcacggaaccntcgcaaccagta

SEQ ID NO: 34514 - DNA, 248 bp, Setaria italica
  Peptide Sequence Number=SeqID_100488
cgcctcctctccgacctcccgtgctgctccgcatcagcaacaacccctcttaaaccccggctttcaatcgcggagcgaggcgctcgccggcaggtcgtccatgggagaggccgtcaccgcggcggagcttctgtacggcatgccgctgcttcggtctgtcaccggcggcgacgggggcggcggcggcagaggcgcggaccccggcggctgcggcgtgctgctcgcggagctcaagcaactgtgggggg

SEQ ID NO: 34515 - DNA, 399 bp, Setaria italica
  Peptide Sequence Number=SeqID_100489
ttgagggttgaccaagtcaagtgctggttctagatgatccccttgcagggacagcggaacaaggcagctctgcatctcgtgccatctccagccccggatgcgtccgtcatccccgcagctgaagagcagtggctgctgcggatcggggtagaacctgacgtcgtaggcggggccgctgtgcgcctgcacgatgcagacggggtcgaccagcgcgacggcagcctccgcctgggaggaggcggagatgcaggatgagagggagaaggaggcgagggagccgtcgctggaggcggcggcgaggaggacgtcgggttccgggtcgtcgctgtggtcgaagagcggcgcggaagagggtgcgcgacgagaggtcgcgggcacggtaggatgccacggcgatac

SEQ ID NO: 34516 - DNA, 384 bp, Setaria italica
  misc_feature (5)..(5): n is a, c, g, or t
  Peptide Sequence Number=SeqID_100490
cattnttagggggctaacagtgctaatttatctaaaatttgattgaatttaaaattttcagtggaaaattgcaaaccacggggtctggtccctgccagacccctccctctgccatgggaggcggcggccatatagggtctgttgtttagtatggctcaaattccatagatttccgcttcactccacaactccagctggagcatgcttcatgtggagttggagctgtctgggagggatgtttggctagctaggaggttttgagagtggatttccattcttgccatggtttgattgactgtactgttttgagtgaaacaaaatatctacaactattttcgccatgcatatgtaaataaaattgtacctattaggtaaaaaaaaaaa

SEQ ID NO: 34517 - DNA, 262 bp, Setaria italica
  Peptide Sequence Number=SeqID_100491
gtcttctcgtcgccgcgcagttggtcctattccgatctagatctaaccaggagaagagaggagagaagacgagtatggagggaaacggagacgaggggatagagcagaggaaggaggatcagttggtgggcctcccccgccgccgcgaaccagacgaccccgacatccaccgtccccgggaaagaggtcatgtctattgatgacgaggccatatccggcgtcaatccccggagtgccgctgctgcgcagaatattgtggctg

SEQ ID NO: 34518 - DNA, 352 bp, Setaria italica
  Peptide Sequence Number=SeqID_100492
gcaaaagagctagtcatgctttatgttgtgagcttctttagacagttttttagatctgttcggaggacagactactttactttgcggcatggattcattgcagctcatttatctccagggaccaggttcaattttcgaaagtatatcaagaggtcattggaggatgatttcaagacagttgttggcattagtccacctttatgggcctctgctctcgctgtcatgctcttcaatgttcatggatggcataacttgttctggttctcaacgattccccttgtagtgattctagcagttggaacaaagctgcaggctataattgctatgatggctgttgaaattacagagaggc

SEQ ID NO: 34519 - DNA, 588 bp, Setaria italica
  Peptide Sequence Number=SeqID_100493
tttttcttttttcgtttttcttttttgtttttcttttattttgtttctttctttctaattgtttcatggatggcataacttgttctggttctcaacgattccccttgtagtgattctagcagttggaacaaagctgcaggctataattgctatgatggctgttgaaattacagagaggcatacagttattcaaggcatgccagtggtaaaactgagtgatgatcatttttggtcggaagcctcgtctggttctccatctcatccatttcgcatcatttcagaatgcatttgagattacatatttcttttggatttggtacgaatttgggctgagatcctgcttccatgacagctttgagcttatcatcgcaagagtctgccttggggctgtcgtccaatttatgtgcagctatatcacccttccactctatgcccttgtatctcagatggggtcacaaatgaagagaacaattttcgacgagcagacggcgaaggccctgaagaagtggcacaaggcagtggtgaagaagaagcacaacaaggagtcgtcagatgacccttcccagaccacccccatgggtctacggt

SEQ ID NO: 34520 - DNA, 269 bp, Setaria italica
  Peptide Sequence Number=SeqID_100494
cggttctccctgcctcactccgcggaacatccccgcgtttcccaccccgttcttgtgctgtctgtgttgccagctcttctcctccaatggcgtcaagggcggcgctcctcctctgcgtttcggtggtcctcgccgcagcagccgctgccgaggccagggacttcgtcgtcggcggtgccaacgacggctggaaggcgcaggtgcagcctgacgcgctcaccaagtgggcctcagtcctccgcttccagatcggcgacaagctcgtgtta

SEQ ID NO: 34521 - DNA, 730 bp, Setaria italica
  Peptide Sequence Number=SeqID_100495
ccgtaggtaactatttccaatccaaaattcctagctacccagggatttggagcggtcaactgatgaattccgctgctcctggatacctcaaactcctgtgagaagcgctcggattggacccgtcaatattcaattgtcaagggtttctcctccaggaaagcatatactcgcgacctgaacttctgggccagctcagcaagatcgtttgccatctgggtatggggtaaccggttcgcgacatcaattgtcaaggttgcacaaagcttactgcgtgtcagcacttccaaagttggttttgaaaagtttgcatgtgatgccagccggttcagaaggataagagcctctctcatcagcagacacctttctttcagtaactcctgtgtttcaaattgcatttgggatgcaaggacttgcattattagctccaagaaattggcaccacgggcactcactggacctaaaagcacctcatatcccaatttgccactggaagcaatatatgctaacagaacgataacaagccggcaaagctcaatttccagagaacaagttgtcccacaggacaaacactcagataaaatccactagaactgagcttatgacttgtgatccatcattttgacacccttctgattccatctgttcagaaccatctttgcctccaatacgtcagcaacttcaacctatcattttcacacccttctgattccatctgttcactgccatcttt

SEQ ID NO: 34522 - DNA, 489 bp, Setaria italica
  Peptide Sequence Number=SeqID_100496
tccaagcatttggaagtgcaggtttcgaagaaagatgggacaattagccagatcgagcaggattatcaggaatccgataaggagctaactgctcttcggtgcatgctcaaaacagtaaacgatgaaagggatgtctcatggcaggaatcggaacagctgagaagaactgtcaatggcttgcaaaatgaagttgcttcgttgaagcagaagattacatcgcttaatgaggatatattgcttaaggaaagcgagatactgcttcgggagggtgagatttcaatattacaggacagtattgacaagccatttgacatcatctgcagccctcagtccatgaagcaattcggcatggagtaaatttgcgcagaataaagagcaggacttgattttgaatagatgttatttcccttttgtacaaagatagtagcatttatcactctttacatagtagttcatatgcttgtgaacgctgaaccacagcttataagg

SEQ ID NO: 34523 - DNA, 700 bp, Setaria italica
  Peptide Sequence Number=SeqID_100497
cgcccgcgaggcccggctgcgcggccgcagcccgcagcgccgacggcgggaggaaggacgcggacctgtggtgcgactcgtgaccggcgagaaaccatccgcgccgtcccacactccgctgcgcgttctccctctctgaaaggtttgccgccggacgagcacggccgcagccacggttggtgcatgccgtcgcgggcggacagcgccgtggcaatgccgggagctcgggaagcagatgctctgactctgcacggtaaagtcaagagtccatggtccgtgaccgtttcttcgagggaatcggccgccgggggaatccttggtaaaatcgccatgattggagccgggcatggggattgctgcttgattcgcgcggccttggcggcaagctcgccgcgtcgcgtgcgccgcgcagccccaaacgaacaattcagtgcacagcggcaaacccggaggacctgcttctgcagactgcagttccgcttggtggtttgatcgtctccaagtggctctgttccatccattttcttcttcatcttcttcttcttctggttctgtgagctcggcctgtatttctacaagctgtacataattttagcggccgggttctccaggttgctggtttttggcggtcgtctatgtacataaccgttttctttttctcagaaagattgtacatcctttgctcttcgtaaaaaaaaaa

SEQ ID NO: 34524 - DNA, 339 bp, Setaria italica
  Peptide Sequence Number=SeqID_100498
caggccatgaggcgcctgtcaaagagctcgcctgggtgccacagatgaatcttcttgtcagtggaagctgggacaagactttgaggtactgggacattaggcaacctcaaccagtgcatgttcagcaacttcctgagcgatgttatgctctatctctttgttatcctctcatggtggttggcactgctgatcgcaatgtaatagtcttcaatctgcagaatccacaggctgaattcaagagaattgtatcacctttgaagctccagacgaggtgtcttgccgcatttcctgatcaactaagggtttttggttggatctatagaaggaagagttggtgtt

SEQ ID NO: 34525 - DNA, 238 bp, Setaria italica
  Peptide Sequence Number=SeqID_100499
gtgccggtgacatgtgtcaaagttaataagagcatcatacaaatactagaagatcgggttgaaggatagtatacctcagcaggaggaagcgctggcatttcatcgactgcttgggtgactgccgattgctgagggttcacaagggtaatctgtgcagtctaatataagagaagtcagtatggagatagcgattgggaagatcggacaacaggtttacctgcatggcctccaccagtaa

SEQ ID NO: 34526 - DNA, 165 bp, Setaria italica
  Peptide Sequence Number=SeqID_100500
gacggcggcagcgtagtccgcagcggccgcgcgtacccctcctttcttctcacggccggcttgagcctcctccctgccatcaaggcagccaatgcgtcgggatgtcgtcggcacatccaaggtcccacctttacgggccggctcaccacgctccctctaacaagg

SEQ ID NO: 34527 - DNA, 4155 bp, Setaria italica
  Peptide Sequence Number=SeqID_100501
cacgggaaagcaccgggcctttctctttcggtcgagcggccgaggcttctctagcgggggtgttcgcgtccagacagcggcgcttgcgcggctgcgcatttcgagggaggagtaaaatagagaggaacgaggaggagttttactagcatttttctattctctagcgggggagaggagatcaagggggagggaggttttgccgtcggcaatggagatggcactccgggcgcagagcccgctctgctcccggggccgcccgctgctcgtcgtccggccggccgctgtcctcgcgcagtctaccgtagggcgcagcagatttacaggaggcaggcttgttcgatgcatggtatcaagttcagattattccaagaggaatccgaggagaacatcgactcctaaacccaaaggcactgcctccagaggagggtatgcctcaagacctactgctgagtccagcacgaagaagattgaggaaagcagcactgacgaaggtgatcttggcaaaagcaatgggacactccatattgaagcaacagagcaggcaggtaccgcagcaaaggatgaggttcaggccacagaagaggctgaccaaaatcaatcttcagcatcgtcttccacaaccctggatgatgaatcaattgacagaaaacttgatgaatatcggggtaaaataagtgcactagtaagttcgaaatcagaaccttcatcacttgcaagtgttcgtggacaagacaaaccagttgttggtgtccatgaacaagagggatcaacaactgaggaacatgacagttcaattgttgatgaaccgccaaaaggcaggccatttgccgaggcagttgtaggctatccagtgaaagatgcagaggaggatcaggaacagtatgaaccagagatgcaagcaccagtagaagatgatgtggacccagaagtgctaaagaggaggcttcaagagcttgctgatgaaaattattcagtcggaaacaagtgttttgtttttcctgaagtggtgaaggctgattcaatgatttatctttacttaaaccgcagtatgtcaaccttagctagtgagcctgatgttcttataaaaggtgcattcaatggttggagatggaactcgttcactgaaaaattgcataaaagtgaattaagaggggattggtggtgttgcgaactctacattcccaagcaggcatacagattagactttgtattctttaatggtgacactgtctatgaaaacaacaatcacaatgattttttcctggaaatagaaagtgacatagatgaacactcatttgaggatttcttggttgaagaaaagcgaaaggaacttgagaggcttgctgcagaagaagctgaaaggaaaagacaggctgaggaggagcgcaggagagaggaagaaagggccgcaatggaggcggacagggcacaagcaaagtccgaggttgagatgaagaaggagaaattgcaccagatgttgagtttggccagcagatattctgataacttatggtacatagaacctaacacttatagaggaggggacagggttagattgtactataatagaagctcgagaccactaatgcataacaatgagatttggatgcatggaggttacaacaactggattgatggtctctctatcgctgaaagacttgtcaaatctcatgaaaaggatggtgattggtggtatgcagaagttacgttacctgaaaaggcattggtgttggactgggtttttgctgatgggccacctggcaatgcaaggaattatgataacaatgaacgccaggatttccatgctattgttccaaataacataccagaggacatgttttgggtggaagaagaacataggatctttagaaggcttcagcaagagagaagagaaaaggaggatgccaatcgactgaaggctgagatatctgcaaaaatgaaggctgagatgaaggaaaagactatgagagcatttctgctctcacagaaacatatcgtgtatactgagccacttgaagtacgtgcaggaaccactgtggatgtgctttataatccttcgaacacagtgctgaatggaaagccagaggtttggttccgaggttcctttaaccgttggactcatccaagtggtcccttaccaccacagaagatggtgaaggcagagaatggttcacacttacaagcaacagtcagggttcccttggatgcatatatgttggactttgttttctctgagtcggaagatggtgggatatatgacaataggaatgggatggactatcatattcctgtgttggattcggttgcaaaggaacctcctatgcatattgtgcacattgcagtggaaatggcccctattgcaaaggttggaggtcttggcgatgttgttaccagcctttcacgagctgttcaagatttaggccacaaggttgaggtgattctgccaaagtatgattgtttaaacctaagcaatgtgaaggatttacattaccaacaaagttttgcttggggtggcacagagataaaagtatggtttgggaaggttgaagacctccctgtttacttcttggaaccacaaaatgggatgttttgggtgggatgtgtctatgggaagaatgatgagagtagatttggcttcttctgccattctgcactggagtttctcctcgaaaggggatcttctcctgatatcatacattgtcatgattggtcaagtgctccagttgcttggctatacaaggaacagtatgctcttaatgggctgggaaatggtcgggttgtatttaccatccacaatcttgagtttggagcacatcacattggcaaggcaatggcgcattgtgacaaagctacaactgtttccgatacatattcgaaggaagtggctggacatggagcaattgctcctcactacttcaaattccatggaattcgaaatgggattgatcctgatatttgggatccatataccgacagctttattccggtccattatacatcagagaatgttgccgaggggaagagtgctgcaaaaaaggcattgcagcagaagcttggattacagcaaactgatacccctattgttggaatcatcagtcgtctaacagtccagaagggaattcaccttatcaagcatgcaatttatcgaactcttgaacgcaatggacaggtggttctgctgggttcagcaccagatcctcgcatacaaggtgacttcacaaacttagcaagtcaactgcatggtgaatatcatggccgggtgaagctttgtttaacttatgatgagccactgtcccatttgatatatgctggtgcggacttcattcttgttccttccatcttcgaaccttgtggtttaacacagctcattgctatgcggtatggatccatcccgattgttcggaagactggaggcctttacgacaccgtctttgatgttgacaatgataaggatcgggctcaggcacaaggcctcgagccaaatggattcagtttcgaaggagctgatagcagtggtgtggattatgctcttgacagagcgataaccacattttatgatgctcgtgactggttcaactccctttgcaagagggtaatggagcaggactggtcatggaacaggcctgctctggactacatggaactgtaccattctgctcgcaaaaactgaacttaatgacggggagaacggattcagtttgcccagctctgcagcatctcagcctctcaggcatgccctttccagtaccaattcttgtgcaagatgggaagaaaagagtactggcttgtgcatggccaccgtccatagcagctgtctcactgccctcaagctcagcgatggctcgagttggcgacaacgccgctcgctcatgtgacacgcagaatactcattcgggtgatagttaacagttttgcaagcatgtatctttgtcacgtgcaaataactgtatgtagtctttcgggtgtacatattttgtatgttaagctttagattttagagtcaatggtgtccttagtttctgaagactcaacttcaggccaaatgatatatgatacgaccaatggcttagcttccgtcttgtttggttattctttgtaaattgtttcgtcttgtcttatttctttactttttaatttttaacctttattttaaaa

SEQ ID NO: 34528 - DNA, 273 bp, Setaria italica
  Peptide Sequence Number=SeqID_100502
taaggaaccaaacaagactaacaatcagctcatccccagacgacgcaggaacccaagagccggagccaccactcactcactcaccacttcaccagagtccagaggcgtgaccgactgaccgagtgcgttgctgagagcagagcagagcgggcggagcagaggaaggagagccatgggcgaggagaaggcgaaggaggcggtggcggcggccccggcgacaagggcaaggaggcggaggagaagaaggacggaggggggaggaggggaggagaa

SEQ ID NO: 34529 - DNA, 492 bp, Setaria italica
  Peptide Sequence Number=SeqID_100503
ttggctttacaaggccttttctattatcactgtactatttccattcataataactgcagggccttccaaaacatggccataacctagattctcaagtttgtacaatggagtttcttgccatccatatgaaaaataaatctgacacgaactttcttgcacaggttttgttgaaatatgtgtcaattcatgaggcttcaggatgtttgtaccaccaataccctgaactctcacatcacatatgagtatcttcctgtttagcaatttgaagccatactcttgctgaaacagtttttcaaactcagtagcatagtcatttccagatccttgctctggctgttttaccatgatggcggtatcagttccgtcgtacctcaagttcaagtatgaattagtcctgatgctctcgtctacaaaaccttgctctcttaacttttctttcacttgttttactaaaagggattctcttctagatgcctccgcagcagaatcggc

SEQ ID NO: 34530 - DNA, 298 bp, Setaria italica
  Peptide Sequence Number=SeqID_100504
gcagcttgagatggtgggtgtccctgaagagcacattgaagggcatgcgttccatttataccatctcacatctcctgatgacagtgtttcatatgagttccagcacaatgtttgtggtcgttcaatctacgcagaagggactattgatgctgccatctttctacataggaaggtacaatcaaaagattctaagaggatatatgatatgtatgatgtcctaagagaaggttacatgcgatgaagttgagtgattagctgttcataaatataatgcaacaccacactgtttttttactgt

SEQ ID NO: 34531 - DNA, 403 bp, Setaria italica
  Peptide Sequence Number=SeqID_100505
actttacaagtcagtacaagatccaaaaactatgcaactaaatatctccacagatgggcaaacaggttgttgcatttgttgctataatgaaattcatggctgagcagtttccagggtctttttcaggatatcatttagaggttttagaatcccaccaagctggcaagctggacacatctggtacagctaaagatgtgattgcttgttttgaggaaatgggcatatcatatgacatgaaccggatggttaagattagggatcctgagcagcagcttgagatggtgggtgtccctgaagagcacattgaaggcatgcgttccatttataccatctcacatctcctgatgacaggtgacaaacattgtcctggaaatcgatcatactgacaataaagcacacgaat

SEQ ID NO: 34532 - DNA, 435 bp, Setaria italica
  Peptide Sequence Number=SeqID_100506
ttaagattgaatcctgctgaaatttctgaagtcatagctgaagtttgttctgaagcaacttcaaatgcaagtcagtcaattgctcaaacaagattgagcacccagagtcggcaaccttcagcagatgtggcattcagtgtccttatcaaacttgttattgacatgtacatgatggactccgggactgctgctcccctgacactttatatgcttgagggtatgttgagctcacaaaagacatctgccagaacaaaggctcttgatttgatcctaaatctgggggtacatgcacacctactggaacctatggttgttgaagatgcaccacttatagataaaagtgaagctgtgaaccattcttatctgagcaacgaatatggatcaagtatagatgaaccaagggcagcagagcctgaagaagagccaaagatcagt

SEQ ID NO: 34533 - DNA, 279 bp, Setaria italica
  Peptide Sequence Number=SeqID_100507
agtaaattccgccatcctgcatgccatgaggaagctgagtgcagtgacgacccagaactccttgagcaggagatcgtcgatgaagcctccgaggagcacgacggtggaccacagcaacgccaggaatcccagagcgcttgcaatgttccccgtggcggtccaaagcctcaggtagcgattgatcatcagcacctccggccttccgacgtcctcttccatggttccttaaattttgtcaaaactctgaaagaaatcaaacgaacgtttgcaataatggag

SEQ ID NO: 34534 - DNA, 201 bp, Setaria italica
  misc_feature (193)..(193): n is a, c, g, or t
  Peptide Sequence Number=SeqID_100508
cagatgcctggatcaatctgcccggcaaaggagttgtaccctgcgtcgaacaccgcgagctgctctgaaccacgcagcgtggggtgcgagccgatgaagttgttgtaggatatgttgaagagctcgatcagtgggagagacatgttctctgggagtctgccgctcaggtcgttgtagctgaggtcgagtttcngcagcctc

SEQ ID NO: 34535 - DNA, 278 bp, Setaria italica
  Peptide Sequence Number=SeqID_100509
gcaggagcagcaccgcgggggcggcgccgccctcgggccccgcctccgccacgtgcaagcggaccccgttcgcctccaccgtccggtgccgcaccccatccaccaccgccgccatccctatcctgtgccctcctctctgctccagtgctcaccgaggcgccctggctcactcaggcagcaagcctgctaccagtggcgcacgcgcagccgcctgcttttgtaggcggggggccgccggcgggtggctttgggagcgcagcacgcagcgtggggtattt

SEQ ID NO: 34536 - DNA, 1865 bp, Setaria italica
  misc_feature (1819)..(1865): n is a, c, g, or t
  Peptide Sequence Number=SeqID_100510
atccaatcctcctctccccctccgcctctcctcgcagtcgtcgccctcgtcctcccggggattggcgcggtgtggataggcaccaggacgcgggtcgatccctccttttggtggtaactgggtatctacaaatttgaactgaaagagagaggattatgaaaatggcacatttgataactaactgtactttcagtgcatctcctgctgttaagacgctctccggatctcctagttattgctgcaatgttggccgattacagaactcaaaatcttcaaatctgtccctcaaatcttcttccaagagacaaaagaagtcatatgttacttgtgctagtgctgctgtacaaggacatacacaaacacctcttgctggtagtcaggaagcttcatcctccaagcctaaaaaagtaatggttattggtggagatggatactgtgggtgggcgacagctcttcatctctccaacaaaggttatgaggtcgctattgtcgataatcttgttcgacgtctttttgatcaccaacttggtcttgattcccttacccccataacttccatccaaaatcgtgtccgtagatggaagtctctcactggcaagacaattcagctctttattggtgacatatgtgattttgaattcctctcagaagccttcaagtcttttgagccagatgctgctgtccactttggtgagcaaagatccgcaccatactctatgattgatcgttcaagggcagtctacacacagcataacaatgttattggaacacttaatgtcttgtttgccattaaggagtacagtgaagagtgccatctggttaagctgggaactatgggtgagtatggaacaccaaacattgacattgaagaggggtttatcactattactcataatggaagaactgacaccttgccttacccaaaacaagcaagctccttctaccatctaagcaaagtgcatgactcccacaacatagcatttacttgcaaggcttggggtataagggccacagatcttaaccaaggtgttgtctatggagtcagaacagatgaaactgcaatgcatgaggagctatctaacaggtttgactatgatggtgtctttgggacagcactaaataggttctgtgtccaggctgctgtagggcatccacttacagtatacggaaaaggtggtcagacccgtggatatctggacatcagggacactgtgcagtgcgttgagctagcaatagccaacccagccaaacccggcgagttcagagtcttcaatcagttcacagagcagttctccgtcaacgaactggccaagctagtgactgctgcaggagccaagctcggtctggacgtgcagaccaagtcggtccccaacccacgggtcgaggctgaggagcactactacaatgccaagcacacgaagctgattgagctgggcctggagccccacctgctctcggattccctgctcgactcgctgctcaactttgccgtccagtacaaggacagggtcgacattgcccagatcatgcccagcgtttcgtggaagaagatgggcgccaagccacggacagtctccgtttagaggaaaggggacgttcccctggcgtataatgtcaaccatgacattgacattattgacatacgtaatgtaataattatgcgcattagtatgatgtgctagttagtgaggttgttttattacggtattaggtttcatttttgctgccccacgactggaacctgcgatcgaagggcacatgtgtatttgattctgttcgctcgagctcttgatctgcttacaaaaaaaaaaaaaaaaannnnnnnnnnnnnnnnnnnnnnnnnnnnnnnnnnnnnnnnnnnnnnn

SEQ ID NO: 34537 - DNA, 239 bp, Setaria italica
  Peptide Sequence Number=SeqID_100511
ttgatgcttatttgtaggtattgaggaagttggctaatgctcacatgccaacatatgatgttcaagcaagtagtgcaacattgatggaagcactcctaacacaatgttcatttcataaaaaatttctgggaatcacttcttcacttcttgggctatcgaaacatttattctcggtgcaaaaggccttggattatgctatctacctgagatttctgttgttcttagttctctttcttact

SEQ ID NO: 34538 - DNA, 301 bp, Setaria italica
  Peptide Sequence Number=SeqID_100512
gaagtgcggctggtcggacgaggaggtggagaatcggaggaggaggatgtggcttcgtagttgaggcgagaaggatccgggaggcgggggaggtgtgtggtgtagcgccgcgcggtggagggcgcgtcgggcgagccgccgcagcgccatggatccctgtctgggcgcccagggaggcaagggaccgtgtttacggaagaacgcccagcgccattcgatcaatccttctctttttttcccttttccttttttctttctttctttctttctttttttttttttgtcttaggaacgccattcg

SEQ ID NO: 34539 - DNA, 276 bp, Setaria italica
  misc_feature (231)..(231): n is a, c, g, or t
  Peptide Sequence Number=SeqID_100513
gggtacctctcatccggcacccagatgccgtcgaacacgtcgcaggactcgaggctctcgccggcgaactcggcgaccacacggtcccggcccgggtgccggaagaagtagaggtacagcgcgcaggaaagcaccagcgctagggaggccagtaagaacgccaaggcgatgcgctcgatcgacggccccgacggcgccgccgcccaccagttccggtgcgcggcccccggngtcgagacccgcgggctcccgacgccgcccctgctgcgagccgcg

SEQ ID NO: 34540 - DNA, 151 bp, Setaria italica
  Peptide Sequence Number=SeqID_100514
gtacgtcctgccgctgccatgaatcgtcacggcagcttcgttcttgccagccttctgcactctgaaccacggcctcgtctcctcgccggagccctcgccggcgtcgaagtaccggcaggcttcccacctcctgaacatcccaaagctcctt

SEQ ID NO: 34541 - DNA, 180 bp, Setaria italica
  Peptide Sequence Number=SeqID_100515
ttcctcaacatcgtgccggcgtggtggcagttcggccagaccttctccaacaactaccagaatttcgcctactgaaactttcaagcaggagagagcgcttggtctcattggccatttcttgcaattcggtcgtatggcgagtacgctcgtgattttgacggagcttgctctacttgccat

SEQ ID NO: 34542 - DNA, 537 bp, Setaria italica
  misc_feature (507)..(537): n is a, c, g, or t
  Peptide Sequence Number=SeqID_100516
aagagcaaaggcaagaaatcggccaaatctgatgatgagaataaagctaacgatggagatccatctccaaacgaaactgaggcatcaaatggaaagactgatatcaatgatacacctatggatgaatctcaggcatcagatgaggatgctcgagattctggcaaaaatggtggtggaacagacctaaatttgaatttaggtttgaaagacccggacggtgataatgaagctgacacagcagagcaacaggaagcggccaagaacccgcagacagagaataatagattcaagaggaaatctgtaacccctgaccttgagatgagaatgtaacccggctgttccatttctttcttgatttcattactatttgccttgaggcgtgtaacttaggtacattgtcatcgtagagacaattcagcaaaatcaactacaggacataaaggagtgtgaagtgtttgaactcgttgtcaaacagaatcaatttaatataccagatattttcaaagnnnnnnnnnnnnnnnnnnnnnnnnnnnnnnn

SEQ ID NO: 34543 - DNA, 534 bp, Setaria italica
  Peptide Sequence Number=SeqID_100517
cttacccgcgccccgcacccactgcctcgccggaaaataaggcctccgccgccgccgccgccgccgtagccacgggaattagcggacatggagggcgtcggcgcgcggctggggcgcacctccgcgcgctacggccccgcaacaacgttcacggggcccgttaggaagtggcacaaggagtgggtccccgtcgccgccgccgccgcggaaggcgctccccgatccatttgtttgcgccggccagccgcgagatgtccttcttcttccgtggcgggtcgcggcagcgcccgacgccgcaggagatcgtccgctccatcaaggactccctcgtcgccctcgacaccaagaccggcgccaaggctctagaggatgctgagaaaaacatacttacgttgaggcatgcgctttctggtgatggagaagtagaaccaaatcaagagcaggttttgcagatagcccttgagatctgcaaggagggtgttctttccctctttgttcagaatcttccttccttgggttgggagggtagaaagg

SEQ ID NO: 34544 - DNA, 579 bp, Setaria italica
  Peptide Sequence Number=SeqID_100518
cccgcgccccgcacccactgcctcgccggaaaataaggcctccgccgccgccgccgccgccgtagccacgggaattagcggacatggagggcgtcggcgcgcggctggggcgcacctccgcgcgctacggccccgcaacaacgttcacggggcccgttaggaagtggcacaaggagtgggtccccgtcgccgccgccgccgccaacgccaacaccagcgccagcgccaacggcagcgcggcgtcctccaccggtacgggatccggcagcggatcccgtgggaataaccttctcctgtttaagtggacccctgtgaacggggccaacgggggggagggggaagcgacggggagcagcaggcggcggcggcggatacggccaccagacgccggcggtatgtgccggtttctgtagttgaagagcaaaggcaagaatctgccaaatctgatgatgagaataaagctaacgatggagatccatctccaaacgaaactgaggcatcaaatggaaagactgatatcaatgatacacctatggatgaatctcaggtcctaaattacaacagtgatcttctgactgc

SEQ ID NO: 34545 - DNA, 479 bp, Setaria italica
  Peptide Sequence Number=SeqID_100519
ggccgagccgcctcgaggtcacgcttccatcagggtttcgggacggggaatctgacgtcacaggagagaagagccccgcgcacgggctggcctcggcctcggcctccacctccatggccgccgcagccgcctctccgtattcatccatcgcgcaatccccaccgagccggtactaatggcggacgcctctgctcgtgatcccgtacgaatgacgaagcactagcagaccgtacaaccgcgggagcagagcagcaacgaccgacggccggcaatcaagggtatgtacgctcgagggtgaagaaacgtccttggaaattgagaaagaggagcggcagctcgaaactgggcaagccgcggcgtttggatgtggggtggtggctctggtagatcgtgaggatggagagagagcgtagaggtgcggcggacttcgccggcgggcgcggaggagtgccggcggcgggtcggaaagggaaagggag

SEQ ID NO: 34546 - DNA, 633 bp, Setaria italica
  Peptide Sequence Number=SeqID_100520
cgtggtgctggagctcgtcacggggctgaggcccgtggacgtgggcagggagcggcgggacgtgacgctggcggactgggtggtggccaagatccaggtcggcgagctcagggaggtcgtcgacccgccggtgctcggcgagggccccggcgtgatggcgaccgtcgaggccgtggcggagctggcgttccggtgcgtggcgccggacaaggatgaccggcccgacgcccgagaggtgctggccgagctcaggaggatccagacgatgctgcccgaccttcccggcggcaagggttcttgatccgggttgtgcagaatggtattgtctgcatcatcagaattgagctagccctgctcgatctcagggccgaaaaccttccattgtccattgctgcgactactatgctgacatcttgactgaggattagcatcacatcctgaatgtaagaagaatgtttgcggcttgtgctggcatttgtcaaaggcatgtgcctcatggttgactaccagaaactcaccgagaactacaagaattagcatcaggcagtgtgtagtctagttctgttggtatgtacaagttctacaaatagtaacagcccccaaagtcaaatgcacttctccaagaaaaaaaaa

SEQ ID NO: 34547 - DNA, 375 bp, Setaria italica
  Peptide Sequence Number=SeqID_100521
tctgcgcgaaggcgaagagccgggcgacctcgtcgtccccggcgacgccgccgtcgtggttggcgtcggcggcacgcaccccgcccctcgccttccaccacgcgaaccacacgttgaggctccgcagcgcgtgctggagctcctcccggctgatccgcccgtcgctgtcggcgtcgaactgcgccagccacgcccggaactcctccaccgtcggctccccttgcggcagcgcccggtaccgcatgaacgccatggctccctagctctaacaaccgaccgggcggcgccgccgctgcttgccttgcctgtgtaacgctagctctagctgcttcgcttggcttttggtgagtgaagaaggcgactgatgagctagtg

SEQ ID NO: 34548 - DNA, 329 bp, Setaria italica
  Peptide Sequence Number=SeqID_100522
caataaccactcctcatatgtatgtgtgtatatacacatatatatataggcatttggcaaatgttaaaatactcttacataaaacatacaacacaaatacttcatatgggtaaaaccgtctaactttttgtcggtacatcgaacggacctggtgccttcacgacttcgcttcacctcgacgcaacattcgtgatggtgccacccatccttcgacttgacgccgtccgactggccgggcttgccccctggttttgaggtcaaaccggtcaaaccctcctgcacaccccgcaaggcgtgactcaccaatgtcggtgtgtgtctggcctccg

SEQ ID NO: 34549 - DNA, 424 bp, Setaria italica
  Peptide Sequence Number=SeqID_100523
gcggcgccgaccgcgacgccaccttctacgccgacctgtgcacggcgcggtactccggcgccgacttcctctcccgcggcggcgccggcgaagtcgacaactcgccggtgatcaacggcatggacttcaacgcgtcgacgtaccccgggtgggacgcccggaacgccacgagccggagcttcttcctgtccctggtcggcacgctgttcggggagatggccatgtacggcgcctacaactcgtcccgccgcctcgccagcgccgtcatgttcatcaacgcgcagctgcccaccgtgtacggcttcgcccagtgcacgccggacctcgcgccggcccagtgctggcactgcttccagggcgtcgccgatctcaaccgccagtggtacgacggccgcgaggggggcggatctccggcgtgcggtgc

SEQ ID NO: 34550 - DNA, 235 bp, Setaria italica
  Peptide Sequence Number=SeqID_100524
ttagctgaggtttcagaacccaaacgtgtatcgtatgcaactatgcatggagcatatatacatgttcgtagtcgtagcagctgcagaaatggcctctgcatgtggtcaaattgtaacttgaaatttgtcctcaaggtctttgtaatgtttcttcagggaagaggaatctgaagccgtaacagcaattgctacgttcggccgttctatttaagtcatatgtatttgcatttctcag

SEQ ID NO: 34551 - DNA, 861 bp, Setaria italica
  Peptide Sequence Number=SeqID_100525
taagcctcaggcacccacacaccctcccctagctagtagctcgatctccttctctctctctctccatggacgctccggctccgagcagctgcacgcctcctgctcatcactctgctcgcgccaagtgatcagagaagctgcgagctcttcagctgcagcctagctctaccagttgaccctgaaccacgggagagcagcagctgctagcgagcagtgcacgcgcaggtgtgctagctagctcgctagctgcccgtagcttgattgattggctagaggtggtagcgttaggtagcttttagttctgggcatggagagcgctccggtgctggtgaggcacgccggcggcgtggcggcgctgcgtcagctgccgccggggttccggttccgccccacggacgaggagctggtggtgcagtacctccgccgcaaggccttcggcgtgccgctccccgccgccgtcatccccgtcgtccccgacctctacagcctcgacccctgggacatccctgccgatgcaagcgagggggagaagtacttcttcgcggtcaggacggcgggcgccggcagcggatgcagcaagagcggcggcgctagggcggcaaccgcgagcgggcggtggaagccggcggggaaggagaagccggtggtccttccccggccgtgcggcggcgggagcctcctcgtcggcgtcaagaggacgctgacgttcgtaacccggcggaagaagaaggcgtcggcgccgtcggcctccctcggcaacggctgggtcatgcacgagtaccgcctcgccgcgccgctgcacaagaacggctgcagactgggtcaggctttcgcctccagcttgttcattactttttgcac

SEQ ID NO: 34552 - DNA, 452 bp, Setaria italica
  Peptide Sequence Number=SeqID_100526
tctgtcctcgaaaatatttcacttatcagcaaaggggaagcacctgatagtgatgtgactgaagagatggcaagaagtttctatctaaaacaagaagcggcgtctgagtagcacctgaaagaaactggaagcgcatttgtgggcttggggatcctcaaatcggattgtggaactttcatcctaacggtagcatagcctagcccgttgcatgtgtctggcatgttttgaggctttcttcatggatggaactggggctaatgtggcactctctgggtttaccgtcttgctgcacaatctattggagttctttatgctagtagtatttagagattctactgtgcttcgagtagactctgctgcaccgttggcatttttttttcctgaccgttgtgcggtgtaccgggggctgtttggttgcagaaggatggaattcaccgggatggactcagggg

SEQ ID NO: 34553 - DNA, 602 bp, Setaria italica
  Peptide Sequence Number=SeqID_100527
caaccagaaggttacttgaactggccaaagcaaaaaggaggcaaggattttgataggtagccattctcaggcaatgccactgcttatatctacccttagaattggttcatctgcagcaaaagtaaatgctgcagccctactgagtgcactctgtaaggaagaggacctgcgtgtgagggtcctcttaggaggctgtataccacccttaatctctcttttgaagtctgaatctgctgaagcgaagaaggctgctgctgaagctatttatgaagtgtcttctggtggactttcggatgatcacataggcaggaaaatatttgtgactgaaggtgttgtgccaactctgtgggacttgcttaatcctaggtcttgccaagatcgagtagttgagggttttgtgactggggctttaaggaatctctgtggggacaaagacggttattggaaggctacacttgaagctggtggtgttgaaattattactggtcttctttcatccaagaatactgcttcgcagttcgaatgctgcctccctgttggcacggtttatctgtgcttttggtgatagcattcccaaaattatagatgctggggctgttaag

SEQ ID NO: 34554 - DNA, 510 bp, Setaria italica
  Peptide Sequence Number=SeqID_100528
taaaaaaaaagaataacaatctactgccaaaaggaactcagcaattacttcttggcagatgaatagcccaatgtccaatagtaaatcacagtaaactagctaaaggctatgaggacgtaatgaatgcatccacataaactatgcttacactcgttagcaatattggtatatttggtattacttcactagagtgcaagaggatgcagtaaaagtgcagcgtcaatgggaatgagattattccaaaaagaggcaggcaatttttgtattgcatcttgtctactgtagcaacagcatacactgaaagaaatcaattgacatctacagcatgtggtcattaacaacacatcataacccttaagttatgaaacatgtttctggaagcttgaaaaaagaattctgaagcaacagcttctttgaagttattcctttcaaataaaatcaaggggaaatactgaaataactaattacttacccacctaacctgagttcatgctaatatgaagtgactta

SEQ ID NO: 34555 - DNA, 221 bp, Setaria italica
  Peptide Sequence Number=SeqID_100529
acacctccgccgccggcgaggagcccgacctcgagctgaggctgtagctagctcgatcggcgacgacgagcggcgcgcgtacgtgctgctgcagctcaatcatccgatccaccaccatcctgtaaattgtacgattgcccagcgttgtcgatcagtcctgttttctcttgcttgcttgctctgctgttgcatgatgtgcatgcttgtactatatggacgta

SEQ ID NO: 34556 - DNA, 475 bp, Setaria italica
  Peptide Sequence Number=SeqID_100530
agacaacctgttcgcttctcaggggagcagaatgcagggatcagcgatgagcaagagtggggtggcgatgatggcttctaggctccgtctccacggcatttgtctcctgaaagaagccatcttcccccgtttcttctcttcagtttgtttgcttgtgaccgtcaaatcattggggtttcccttgggaagggaaatttcttggatttagttcaaatttcggctgaattggtcttgaaacgtgggcctgaccaacaagggcgattccgttctttgttagacacttagactggttgggtccggccaagctgctgtcctcctcccgtgaatttgcagctgtcagagctcaaaagattcagctccccaagaaaaaaaggtgactggatgaagtgtgctcggaaaggtttcaacaatatagcagaacatacatccagtcatggattcttcaaggtaaagtcaatgtggatggaagagttgt

SEQ ID NO: 34557 - DNA, 397 bp, Setaria italica
  Peptide Sequence Number=SeqID_100531
agcacctgacatgtgggccccacatgttaggacagcagcttctcttcgggctcagatagggttcagctcctctgcgcccgcaacgcaaagccccttgttggcttctcaggggaagcatagagcagcaacgaagaagagtagggtggcgatgatggcttccaggctccggctccaccttagactggttgggatccggccaagctgctatcctccttcccgtgcatttgcagctgtcagagctcaaaagattcagctccccaggaaaaaaaggcgactggatgaagtctgcttggaaaggtttcaacaatatagtagaacatacatccagtcatggattcttcaaggtaaagtcattgtggatggaagagttgtgaataaagctggaacacaagttatt

SEQ ID NO: 34558 - DNA, 301 bp, Setaria italica
  Peptide Sequence Number=SeqID_100532
ggcgtggtgtatccatcgaaggagcttctgaaacgcttccagcagggccatttgacgtagagactttagggagtgtgaaaggccctccttgcaccggcgagcctgctgagcctggttcaggcatgactccaccagcttctgcaggtcctggagctgatagcggagggagatacgtcgaatcatggctcacagtggtaggaggatccgtcagcgccggaaattgatgtggtgctgggcatctgggttggagacccgcacttaacgaagtagtaatagttccattaacaaacctccatagctg

SEQ ID NO: 34559 - DNA, 222 bp, Setaria italica
  Peptide Sequence Number=SeqID_100533
ggaatggaggggacggtttggctatgggcgtatgcctatctgttgtcggctccggagcatgctagatcaccggcggcggccaggcgtggtggttgcttgccgtcgttgacgtcgccgtgccgtcgcggcgggagccccggaggcggttagtttgcgggcaagcgtgcatgtgatgattctgagacacgcaacagtggataggcaaggcacacaggggatagg

SEQ ID NO: 34560 - DNA, 179 bp, Setaria italica
  Peptide Sequence Number=SeqID_100534
tattcgtcggagccccgcctccgccttcgccgctaatgccatttccggccaaatcactggccggaggcacactcccaccaccgacattgccgatcggagcaccacctccacttcccagctgcttactagactcagccgcggcagagctgttgcttcccgccgcgctccccactccccca

SEQ ID NO: 34561 - DNA, 994 bp, Setaria italica
  Peptide Sequence Number=SeqID_100535
ttttatgagccatccacgaatctgcggtaatcctctccaagtttttggtaaaacttgacatcggatggctttattttgctgattgcgaactcgaaatgcctcattgctacctgtttgatgtcaaagctctcatcaagtgccgcaacagcagcttccctgcagacaagctttatgtccgcaccagtgtagccttctgtgagcctagcaagttcctctagattcacgtcagggccgcatggtatgctgcgagtatgaatgcggaaaatatctgcacggtcagtttcatttggcggttgcacattgagcaacctgtcgaaacgacctggcctcgttagtgcaggatcaattttgtcaggacgatttgtagctgcaataacaattactttctcgtccaaaccatccatttccacaagcaactgagtgaggaccctatcagcaacagaggtgccatcattttcatgcccacgagttactgcaagtccatctatctcatcgaaaaatattatcgccggtgcattagctcttgcttttgcaaatagcgatctcactgctttctcagagtcaccgacccatttgctgaaaagttcaggacccttaactgcaagaaagttcaattgtgcttcagaagctgcagcgcgagccatcaaggtcttgctgcaacctggtggtcccatcattagcaatcctttggggggtttgtccctatacgtttaaatgcttctgggcattcctgcggccaatggatggcttcaattagctgctgcttgacattggcttgaccaccaacatcttcccaacacacctttggaagctcaagcatcacctcacgcattgcacttggtcgaactttcgttttagccttcttaaagtcctcagtgttcactgacagtgctttttcatctatcgcatcataagacgcactacattttgtgttcacataataagactcactactttttgtgttactatttgtgcacggagcatcatccaatga

SEQ ID NO: 34562 - DNA, 138 bp, Setaria italica
  Peptide Sequence Number=SeqID_100536
taaagttgacttctcattaatcagctggtctgaccttatcgaatgatttcatcaatatttcgaaagtgaattataaagtatattgctccttggtttagggtacctctgaattataactgcgccgatgggcatgtggaa

SEQ ID NO: 34563 - DNA, 2031 bp, Setaria italica
  Peptide Sequence Number=SeqID_100537
aattgagatacgtggagatcttttggcagtggcatcaaaacagccggagcagcagtttttactacaagcatgcctttctcgtagtacatcatctttcacctaaggtaagattcatttaccatccctactttccatccatgtgagcgaacctacacatatgaacaaaagcactactaatccatcgagccatttgctctcctggatgtcaagtggcaacacatctacacaacattctgctgctgcacgcctttcgcctaccacagttcaggtgacgcctacttggaccggcagcacagaatgtatggaccggcaagttagatcattcaaactggtcatatgaaccagtagaagggttaccagagttctgatcgcagcgagctctccaggcattcccaccatctgagctgctgcaggcctggttagggagaatgttgttcccaagatcaccatccaagctcatctgctgcacttcctgaggcgacaggatcctaatgcacctcacacagttgacaaattcctcccatgggtcatcaccaagaagtaggatgtcatcctcatggtccttgtaaacaagtttccagccaattctctgctgttcctcaagttgcccctcaatactgaacatgcgagccagagcatgcttcaactcatcgtatccagaataatgactaatgtcaatggaccggcctacagctccacgtttatacaccttggtaaatgttctcatcctcttcagaggagcagcaggcggccaagaagttctgttcaagaaaccaccgtcattcataccagagtcaattgaattgaatgccatatccgatgcaccaaacgactgtgaaaccatggatgacgatatttcttgttgaccatcctttggaatcctgtagttaccatcaatgtctgttgaaatatgattctgatacttggaagcatcaattccatttgacaagaaggcatctgctcccatgggaaaacccagctgaccatcattgtttattccaaaaagtgcattattacttggatcagtaccctgaatatcagtctcaggaggcgcatctttgaatatctgctgctggttgaagttagacatggggaaaccttgatgtaaaagtccatccgcttgggaaagccacactgaagttgctgatgaagctgtttccagatagtccgttgggggtgcactgttcaccaaattctgtggtataggccctgtatttggtaactttgaagccatcacactttgcttgacattagaattcaacttcggcagttccttagtcgatctcggtatccctgtgacagcttcaagggagcttggtattgacataggagcagtagactgaggcaacttctcattgttgatcatgccgcattgttggttccttccaagaattggttgcgcaagatggttaccattagctgttgatggtgatgttgagcaagaagggatttcctcggtaagtacagaatgtgctgcaccatttgccatcatagaacttccagctgctgaaatggcattgactgatgtagttggaggaattgcagcatgtgatgtgtcagtgaacccaacatgcttctgtggaaccttctgctgtggctcttgttgcatggatggcggtggtggtggtgttgcctgtgatggaactttggtactttgttggggcatcgtttgttgctgggaaagcgattgagagtttgacagctgctgctgcatatcaagaatcaacttttgctgctcttggattagcggtaactgtgcaagagtaacagctggttgtgatagcaaagactgctgctgctgttgcaatttctgtaacagttgcagttgaagctgctgatcagacaattgcagctgctgagctgccagatttggcacttgcgcagccatcttatttagctgttgctgattttgctgctgctgctgcaattgctgttgctgaagcaaaagctgctgctgctgatgtagtaacttaagttgttgttgttgctgttgctgctgctgctgctgctgctgctgctgcggagtggggc

SEQ ID NO: 34564 - DNA, 257 bp, Setaria italica
  Peptide Sequence Number=SeqID_100538
ctcctcacagagagacgcggaggagacacagaagagataagagctaagaagagaggagagagccgcccaccaatactctccctgccgaagaaggcctggagtgtgttatagcaggttgcacatgccctgtgctgtgctggccaaggatacacttccattctttccagtacagtgaggatccagcagcattagtatagtatagtatagctgctgtcgatcggccaaaggaccggagatgcagcccggcccgctcccgg

SEQ ID NO: 34565 - DNA, 604 bp, Setaria italica
  Peptide Sequence Number=SeqID_100539
agcagagcaaaaccccggctcctcccgccgccgccgccgatgccgaagccggcgacctccgtcgcgtcgctcctcccgaagttatggcaccgccgctttcttcccccttccctcgtccctcgcgccctttcctcctcctgtcccctcctcactacccactcggccccacgccgccgctcccggctctccccttccacgcacatcgcccccgctgccacagtgtcaaccgccgcggcggtcgaggccccaacaaccacagcatatccagtgtatgatcggcttctgccgtgccccttgcaagacgaccctccacgaatcgagcacctcgtagctcgggaggacgaggtggcagctgatttcatctccaggtctctcggccttcctcctctgtatgttgcagatcttatcaagtttggggctgtgtactatgcccttgttgcgccacagccgcccccatacgcagctccagagcatgttaggatctttagggaagtgaccgatccatctgttctgcgccggagggcgtccattaaggggaagacggtgagggaagcacagaagacatttagggtgacggatcccaaccagcttcttgaggcccggc

SEQ ID NO: 34566 - DNA, 560 bp, Setaria italica
  Peptide Sequence Number=SeqID_100540
gtaaataggtatcttggaaggaagatggctcagaaacagctaaccccattgcctgtagatgcagtccagttaatataggtgttgatcaatagtcagatctggataatgatccaagaactcctttttaaggtaactaaggattctggatgcatggtatactactggcaagggagtgtatgtctcagttgatgtggactgccttgacccggcatttgctccagaatcgtatcgcaggtgctgccctgaaaaggcaggtcgtatcgcaggtcagtcgatcagtccaactattggacggtgaatgcttcatttttcaccaatatatttattttctccgatctagatgattacaggtagttttagtcaccatttgggctgttgtaaagtgtactctgaaaatatatcttttcatttacagtaaaaaaaaggtgcatacaaaatagttccttttaagatggaaccgatacgcatgctgaaaagctgaatagtagtacaaagttactgcactgcatctgaaaaaatgtatcgctttactaccttgtctcatgaagatattctgtaaa

SEQ ID NO: 34567 - DNA, 216 bp, Setaria italica
  Peptide Sequence Number=SeqID_100541
cattgcctgcttgcaacaacactagtgcaaatctgcaataagctagatttctttcttcaaagttccaagttccaacaacaacaacacgtacgtgcaagaagcagcagcagcagcagcagcagaagaagaagaagaagcaggctggtgctatggtgtcccctctctgttgttcactcccacccttgctctggtttattctcttcttcatcttctccg

SEQ ID NO: 34568 - DNA, 451 bp, Setaria italica
  Peptide Sequence Number=SeqID_100542
gggcctctgcctgacgcccacgaacttgctgccgccgccaccgcatttggttctcactttgggcttggtttcctttgtgactggcagctggtagctgcattgctgctggggatggctttgtggctgctgctggaactggagctccattgggaagaagagatcgagggcaacgtatctttgcaggtgttctgaactctggtctgaactttgggggttgagctggtgtctgaatataaggggaggcgtgatgttgagatgttgggtttagtgggggccttgtcatgttctgcttgtctctgatgtccaaatcttcctagtgcgttaaagaagatggctgagttttctaagaggcattgggggaatgatgctgtattccgtagcttatttcaatgttgatgtggtcttagtggctgacatgtttgttctttaccctggtagacaaattcagcct

SEQ ID NO: 34569 - DNA, 366 bp, Setaria italica
  Peptide Sequence Number=SeqID_100543
aaagtgcaggaaaaagatcagagaaaaaagaaacccggaaaaatctccaacccggctttgctcctcaacccctatgcgatcaagagctgctcatctttcatgaggaggaagtggttgggaggggagaacagctttatagcagcagctgcccaagaacctccgagctcagctgacctctccggcgtcctcatggagatccatgcccttggattaatcaatcagacgacggggacaagcgagtcgcatagagagggagtgacagggacggcaatgatctcaccggctcggctctccctctccttgtgggagacggatcgaagacgagcgagaggaaagtacaagaaacggggagcagaaaagaatgag

SEQ ID NO: 34570 - DNA, 500 bp, Setaria italica
  Peptide Sequence Number=SeqID_100544
ctgttgtctcggcggagttccgtgacaacgcaaggaatgttgaccggaggaactttgtgtgcatagagtacttgctgaggagagggaagcgacagcttgagcagctcaagaatcctgatattaccggactcgctacccttgaagtgaagaaaggagaaagttgtcgtccacccgcctgaagaccaacgaggcccatcagggaggctgaacggcagcagagggtcgcgtcacgtatgttggcgaaggaagtcggaggaggcagggccccctggaggatgccggaccgccggaggcaaagaagcagtgcatcttggagatgatgaagctgcaggagaagcagcgttaaacctggtggataactgtagtctgtaggtgcttctgttccgtgcctttgtgatggtccgtaaattgactgtagaggccaaacatattgtcgtagtcatgcttgtcagttacttgttactgattactctgattatatatcagatccatatggctgc

SEQ ID NO: 34571 - DNA, 905 bp, Setaria italica
  misc_feature (1)..(27): n is a, c, g, or t
  Peptide Sequence Number=SeqID_100545
nnnnnnnnnnnnnnnnnnnnnnnnnnntttttgatagaaatatataaagctgttttgcaagtagcttttttctttttgataaaagccatatatattatatcaggagagcagcaaaattacagaaaggccgtcaaaagagcagccaattacatcgaagtccccaggatgaggtcgtcgtcgaggcaaagcatcaccggcgaaacaaggatttggttgaagctgtcgccgacgggtagaagaacggctccccagagccggtgggaggctcgctgctggacaggcgtcgaaggacatgaggagaatttgatgaaatttggcgcagagctgctcggaggcggaagatggcgtaggggttgacagtggacgaaatcagagccgacccgggcaaattcgaggtgcagacaaccggatccaccacacaggcagccggatttgaaccactggaggccgaatcgactccgaagacggccgaggcgagggggaaaccgagcagatcgaggcgacgagtggaaggatccgcccgcaagaagggggagaaagagaagcagagctttattttattgagactcacctcacagccgtggccgacgatgacgaagacggcaacaacggcgacgacggtgaaggcgaggggacggctcccaagctctacgggccgcccagcacccatccgggcaaacaaggaaagcctaaacctactgtacaggcgacgaaggaaacagggggccggcccacctctccgtcaccgccggcgaggacgccggagcggcgggagaaggggccggagacgggaaatccggtagagctacagtaaagagggttttgcaagtagcttatggaaagcatggcgcgacaagggcaaaggatgataagcggcttacttaaaaggttaatttagttaattt

SEQ ID NO: 34572 - DNA, 388 bp, Setaria italica
  Peptide Sequence Number=SeqID_100546
gtgtacgcacaggccttctctttgtattttccccattctgaaactttccaatcctgagttgttaatatcctttttcagtgtattctggcagtaataaatttttgtgcaggtgcccatgattgaatgttttttcaacaactttgagaacctgagtgaaaaaaaaatgacatgtcatttcaagttcaactgggaaaccacaatgtgtacttatgccagagaatgaatgaaaagaaacaaacaagaagggaaaggaatacatcaatgggcctagagctttcccttcaaatataacatagttacaaaaaagacaaatagcaaagtcaaaatgcaagatatatgtaaggctacatgtttctcctagcttgttgctagtctatagcaatgaaag

SEQ ID NO: 34573 - DNA, 442 bp, Setaria italica
  Peptide Sequence Number=SeqID_100547
gctagacttttcaccaatgccttttgtgttttttgtttccatgccgactgccgtttcttgcaccaaattggccggtaaattgagctatagatgccaaacattcaaaactaactcttgtcttgttgataataaaatgagatgctaggaaagtatgagtcaaaatatgttccaatcaatggttttactattttttttagtagtcaccagtatcactaacctataccaaaattatcgccatccatttgcatgtcaaattgtcattcccagtcacagtccaaccatcttagcaccttactagatttccgtattgctatttgccaattgttgttactgaactattagaacaactaatacatgttcgagtgccttatgtgagtatgtttattagatgagttactgaattagtattcttgcagaagcgacaccaaaaactatcttgagg

SEQ ID NO: 34574 - DNA, 746 bp, Setaria italica
  Peptide Sequence Number=SeqID_100548
agaaccagcacagttcaattcaacttttgaaaaggattcgaactatacgcccatgatcagcacaaacacggccagctggtaatttgtttcaatagagaatccgagtttgacacataaaaagttgcgagtgctctgctaacttaacatcgggttacaagaacatgaaagcttccaattcggtagagcacaatgtgatgttcaacacacatcagactcaaactacacctagaatctgcctcggcctctaaagccaccacgccctccacccctggggaggtccaccacggcccctcggtggtcctcttccaccacggaatgaaccaccacggcctcggccaccacctcttccgccacggccaccacctcttggtgctccttgagattgtccctttggttgtggcaggaagcgcgacagaggcaacaatttcatggggtcaatgtagaacttgtcgccttcattgtacgatgttgcaatgatcccttccatcatcttcacagagaaataggattcgttgatggggccgaagatctcgtcaaccttgccgatctgggtcttgttctggaggtagatgggcgcgttgaagtagggcaccttctcgttcgtgagcttcgtcaccgcgtccccctcgcagggcgtgcaggaacgtcgacacctcgacgacctccgcgggcgggccctcgtcgcggaacccgccgccctcgcggaggcggagggcggaggaccggggggaggacgccgcaagacc

SEQ ID NO: 34575 - DNA, 250 bp, Setaria italica
  Peptide Sequence Number=SeqID_100549
atgaaagtttaggaaaacttgtgacaaaccatctagctgaacagtagaaggttaatttgaattctgtgaatgcagacatctagattctagacacacttgacaagtctattcacaaaagatttataactgtatatatcctaagctgttaatcttagtacttatgtcaactcccaacagtgtattttgtcaactccctggtgtaactgccgttttttatgcatttatgcatatgagtaactcatcacattgt

SEQ ID NO: 34576 - DNA, 300 bp, Setaria italica
  misc_feature (299)..(299): n is a, c, g, or t
  Peptide Sequence Number=SeqID_100550
ggttgattgtcatttccacagaataaacgttatgagcaggcttgatcgcatagatcgtttgtacttagaaaatgaaaggctactgctggctgcgccagaactcggtggcctacgggttatgatttacgctgtgacttgaataagtgatgagttcatcatcgattaaccagctgcagcaggaagtttgatgatgtgaatctgtgtggttggatgattggatcgatggatgcaaagccatctcttgggcccaaaggtaaacaaaccgagtggtcgttctcgggctctgttgccagccccana

SEQ ID NO: 34577 - DNA, 446 bp, Setaria italica
  Peptide Sequence Number=SeqID_100551
gctcgggatcttgctgtagcagctgtgcactgaactcaagcaggccctcaagagcctcagctctctgctggtaagaccttgtgtcgaacctcctctgcctccaatctgatgagcttctgggtgaattgtcagcaccaagaaggtcgatgtcaggtgagtcagagtagttttcgctgtcgcttcgaagcacttggaaagtgcacttgtccttggtgatggattgatcaatgatagatggcaacgcaagctttgtgatgtgatgtaagtgggttttcagaggatgccagtgggaattcagcaattctgtcgattcgaggagagtttactgaaacatcaggagatttcaatctggtgagaatgttggtggcctgccgcttttcaggagttttgatcatattacgtctaggtgattctcgccgtgtagcttcgaccctatttggtctgtt

SEQ ID NO: 34578 - DNA, 749 bp, Setaria italica
  Peptide Sequence Number=SeqID_100552
gcgcggtatccggcggcgccccagcgacggaagcggctcgccgccgccgccgccgccgcccccggaggcgagctccaggaggttggagtaggatctcgacaccatccccgctgccccctccaagatttgatctttaccggtcactcgccccgcacacaaatctccacgaaaacctctcaaagatttgggattcagcgagcaatttgcggcgccgaaggagctacgaatgcccggacagggaggcaaaggatctacccaccggtctccggcggggagaagagaaacgaaatcccggcaaggaatcgaatcagaggggggaggcaataatcagagaccaaaaggccgccgtccccttccctttctccgaaaacaaaaacccgagagctttcggccggaaatcaatcgaggcgaccgagcagcaacatctcaggtgctccagctcggacgcccactatctcgacagaccgccaggggacaagagaatcccgcgtgctcgccgacgacgaccgcccgcttcttggacgaccagcatttgccctctccctctctctcttcctcaatcgcgcacaccaccaggcaggcgcggctcggcaggaacagatttgatctggcggagcgaagagaatcgaggcaaatccctttcgagggagggagattttcgagcgagggaggccggattgccgacagggaaagaacgatgggtgggagggaagcgattcttgggtcgcgtgcgggggagttggcccttg

SEQ ID NO: 34579 - DNA, 258 bp, Setaria italica
  Peptide Sequence Number=SeqID_100553
ttttttttttttttgaagtaaatatcgcactccagcaataccatatataatattataaccagttcctagaacatggtttgatgcatagttccgtggaggcaaaggaatcagctcaagaacttctgtagatgtcacatacaaatataatgaaaccaaatattgtgcatgcatgggttgcatttatttcatatgacttgttacattgcactaacttttctcaagtgtgcgtactcatgcataactcacttcatggcatcg

SEQ ID NO: 34580 - DNA, 454 bp, Setaria italica
  Peptide Sequence Number=SeqID_100554
attaaagcaacttcttgcatgatttatagttattgaatccagtggcagagcttggcttgacaatgagagggggccagattagcaatttttttgtgcttaagtgatagaattaagtgctccttaactttggccagcactaacctccgcttctgattgagtctgctagacttgctttggatcatagactgttaaaatgaaacatcaaattgttcactgtatttacgctaaggactatcaagctgtgctcatggtgcctatttatttcattatgtggctgcagacaaaactccacttggctgaaacaatagttgaatttgatgaacctaatgattaaacagtcacggagaaaaaataaaatcatattaattccccacagtttaagttggaacatgaacaccttgtgcgaccactttgcaatccaaatatttcccagaaaagaaaaaatccatgcgac

SEQ ID NO: 34581 - DNA, 467 bp, Setaria italica
  Peptide Sequence Number=SeqID_100555
ccggcgttctcggcgtacacggtgctgatcggcgcgctggcggaggcgagacggcccgagcgcgcgctggagctgctgcggcagatgcaggaggttgggtacgaggtgggcgtgccgctgttcacgactctggtgcgggcgctggcccgtgaggggcgcttgggggcgcgctggagctggtggatgaggtgaaggggagctgccttgagccggatatcgtcctgttcaatgtgtgcattgattgttttgggaaggctgggaatgtggacatggcctggaagttcttccacgaattgaaggcgcaagggctgaagcctgatgatgtctcgtacacgagcatgatttgggtattgtgcaaggcggggaggctaagtgaggctgaggagctgtttggtcagatggaggcagaaagagctgtgccttgtgcatatgcgtataatacaatgattatgggctatgggtctgcg

SEQ ID NO: 34582 - DNA, 966 bp, Setaria italica
  Peptide Sequence Number=SeqID_100556
tcaagctcaagatcgtcggcgcggccaaggtcctgacggtcccgccgcaaaggctccgcatgcgtcaggttctcagggacgacgacgtctgggtcaagctccacaaggacaaccagatcgccgtcccgagcgcgatgccgtttcacactaatggtgtaagcgttgacatgggcacgggcaaaggcaaaggcggctacgagcccatgcggccaggcttcacaccgctgttgcagaagaggagcttcggcatgttgggttctacttccaacacaatcatcaacggcaatagatttgaggacaccaccaagaggttttgcgccaaggaagagcccagatatgaagcagaagtgatagtcccaaacgtgttcctgaacaagcaggatgagatgagcaatgaatattgtgatgtggttggagcaggcagtaattctgatgttgaccagcagcagcacattgagaacgaagtggacatcgaaggaagcgatagtgagtctgcctcatcctcggatggcagcagcagtagcagcagtaacagcgacagcagaaccaggagcatggaatccggtgaggattgcgcagcagctcgtgcaagcaggccttgtaacgatcagaaggtcgatcagctgcaaaccagagagaaagaacattgtggcagcaaagctgaatcacgtgagattgaacgcaagaccctgaatgatcagaaggcgacggtgcaggaacacatccaccgtctggagctggaggcctaccaaaatctgatgaaggcgttccatgcatgcggcaaggtgctgagctggcagaagatggaactgctcagtgaccttcgggtgcatctccatatcacgaacgatgagcacctgcaggtgcttaatgtgatcttgaaccgcaagggtagatttgcaggatctcaattctgaatccttgtaggaactatgcattttcactcacatcttgtatgtctgtttc

SEQ ID NO: 34583 - DNA, 164 bp, Setaria italica
  Peptide Sequence Number=SeqID_100557
attgttatccctcggaattgcaggatgtaccttccattgtcattaaatttgtgtagctggatcctagccttgcaatcagttctcacagatgcagagttagacagctctgctttgccagctgcagactatctcttgcaccataacacttttgcatgtattcttag

SEQ ID NO: 34584 - DNA, 415 bp, Setaria italica
  Peptide Sequence Number=SeqID_100558
tcgatttcattagtgggtcctattgatttgtcttgattaattcttttgtcctccgtttcagagaagccggatgcatcaaggcaacaacagagcgctgagcaaggtacttggacttttacttcgtttagtgttctcgagtttcctttatattcccttatttttcactttcaattccagatttttagcatttctgaagaaactctactgttccattgggttcatgagcctagtccctagtgtgtgcatattaagaatagtcgagtattacattagtgctgaatgttgtgatttagcaattactataactactgcatgcagcagatgcacacttttccattactgaaaatcactttgcactttaagtttcgaatttatcatcatcgaaccattgttacagacattatgaactcacttt

SEQ ID NO: 34585 - DNA, 823 bp, Setaria italica
  Peptide Sequence Number=SeqID_100559
tgcgcgccgcggcctcgtccggccggccctgggtgctcgaccccgtcgccgccgccgcctccgggttccggatggaggcctgcctcgagctcctcgcgctccgccccgccgtcgtcagggggaacgcctccgagatcctcgcggtcgccgactgctcggtagccgcctcgtccaacttcaagggcgccgacagttcacatgagtctgtggatgcccttgaagcagcaaaagcattagcactgtccagcggttctgtcgttgcggtatctggagctgttgatttcatcaccaacggggagcaggttgtcggagcaagtaacggtgtacccatgatgcagaagatcacagcaacagggtgcgccgtgaccgccctcattgcagcttttgttgccatcgaaccttcagatgctcttgttgcggcagcatgcgctcttgccatctttggcctggcgggagagatcgggatggagtcatccaagggccctgcctctctcaggatgcacctcattgacactctctactgcctcgatgaggaaacagttacctctcgagtcaagattgctctacgaccatgatatacacgcctgccatggccaccactaggtaaacgcagagttgttggaataatgagcaggttgagtttgatttctgtcttcacaaaccatgaatccgtgatatgaagcaaatcggtcaattggtcgttggctcgttgctcgtccagtaaaccatataaacactcttgtgatcgggactgtatttcgtgcttcagctgcagggttttagtagaatgcagtaatagacaaataatacaactaggaaaaaa

SEQ ID NO: 34586 - DNA, 395 bp, Setaria italica
  Peptide Sequence Number=SeqID_100560
ttttttcttagtaaaggtttaaagacaatctcatcaatgtgctgtatttgttttattgtgttgctaacacgcccaactatactgtgcaggtaactgatgttgctgatgctatgattctaaaccggctgttcagccaattgttcagtaaaggcgttattcttgtttcgacttctaaccgcgctccagataagctttatgaaggtggcttacagcgggatcttttcttgcctttcattgacaccttgaaagaaaggtgcattgcgcatcccattggatctgcagtggactatcgtcagttgggttctgtatgtgaccaattggctgaacagccggtttagaatcatagcatcagcaacatcagttaccataaactcatcaagacacaatatgatcgg

SEQ ID NO: 34587 - DNA, 968 bp, Setaria italica
  Peptide Sequence Number=SeqID_100561
tcttttctatttgtactacctttgtaaagtaaaggttgtctatttgtcgtctattcccatttggatctgcagtggactatcgtcagttgggttctgctgagcaaggtttctattttgttggcaaacattatagtacgcttctgaaacagaagctccaatctttaattggagatgaggaacccagcccacaaactgttgaaataattatgggaaggaaattacaagtctggtagaagtacccaaaagctgctctttagaacacatttttgttattactacttaaccatgactttgcaggttcccctgggagcaaatggttgtgcatattttccatttgaagatctttgtgacagacctttaggtgcagcagattattttggactcttcaaaaaatttcacaccctggcactcgatggtgttccaaagtttggatctagtaacagaacaacagcttatcggtttgtcacactggttgatgttatgtatgagaacaaagcaaggctgttgtgtacagcagaggctgggccaatagaactgtttgagaatatcgtgactgttgctgaagcactaaaactaagaccaaggtcatcaaactcacctttaaagcgatgatcccgacctatgtgtggataacgagcttggatttgccaaggatcgtactattagcaggttgacagagatcaatagtagagaatacttggagggcttcgaagctaaggtttgcttcaacagcagcagcaaccattgcaaggcgtagataatggtgctgatgttgtactagcataagtggcaacatcactctttgcctcatttgaaatgatcttgtattcgccccacttggcttacataggcaacagaaaagctctgcttttccaacagtgaagcatgttaaattgttgtctaattaagtcttgttcttatttaagtttattttttttcgttaacgggtttgggtagacccataaaat

SEQ ID NO: 34588 - DNA, 865 bp, Setaria italica
  misc_feature (3)..(3): n is a, c, g, or t
  Peptide Sequence Number=SeqID_100562
ctntccccctctggtggagtgcctggtcgccggcggacggcaccatctgaggcagctgctaaccgccgcgtccggtcggcgttgtggcgccgggtcgtctacttctgtcctgcggcggatcgtcgccacctgcgcgacgccgtcgggtcctcgggcggggacagcccagccatcagccgccgttcttgcgccagagttcctgctctggtgagatggtggcgactgttctttagttcaaatccggatcgttccttgagggatcgcttgtgatttactctgcagctccgcaagatttggtcatttggagcatcatttttctcggatgtttccctttctggtgcctttttcgttacgggctggtaacgggctgtaactcggtttcttgttcctcgatctgtaggctgtagcaagttttaatttttcggacacccaagcaacgatgcactcccgtaatcctggagctgtaactttggctcgccgtgaaagaatttactcatctccatgccttgctttggtgattgcggattaaaataatttcatctgggccatgaaatttgtagccgatcgatggagctgtagtgattctctctttcttattcattcacccgtggccttcttctcccgtatccctccgcctccagccccgcgctgccgtcgtccaggctcggtcctccaggctcgcttcgccgccgtcgccctccaggcccacgccgccgccgtcacccgtgccccgtcgctcaccagctccgccccgcgccccagcacgcgccgccggccacctccgcccgcgggctccaccggaggataagggtgtccaacgacgcgagaagccgcggggagcctaatttttttttgctcccctccc

SEQ ID NO: 34589 - DNA, 1084 bp, Setaria italica
  Peptide Sequence Number=SeqID_100563
cgaaggagatcgccaaaggaggttccataactttcgtgtggtgtttgtctagaaagtggaaaaaataaagacatagtggaagatgagatcagtagttcggtcgttgcggcagctccgccgtttcacccagcaccatgcagagagccactcatcaacaaccagattgatcaggcagcagaatgctttgatcatgcacagttcgacatcccgttcactgagaacactatgtcgtagtggtgaaattacccgatttgcaagtccaagtgtggatctaatgaggtccatgctctccactgtagcggctgattcgatcaaagatattggaagaggtggtcccatggtggaatatgagaggagaatagcatcaggagagcttgtagatggcgatagctttcaggttgacacaattcaacaattacaaaggctctatgaggagttaattgagaatgaagaagactgccagctggatagatacaagtcatctgagaaatcaggacggagtcgatggctatggtcccgcctcattgctcagccttctacctatgctccagttaaagggctgtacctgtatggtggtgttggtacagggaagaccatgcttatggacctgttctatgaacaactgccatctaattggagaaaaaaacgtattcactttcacgatttcatgttgaatgtacatagtcgtcttcagatccccttgatgttgtagcagccgagatttcagatgaggccatcatattgtgtcttgatgagtttatggtaactgatgttgctgatgctatgattctaaaccggctgttcagccaattgttcagtaaaggcgttattcttgtttcgacttctaaccgcgctccagataagctttatgaaggtggcttacagcgggatcttttcttgcctttcattgacaccttgaaagaaaggtgcattgcgcatcccattggatctgcagtggactatcgtcagttgggttctgtatgtgaccaatttctgctagctagtagtgtcaatttggtttcttctgcccactattttccttcactatctttgaactgatgtctgagcaggctgagcaaggttt

SEQ ID NO: 34590 - DNA, 1557 bp, Setaria italica
  Peptide Sequence Number=SeqID_100564
ttcttagtaaagttggtaaaaaattaaagtactattagttggtaagtattgtagtattctagttaagtttacggttcgtttgtcggtcagctccgccgtttcacccagcaccatgcagagagccactcatcaacaaccagattgatcaggcagcagaatgctttgatcatgcacagttcgacatcccgttcactgagaacactatgtcgtagtggtgaaattacccgatttgcaagtccaagtgtggatctaatgaggtccatgctctccactgtagcggctgattcgatcaaagatattggaagaggtggtcccatggtggaatatgagaggagaatagcatcaggagagcttgtagatggcgatagctttcaggttgacacaattcaacaattacaaaggctctatgaggagttaattgagaatgaagaagactgccagctggatagatacaagtcatctgagaaatcaggacggagtcgatggctatggtcccgcctcattgctcagccttctacctatgctccagttaaagggctgtacctgtatggtggtgttggtacagggaagaccatgcttatggacctgttctatgaacaactgccatctaattggagaaaaaaacgtattcactttcacgatttcatgttgaatgtacatagtcgtcttcagatactcttctcatcaatgtgctgtatttgttttattgtgttgctaacacgcccaactatactgtgcaggtaactgatgttgctgatgctatgattctaaaccggctgttcagccaattgttcagtaaaggcgttattcttgtttcgacttctaaccgcgctccagataagctttatgaaggtggcttacagcgggatcttttcttgcctttcattgacaccttgaaagaaaggtgcattgcgcatcccattggatctgcagtggactatcgtcagttgggttctgtatgtgaccaatttctgctagctagtagtgtcaatttggtttcttctgcccatttccttttttcacatctttgaactgatgtctgagcaggctgagcaaggtttctattttgttggcaaacattatagtacgcttctgaaacagaagctccaatctttaattggagatgaggaacccagcccacaaactgttgaaataattatgggaaggaaattacaagtctggtagaagtacccaaaagctgctctttagaacacatttttgttattactacttaaccatgactttgcaggttcccctgggagcaaatggttgtgcatattttccatttgaagatctttgtgacagacctttaggtgcagcagattattttggactcttcaaaaaatttcacaccctggcactcgatggtgttccaaagtttggatctagtaacagaacaacagcttatcggtttgtcacactggttgatgtataatccttgttacattccacttattatgttcaaattcatccataaaactcagcatttaatccgattatatgcagtggtccgtcatagttagaagttatactcaaatgtaaacaacagaaatgcta

SEQ ID NO: 34591 - DNA, 1924 bp, Setaria italica
  Peptide Sequence Number=SeqID_100565
agcgcacgctccacatccccatctggccatcccgttcgttcccatcctctcggcgccggaccgacgcccgaagaggagcctccctcctgccgcattcttggagctgtgtgtctctttcgtgacgccgcttccacgcaaccccgcgcctctggtggcactcgtcgctgtcaaccgggctgacgggcgaccgagggaagaagaagaagccgcggcggccgcggcagttttggtttcttggctgactccgagttcgattcctctcctgattgggaaggtggctttagtacagagttggctggaggccccgtccctggccctcccccatccatcgtctcctgctctccccctctggtggagtgcctggtcgccggcggacggcaccatctgaggcagctgctaaccgccgcgtccggtcggcgttgtggcgccgggtcgtctacttctgtcctgcggcggatcgtcgccacctgcgcgacgccgtcgggtcctcgggcggggacagcccagccatcagccgccgttcttgcgccagagttcctgctctggttccataacttccgtgtggtgtttgtctagaaagtggtaaaaataaagacatagtggaagatgagatcagtagttcggtcgctgcggcagctccgccgtttcacccagcaccatgcagagagccactcatcaacaaccagattgatcaggcagcagaatgctttgatcatgtgcagttcgacatcccgttcactgagcacactacatcgtagtggtgaaattacccgatttgcaagtccatgtgtggatctaatgaggtccatgttctccactgtagcggctgattcgatcaaagatattggaagaggtggtccgatggtggaatatgagaggagaatagcatcaggagagcttgtagatggcgatagttttcaggttgacacaattcaacaattacaaaggctctatgaggagttgattgagaatgaagaagactgccagctggatagatacaagtcatctgagaaatcaggacggagtcgatggctatggtcccgcctcattgctcagccttctacctatgctccagttaaagggctgtacctgtatggtggtgttggtacagggaagaccatgcttatggacctgttctatgaacaactgccatctaattggagaaaaaaacgtattcactttcatgatttcatgttgaatgtacatagtcgtctgcagatgcataaaggtgtttcagatccccttgatgttgtagcagccgagatttcagatgaggccatcatattgtgtcttgatgagtttatggtaactgatgttgctgatgctatgattctaaaccggctgttcagacaattgttcagtaaaggcgttattcttgtttcgacttctaaccgcgctccagataagctttatgaaggtggcttacagcgggatcttttcttgcctttcattgacaccttgaaagaaaggtgcattgcgcatcccattggatctgcagtggactatcgtcagttgggttctgctaagcaaggtttctatttcgttggcaaacattacagtacgcttctgaaacagaagctccaatctttaattggagatgaggaacccagcccacaaactgttgaagtaattatgggaaggaaattacaggtctggtagaagtacccaaaagcttactctctagaacatatttttgttattactacttaaccatgactttgcaggttcccctgggagcaaatggttgtgcatattttccatttgaagatctttgtgacagacctttaggtgcagcagattattttggactcttcaaaaaatttcacaccctggcactcgatggtgttccaaagtttggatctagtaacagaacagcagcttatcggtttgtcacactggttgatgttagatccttgctttgttt

SEQ ID NO: 34592 - DNA, 1441 bp, Setaria italica
  Peptide Sequence Number=SeqID_100566
aaatcaggacggagtcgatggctatggtcccgcctcattgctcagccttctacctatgctccagttaaagggctgtacctgtatggtggtgttggtacagggaagaccatgcttatggacctgttctatgaacaactgccatctaattggagaaaaaaacgtattcactttcacgatttcatgttgaatgtacatagtcgtcttcagatgcataaaggtgtttcagatccccttgatgttgtagcagccgagatttcagatgaggccatcatattgtgtcttgatgagtttatggtaactgatgttgctgatgctatgattctaaaccggctgttcagccaattgttcagtaaaggcgttattcttgtttcgacttctaaccgcgctccagataagctttatgaaggtggcttacagcgggatcttttcttgcctttcattgacaccttgaaagaaaggtgcattgcgcatcccattggatctgcagtggactatcgtcagttgggttctgctgagcaaggtttctattttgttggcaaacattatagtacgcttctgaaacagaagctccaatctttaattggagatgaggaacccagcccacaaactgttgaaataattatggtaaggaaattacacaagtctggttcccctgggagcaaatggttgtgcatattttccatttgaagatctttgtgacagacctttaggtgcagcagattattttggactcttcaaaaaatttcacaccctggcactcgatggtgttccaaagtttggatctagtaacagaacaacagcttatcggtttgtcacactggttgatgttatgtatgagaacaaagcaaggctgttgtgtacagcagaggctgggccaatagaactgtttgagaatatcgtgactgttgctgaagcacacaaggtttcaccaaggtcatcacgctcacagaaaagcgatgatcccgacctatgtgtggataacgagcttggatttgccaaggatcgtactattagcaggttgacagagatcaatagtagagaatacttggagggcttcgaagctaggttgcttcaacagcagcagcaaccattgcaaggcgtagataatggtgctgatgttgtactagcataagtggcaacatcactctttgcctcatttgaaatgatcttgtattcgccccacttggcttacataggcaacagaaaagctctgcttttccaacagtgaagcatgtaaatgtgcaataagctgcataagtattttttcgaacgggtgggtgacccataaaatgttactcaatctttactaagtttctttaagaaaattgtattgtagcacatgttattcaaacctcccgagaggccaagctcaaaacgagatggccttggaaagtatgttccagagagcctcatggttttctaaacaaaaaaaaaaaaaaaa

SEQ ID NO: 34593 - DNA, 1133 bp, Setaria italica
  Peptide Sequence Number=SeqID_100567
gaggttaagcatttcgtcaatgtgctgtatttgtgttggtaacacacccaactatactgtgcaggtaactgatgttgctgatgctatgattctaaaccggctgttcagacaattgttcagtaaaggcgttattcttgtttcgacttctaaccgcgctccagataagctttatgaaggtggcttacagcgggatcttttcttgcctttcattgacaccttgaaagaaaggtgcattgcgcatcccattggatctgcagtggactatcgtcagttgggttctgctaagcaaggtttctatttcgttggcaaacattacagtacgcttctgaaacagaagctccaatctttaattggagatgaggaacccagcccacaaactgttgaagtaattatgggaaggaaattacaggttcccctgggagcaaatggttgtgcatattttccatttgaagatctttgtgacagacctttaggtgcagcagattattttggactcttcaaaaaatttcacaccctggcactcgatggtgttccaaagtttggatctagtaacagaacagcagcttatcggtttgtcacactggttgatgttatgtatgagaacaaagcaaggctgttgtgtacagcagaagctggaccaatagaactgtttgagaatatcgtgactgttgctgaagcacacaaggtttcaccaaggtcatcacgctcacagaaaagcgatgatcccgatctatgtgtggataacgagcttggatttgccaaggatcgtactattagcaggttgacagagatcaatagtagagaatacttggagggcttcgaagctaggttgcttcaacagcagcagcagccattgcaaggcgtagataatggtgctgatattgtactagcataagtggcaacatcactgtttgcctcatttgaaatgatcttgtattcgccccacttggcttacataggcaacagaaaagctctgcttttccaacagtgaagcatgtaaatgtgcaataagctgtgttaagtattttcccgaacgggtgggtgacccataaaatgttactcaatctttactgagtttcttaaagaaaattgtactgtagcaaacgtattgtttatttctaaaaaaaaactaa

SEQ ID NO: 34594 - DNA, 360 bp, Setaria italica
  Peptide Sequence Number=SeqID_100568
tttttttttttttttttgttaaagcagaaagcaggaagattaggataattttcaacaaaagagagcacatcctgccagatcaaagcagtccttctatgatagggatcaccatatacacaagctaggatgaagtttgtagcagtaggtctatacacacaacgaaatgcagctatcttttgtttccaatgaaattcctgtgttctcatcagatccttattgcaaacctcctggatcagtaaatgtgagcatgattcgttcaaaaaataaatgtgagcatgcagattgcggaacttacacagaaacaccaaagatatccaattatgggaatcactccttatgttcactaaaactctatgcatt

SEQ ID NO: 34595 - DNA, 1162 bp, Setaria italica
  misc_feature (1)..(68): n is a, c, g, or t
  Peptide Sequence Number=SeqID_100569
nnnnnnnnnnnnnnnnnnnnnnnnnnnnnnnnnnnnnnnnnnnnnnnnnnnnnnnnnnnnnnnnnnnnttttttttttttttgtattctcaccaacatccagattgattaaaacactgtatttcaagagccatttgtgatgtttgttttgtcgtcattattcactgagaaggctgcaagcacccacgggataggagtttgatcacacagtgaggtctaacagagcccatattacatacaaaagaatcaagggtaacaagctatagtttctgagtatccacacccgcacttcgttttcgctcgttctggcatgatcaaaggggcaaatgcgagctttgcccctatgctcttcaggggttccttttgtcgagcaaccaatcgccaaacagcagtatgatacaaggtattttcaactttttcaggtattaagcataaaacaaagttacattgggttctgatatgtcacttttttccaccagttgtaaccccaactacaacattgctcaccaattttcccttgtcatctactgtcattggattttcaacaacaacagttacgttctgtgattgactcattggcgcggaagttgacggaatgttatatgaatttccacttgatgcaggcagcgtgggtggcaaaggtctcacagttggtacctgatgcccaccaacacttgtaatgaagttgcagatggcacatttgacagatggtgctccatatggatacatcaacactgtttggcaccggccacagttcacatgagctatgctactcactggtctgacaagattgactgtgtcacaacatgagcatcttacagttgttgcattgcaagtatacatcaataatgtttggcagccaccacaaataagtcgagccatctccattcctggaggtggcacgttgctgaccacacggcataccgcgcagcacacgctcggagcgcctctggggtagagtagaagcctcctgcacccgtggcacacgatctggctctgcatgcctcaagaaccgacggggggaggagacggcaagaaacctccgagaaccgacggaacgagaaggataagaagaaaaaatactagggcggggcggtgggggagaggcaccagcagcggcggcgagaggcaggcgccaccgatctaggacgtgcccccgagga

SEQ ID NO: 34596 - DNA, 579 bp, Setaria italica
  Peptide Sequence Number=SeqID_100570
tctagggagcgatctatcaaacagccagcaggggcctattcagttagctgccgacctgatatgctttatgaaagcatccatattctctccagaatggtccagggctatatacatggatgcttgcagaaaatttaacacctgtcacctagatcaatttctttcaatactgaagtgccaagcttgtttccctgacgaaagcagcactggaaatacgatgtcttctgaaaataaattactgcacatccacacaaacaagaaacattgtaggagttcaaaacaagctgcattgatgtgcagtaatttattttcagaagaccttgtggagaaagtgtttaatgttgacaatgggaagtacacctataaccactatgcacttgctttagttgcgcatgctatgacttatgcagcaaactcaggatttagtctgggaagaaagatttttgttcagtatgttacttatcttttggagaaggcaaatgatacatcatccagctcattaaatgttagtgatttctgtgcaagtctcccttgtgcttttcatcttgaaattcttttggcaacatttcatttaacggcaga

SEQ ID NO: 34597 - DNA, 966 bp, Setaria italica
  Peptide Sequence Number=SeqID_100571
catatgtagcacgtcgtaaacgatatcgatgctcgcgctattagcccagccattgccattgatcaaaacaccctttagatcaagtacttctctcggttccttcaagaggtatatgagggacacaaaatctccaggactcatgtccatgtcaaaaatgactggcttacccctgctcacattcctgaaatccggcttgtagagaacctctctgtaatatggaaattgtgtacttatgttgaaacggccagtgtttttagggagatttagaacctctaggaagctcttgcaaaattccttatccagtaagctacttttattggtgtttggcttcgcggttgttgcgacatatacctgcactgcttctggaccggacacttccgtagtgtatccatcctcacatcttcctctgttgcttcccggcaccaggcagaaggcatctctgatcccagtctgaacatgcccactgtgaactccgccctcttgcagcccaaacttgggtttagttcggccatcaaagaaagggttggagccgtcacgcgcgccgtacggttcgttggaggttaccacggtgatgttcatgtactcaagctcggcgaattcattgccgccgccgttggtctcaccatggcgcatgctggagagagccacgccggcggcgaaggagtcccacatgtagtagcccgtgttgttatgactgtcggagcgcctcctgcgccgcgccaggacctggtccagcgactggaagccgtactgcgcctcgtacgtgctctggcgccgccggaactcggagtagaactcctccgtcacgggcaccgtgttcgtggcgtcgagagggaccagcgtgacgggcacgcccgagtggagcacctggtacgcggcgaaggggtcgccgaagaagttgaactcggcgaacgggttggcggcggtggcggtgaagaggttgccggcgacccgcacggcgcccgg

SEQ ID NO: 34598 - DNA, 1432 bp, Setaria italica
  misc_feature (1431)..(1431): n is a, c, g, or t
  Peptide Sequence Number=SeqID_100572
tgcagaacacacttctataccacttaaccaaactacagccacacaaatgctaacatgtgaagacgtcaacaagaggacatatgcatgtatggttacaacttacaacatccacttattagatatggtgtaagcgataccacgttgcatgaacaaatctgcgttcccaagaggccctgctctcctcagatcttgttcgagccctggaatcccaggaaggaaaggagcactcccaactgtaaaatctgggttggaacgttgcacctaccaggagtaggcaccgagagaagcgcaggagcctgaagatcatagcgctgctttgctggaatccctgacccatctccgggaaccgacggagctgatctcgcagcgccatgaacagcaacaggtgttccaaaactaatgcttgccgagaacattttctcgtccaccggaaatgagtctgttggcagccggaacaaaccaggggcgccgacagggatattcctgtaatcctcgatctctctgcggcaatcgtctccgggcgcggggagcgccaaaatctcctctcgccgagggcttgagctgctcagtctttctgcgacagaaatgccggtgtcatggacaagcaaacccaccctttcatggtaatcctctggtgccgggagagccagtatctcctgacgagctggacttgaggtaccgagctcttccctgaacgaattgctgctgtcgtcgatggtctgcgtgtcgtcgtattctttgtgctcatcgcctggtgcagggagcgccaaggtcacctggttgggaggaactggcttgctcagcttggcgcttagagagatcctggcacgttgaagcgcttgcaggacactctcaatatcctcaatgtttgttgacgccggtcgatacgggtgtgtgtcagcttggctgtctgtgttgtcgtggaactgtgacgagctccagtcggagaccttgctgttgagggtgtcactcgaggggctcccctctgatggtgctttgatggcgtagtgcttagtgttcgcattgtagcctgaatcgccgtctgagatcaggtctccgcggtcttgatcttgcttagtgactgtgcttgtggtggagctttcttgtgctgaaacggaaggtgtttgcgcacgaccgttgtcaggctcgtcccttgcttcacgccgctgggcaccgttctcttgtgatgcgttttggggagattctgaaagggaaccgtttggcagacattcagctgaggggttgatggtgatggggaggtcgtttttacttgaattagcctctgcatctgtttgatatgccttattcttgacctcgacatcaaccttgtttgcattcctgttctcgttgtactgtttctcccactcccattgagctttctcctcttcctcgtactgcccgatcagctcggcctgcctctccagcaccctnt

SEQ ID NO: 34599 - DNA, 521 bp, Setaria italica
  Peptide Sequence Number=SeqID_100573
taattcttgttcacgtttgttaatttatgtattttagctttattcgattagttgataatggaaatgagaaaaggaaggaacactatcgcattttgttcttctgtattttaatcttgattcatacttttgttttaataattaccaaacgtgttctcacattattctgttacagcattataggttcaacaaacctgtgtcttcaagatttattgcaaagaagtaaatcactttggtgttttttccacttcatgttgatacgatgataaccatgtagttccatgaaatgcttgaaaccgtggtgtttcctggcttgtggcagtgttgaatcctgaaagatcaaggcgcagagcaacgaaagatgccaagggcttgtatatatgtgaaatacagaaggctcagcaagttgttgctgtaactggatcatattctttacgccttatgtatgtcctgtaatctgaatgtctatcttgaaccatgtagtatcaaacttcaagacaacatggatttatggctaaaaaaaa

SEQ ID NO: 34600 - DNA, 647 bp, Setaria italica
  Peptide Sequence Number=SeqID_100574
ttgcatggcattcaatcaagtccatccaaagcatgatggataactgacaaaagttgcggtgaaacaggtgtgacaagcctcacagaaccagatcgatagctgcatggatttctaaaaatatagaataactctttgtgatccaattttgccaagtaacttggaaggtgagattctacaatcttttccattgccagcctagtcttgtcaaaactgaacttgttacgggtgacaatgcaagccactgattgaagtgtttcataggttagtttgcttattgtggtctgaataatacccagatattctggaccaaatggttcattttcctttttctgtaagtcaaaaagccggagaccatcctgaactatgtgatgggtatagccattggactctgaactcaaacttttttaccatgctagctctcactttctcgcaagatatttctccactcctgatatatgactcaggcaagtacgcctcgtccaaaaacttcggtcgcttcacacgactgctgcaaccacccggcttgaggatcatcgactccagccacctccgcttcttgtcgacgagggattcctgactcgaaactagcgagcaaagttcctctgcatcctcgaaagtgaactccatcaccaacgctcgagatagcg

SEQ ID NO: 34601 - DNA, 460 bp, Setaria italica
  Peptide Sequence Number=SeqID_100575
acatcgacttttcttctcgacctctcgctagtcttcccgactcgaacaactccgaagcacactagccaacgagatagcgaaccctaggaacccagtggccatctttggagcggccatgacggtggatcagaagcaggccatgccgatgcaggcgcaggccatgcagcccggaagaacatttggagcagagggcagtactgtggtgcttggttccgtcagaacaataggaagaagcgtcctcgcagattgcgcgatgggccaacctcagtggcagctgtcatccagcggtgggctgagcacaacaagcagttggagcacgattctgagggcgcgaagcgaccaaggaaagcacctgctaagggttcaaaaaagggctgcatgaagggaaaaggagggcctgagaatacacactgtggataccgtggagtgaggcagcgtacttggggtaagtgggttgctg

SEQ ID NO: 34602 - DNA, 2283 bp, Setaria italica
  Peptide Sequence Number=SeqID_100576
ctctcttctttcccccacacatcgacttttcttctcgacctctcgctagtcttcccgactcgaacaactccgaagcacactagccaacgagatagcgaaccctaggaacccagtggccatctttggagcggccatgacggtggatcagaagcaggccatgccgatgcaggcgcaggccatgcagcccggaagaacatttggagcagagggcagtactgtggtgcttggttccgtcagaacaataggtatgactgctttgatcacctcttgtgaacaggaaatattgactgctatgtgtctgccatgttccgaccctgtaaaacccaggacacaaataacagtttgtgtttcagcaggaggccgggctttttgctcgaatgagtacaagctctcggtcaagcagaaaccccagggagatgcgccaccaatggcctctaatctgtggtttgtttaaccgttttatgtctggctgctctctgtgctagagcatctggctagcagccctgactggtagtgttgttgtgtacttgtccagcattcggttagttttgccttcgtcatctcctacatatttttacctgctaactttgtatgtggagttgcaatggtgccaatgactcaagtaatatctgttcctgttaagatggttttgtccttgctccctgaaggataataatgtgttcgaaacttaattaatagtagcttgtttaatgagtgaaatggtatctgcgcacaggaacttttgatcaaaacacgagaagctaaatagtatcagtttctgtggagatgattgtcatgtaggaacatatggacatctgtgggtggtggtgcgtgaaatagtaacctgtttctgtggagatgattgtcatgtaggaacatctgggtggtagtgagtgaaatagtaacctgtttcggtggagatggtacattgtgtttgaacgttgtcttattttggttgttcttgattgttctctacttgttcatcgcatggtttctgtaagccttttctgtttacaggtacatctgttgggtcatttcgttttattgtgtacttgttcattacattttcttttgtgcagtattttacacgacgacagatatactaaagtgtttcttatcatttagcaggaagaagcgtcctcgcagattgcgcgatgggccaacctcagtggcagctgtcatccagcggtgggctgagcacaacaagcagttggagcacgattctgagggcgcgaagcgaccaaggaaagcacctgctaagggttcaaaaaagggctgcatgaagggaaaaggagggcctgagaatacacactgtggataccgtggagtgaggcagcgtacttggggtaagtgggttgctgaaatccgagagccgaatcgggccaacagactctggctggggaccttcccaactgcagaggatgcagccagggcctatgaccaggcggccagagcgatgtatggagaagtcgcccgcaccaacttccccagacagaatgcagtggcctctagccaagttgcttgggcggcaacccctgcccaggttgctccatcagttgttgaaggtgttgtacatagcacatcatgcgagtcaacgacaacatcaaatcactcagatattgcatccaccttgcataagccggaagtatccgacctttcaagctctgtgaaggtggagtgcccagaagttgtggaggctggttcacgtaggtctgagatggtatctggtacttcgcatcagcatgaagacagccatcccagtacccaagctagcacacccaatgtaggtgacaaggaagtcttcgagccacttgaacctattgccaaccttccagagggtgattttgatggttttgatattgatgagatgctgagaatgatggaagctgatccacagaatgaaggtggtgctggtgctggcatggagcagcccttctactttgatgggttggattcaagtttactggagagtatgctccagtcggagccagagccatattccctgtctgaggaacaggacatgttccttgctggctttgaaagtcctggtttcttcgagggcctgtagtcagtgaactgaatttctgtttggcctgctagccaatgatcctcagcccatttcattgctgagcttgtggagggcaaacggtctatcataatttggagaaacctttgttctgtaaggccagaactggtgatgtaaatagttcccaccttgtggaaggaaacgaacaaagggaaaaaaaaagcacgtgctttggttttcggaacaaaaaaaaaaaa

SEQ ID NO: 34603 - DNA, 1097 bp, Setaria italica
  misc_feature (1)..(32): n is a, c, g, or t
  Peptide Sequence Number=SeqID_100577
nnnnnnnnnnnnnnnnnnnnnnnnnnnnnnnngggtttgctcatatgaccaaaatctccagccatgaatccagcacctttggcttcaccattttcagcagtgacataccaaagaattaaatgctttgctttgatgtcagaaaaatgcaaatttacattgaaacccgtacaagcttctttcagaaacacagattgagcttgatagaactagatacaggtgatttttataatcgacaaagatgtcaatatattgtttgctatacacatctgcttccatctgtggagaatagcagtttcctgactcttcttcgaacatgatatccatttcagctaattacatgccaggttgacagcttgatttcagatcctacctaacaaatagtgataccaacaactgggagaagagaataaattcgctgacaacgacagcaggggagtggatgcctagaaagggcacgatatcaacctgcaggaaattctccactgcagatccaacagtcgcaccagctgcaagtcccccgacggtgatcaatgcagccttacctaagttcatatttttctttgccaggaaatacaatgacgcaccaaatcctgttgctaggataaaacctggaacatcagggctagtgtatgccgatggtaaagatgtagagcttccactagcatatgtgaaaaccatcagtgcaccataaacgcatgactggatgcccaagctgctcgaagatggagtctcaaatgtaataggtgcattcttcatggttgcctgcatccactgcgggacagtccctgctcctgcactttttacaggtttaacatcagcatagcggatgctgttatcagcaacctttccagccctccgctgcgataaactctgcataagcaacatgtcataggcagcttccacctgggcgacggcgtcctggtcgtccttgcaggaggcgaggacggcgttcttggcgcgcaggatttcttcgaaggacgcgccctcggcgacgcctagcagcttcagcgcgccctccaccgtcatctcgaacggcgccggcgaggagtcgtccgcgcgggaggccgccaggcgcggctgcctccaccgcgagcggg

SEQ ID NO: 34604 - DNA, 1213 bp, Setaria italica
  Peptide Sequence Number=SeqID_100578
agcagaagcagcgccgccgccgccgccgctgcggtgggatggcgtggctcgggcgggcgggctgccgccccagtcgaggattttctgaagatactttgagaaatcttgcattcaatttcttggctgctgtgttgatcctggaatttctcagtgggatcagtttggttgttcaaacttcagctctagaagtagtggctcctgctatgcctccatctcaaggttggagaccatttcattccatggcatctcaagataaagtcctcataggtgtttcagtgcaaccagcagatgagcaaagacaaaagaagctatattcatcaacagttgccctgtcatccgcacatcctcctgtttcagtgcctagctatagttctgtgcctggcactttagatctggccatttattcctcagatctatcacgtcctttggtgcagcatgacagaatattagcaacggctgctcctgctcatgttgatgctgaccctccagatgcagcttccaattcaagcgcagctccttctggattagtgcaacctccagtatcccctcacaatggctgttgtgcaccaaacatggtacaaaaacgaggcacccgggactgccattgtgtttatccagtgagagttgagctcttccttcgtaatgtttccttgatttcaaattggagcaacgactttcttcaagaacttgcttctcagctcaacctgcgtgttaatcagttcgagattgtaaatttttacgttgttggagcttctggactaaatatcacaatggatatagcaccccataccggaattagctttgcagccgatcaagttaacacaatgaattattcacttactcagcatacaattcggattgatcctgtgttggtcggggactataatcttcttaatttaacatggttcaggccattggccccagccccagctccagcattcacaatagcacctaaggcctctccatctacatcatctaccataccaagtccgagtggggatcccagcaacaatagacattcaagcctgattactgtcattatcatatgtgttggtgctctaattggggtcttgctgattgttttaacaatttgcttctgcacatttagaaaagggaaaaagaaagtgcctcctgttgaaacacccaagcaaaggacgccagatgcagtttctgcagtggagtcacttcctcgccccaccagcaccaaaggtta

SEQ ID NO: 34605 - DNA, 1570 bp, Setaria italica
  Peptide Sequence Number=SeqID_100579
ttaaacttaaagaaactaagaaattaagttttaaaacaaatttagacttactagacaacaatttaagaaaaagaataagaaatagacattcaagcctgattactgtcattatcatatgtgttggtgctctaattggggtcttgctgattgttttaacaatttgcttctgcacatttagaaaagggaaaaagaaagtgcctcctgttgaaacacccaagcaaaggacgccagatgcagtttctgcagtggagtcacttcctcgccccaccagcacaaggttcctttcatacgaagaactgaaagcggcaacaaataactttgagccttcaagtgtgcttggagaaggtggttttggccgtgtctttaagggggtactgggtgatggtacggctgttgctataaagaagcttactaccggagggcaccaaggagacaaggagtttttagttgaagtggaaatgctgagcagattgcaccaccgaaatcttgtgaaactcattggttactatagcagccgcgagtcatcacagaaccttctttgttatgagcttgttcccaatggaagccttgaggcttggcttcacggtgcactaggtgctaactgccccttggattgggacaccaggatgaggatagcacttgatgctgcccggggattagcatacctccatgaggattcgcagccctgcgtaatccacagggatttcaaagcctctaatatattgctcgagaatgattttcatgctaaggtatctgattttggtctggcaaaacaggcgcctgaagggcgggctaattatctttcaactcgtgtcatgggaactttcgggtatgttgcccccgagtatgcgatgacaggacacttgcttgtaaaaagcgatgtatatagctatggagtcgttctacttgaactactaactgggaggaggcctgtggatatgtcacagccgtctgggcaggaaaacctagtgacgtgggcacggccgattcttcgagatcaagatagattagaggaactagctgaccccaggcttggcgcccagtacccgaaagatgattttgtgcgggtgtgcacaatcgcagcagcctgtgtttcaccagaggcaaaccaaaggccaacaatgggtgaggtggtgcagtcactcaagatggttcaaagatctgtagagttccaggaatctatgccgacaccgcccacccgccccaacgtccggcagtcttcgacgacctatgaatctgatggtacctcatccatgttctcttccggccccttctcaggcctcagcccctttgacaccgaaaccattccaagaactgcggttttctcagaagatctccatgaaggtcgatgactgatgggggtggttgccttgctgagttgtttctctagaggctgtagcaatgtagtcacccattggagggctggtggtccaattggcctgaccagtcattgggaagaggtacatgtaaattccattttcattcaccgtctgaaaagactagattgttgtcacaaggacgttcggtggctttgtatgaaagaaatgatttgttcaagtttcttcttcag

SEQ ID NO: 34606 - DNA, 575 bp, Setaria italica
  Peptide Sequence Number=SeqID_100580
aataaagaccttagtaccaaaaataccgctgcgcactaaaaaacgagtaggacatttccataaaggaaatgctgttgtatggttttgtcacaagaggaaaaaatgaaaagtagctccaggacattagaggatggtatgcacacagcaaaattgaatttttcttctttaccctgcactagttgatgtttgttcttcttttcgatgtcacttttataggacaaatttgcaggccaagcaaattacaatgacagagtactcctacggtcatgtaaccataccaaattggtaatgtataagttgtcccagcagacacagacaagtttgagagataatcttcgtcacctggcatggcaacgcaggtgggcaagagctccttgagcatgatctcgcgctcctcgaggaactgctccgttgtgagcaggccggtgaggccgcactcctcgaacaagatgcgcgtggactcggcggtcgtcttgcccatcatcttcgccttgacggaccagtcgaacaccttgccgtacctcgccaggatcttctcctgcaccgccgtgtagaaaccctccgtgtcgaggagg

SEQ ID NO: 34607 - DNA, 423 bp, Setaria italica
  Peptide Sequence Number=SeqID_100581
cgagggtggggctgttggggacgaacccctggtacccgtactgcccgaggccgacggcggcgtggaacgccgagcccagccagatgatggtggtgcacgtctccacgaggtcggcgaggcggtccatcgccggccaccactgcgcgccctgcaggtcaccgtgccccacgtgacgcacctccctccaccacgcctgaagctcgctgtcgcccgtgacggcgctgtcgttggtgtagtaaatggtgcagtagtcggtgacccatttcttgattgccgtccagatttcgagaccgtccactgcatacgggtagtccttgatcagcaggtcaaccttctctgggttctttcgagaccgtccagccacgcctctgcaaatgaattttttcacaacaaaattgattcagaagcatggttagaatttcg

SEQ ID NO: 34608 - DNA, 729 bp, Setaria italica
  Peptide Sequence Number=SeqID_100582
cctaattctattgtattcttgttctattattcccctacaaaattgcctgatccccggctcacaatactacaatcacatcagcttagaatcaaatcgaatcacgccgcagacatccctcagctccgttgtgaaatcaaattcaaatctacctacgcctgatgcctcacactcaagatcagttaaatctcaaaccgtaaggcagacaaaatcttacgaggttgcctttgctccctccgccgcggtcgctacagtcgtcacctgagcggcggccgccttggcatcggcctcgagctgcttcttgtttcgctcgagcgcctcggcgacctccttgggcatgtacttctcgtcgtgcttggcgagcacctcggtgccgcgcaggaagcacgcgcactcccgcgccttctcggccaccttcctcccgtcgtcgcggcggaggtcgtcggtgaagggcttgaggaacccctcgacgactacggagtggccctcgcggaagaggtcgggcagggcgccatcgtagcggacgagcacgtcggtgatgaggtccgtgacgacgaactcgatctcgggggaggacggcgaggggtgcgcaacggagccctcgaggacgagcccaccgaggcggacgcgagacttggagggatcggcggtgaacttggcgagcgcgtcggtgggcgtgacgtagaagacgagctggtcctggaacgtggcgagcacggccaccacgaaccc

SEQ ID NO: 34609 - DNA, 223 bp, Setaria italica
  Peptide Sequence Number=SeqID_100583
cctaaggcctcgtgaaactgtgtgtggaacttgctaggccaacgtcatctctaagtttgcatttttttttcttaacaaccaaacttaacatgcatgacagccatactcatcacttacaagcaagtgcatcatctacctgacttacaagtagtgttacgcatgagaagactacgcgactaacaagtagtggtactctcaatctcacatgaagaggggctttcct

SEQ ID NO: 34610 - DNA, 258 bp, Setaria italica
  Peptide Sequence Number=SeqID_100584
gttgactttgagatgctaatctcacgcatgagatcatggacttggcaagagtcaattccttttctactattaactgatagctgagaaggtaggatcatgctcctctctattagttccatgaagtagttgtcagctacttcttctagggacttatctcgaatctcccttgagtaaccttctgcactccaccgtcgtatcaaacgtcttcgtctaatcttgtgatcttcagggaagatggatatatataggaaacaagac

SEQ ID NO: 34611 - DNA, 439 bp, Setaria italica
  Peptide Sequence Number=SeqID_100585
cgtctcgtctgcgattttcagcccgccgcccgagaggaagggagcttcgaggcggcctgccacggctcatcggccgggcaggctgagccaatggcacgggcccttggggcgcgaacgccctaatgtgggtcggggcgagcggcgggcacaggcgccggttgctagcttggattctgacttagaggcgttcagtcataatccgacacacggtagcttcgcgccactggcttttcaaccaagcgcgatgaccaattgtgtgaatcaacggttcctctcgtactaggttgaattactatcgcggcacggtcatcagtagggtaaaactaacctgtctcacgacggtctaaccccagctcacgttccctattggtgggtgaacaatccaacacttggtgaattctgcttcacaatgataggaagagccgacatccgtactatt

SEQ ID NO: 34612 - DNA, 735 bp, Setaria italica
  Peptide Sequence Number=SeqID_100586
aaaagcatcggtgacatgaaaaaagatagctgaagacgcccgcaagatcaatcacctgaaatctcaaattagggattttcaacagcgccaacacgataaagtaacagcatttggaggagatagagttctgagcctctttcgatcgatagagagacatcagagtagatttaaatgccctcctgtcggtccaataggagctcatgtggaactgtccagcgattcctggtctgttgcagttgattgtgcatttgggaggctcttagatgctttcattgtttcatgtcataaggattcacttcttttacgagaatgtgcgaaggaagcaaactaccgcaaccttcaaattattatatatgactttgctaaaccactgcatgacatcccaaatcatttggttccttcaacaccacacccgacgatactctcagttatccgttcagaaagtcctactatactaaatgtattggtggatcagggccatgcagagagacaggttctagtacaagattatgaaatgggaaagtctgtcgcatttgatcagaggatacgaaatctgaaggaagtatatacttcagatggttacaaaatgttttgtagaggttctgttcagaccattcttcctccaaatagaaagtggagagctggacgtttgtgcacttctgtaggagaaacaataactgaaatgaagaatgaagctactggaattgagcaaataaacttagagagggagggtca

SEQ ID NO: 34613 - DNA, 269 bp, Setaria italica
  Peptide Sequence Number=SeqID_100587
gctgcgtcccgcgaacgtgaggagggtggtgccggggaggatactctcggtgcgggtcctgccgctggccgaccggaccgtggtggtcgccgggaacaaggtcggacatatcgggttctgggatgtggatggtctcgtggaagatgatgaggatgacgatggtgcagacgggttgttcgaatattttccccacaggggagccgtggggggcattgtggtgcaccccaccgatccgcggaagatttacagctctagctatcacggtgaaa

SEQ ID NO: 34614 - DNA, 445 bp, Setaria italica
  Peptide Sequence Number=SeqID_100588
aacaatacaaaaaattttaaggcaaaccgatcaaagtactttacgcctataacaagggatagttagagactaaatctagagacggtactatccagacttatagtatgatgcagttatgtaggcttggacatttcagcttcttttctgtcacactatacagataagtgcaactactgcagaggaaaaccaataaaaggagataaagcacgatacctcttagaaaagacaatgaccagatgatgatagtgagtttaatttaacacttgaattcactaccatggtccaggtgaatatgctctctttcaacttactacaaaaggaaacaacgataagtacacaagccacagtaattagcttggcagacatcatcactttgcacccactagtgccaaatagaaaaaaaaaatggcatgggtgccttgaatacaaaactgtaccaaccata

SEQ ID NO: 34615 - DNA, 207 bp, Setaria italica
  Peptide Sequence Number=SeqID_100589
ctcaggggactcctcgtcatcgtagtctgcaaccttaatgtagaagaggcgctagcagtggtggctgcaggacatactgctcgtcacaattataatagaggtcctgcttgcggtgatcctggagcttgaccagggacagccgatggaacaggcatgatagggcagcggcgcccggcaggtgggggagttggcgctgttgctatagat

SEQ ID NO: 34616 - DNA, 220 bp, Setaria italica
  misc_feature (185)..(185): n is a, c, g, or t
  misc_feature (212)..(212): n is a, c, g, or t
  Peptide Sequence Number=SeqID_100590
gtttccacttccaccaccgcttgccggatccctagtccaccttccgtgtctatctatctcaaagcggcagccgcttcccgccacttgggcgcgcgccctcgtgatcccgggcgaccgaccgagctcgccgtctcggtctcaggtgcggccgtgctgctggtttcgctctctaggggcaggggtanagagagagagagagagagagagggggnggtcggtt

SEQ ID NO: 34617 - DNA, 575 bp, Setaria italica
  Peptide Sequence Number=SeqID_100591
tgagctgttgtccaattatcagttgttgttttggcaacattttatgtgttggaatgaaacgaaattggaatgaaacgaaaggtggatggagtaatttgacaagggaacgtgaaccataaggatttgatcgtcccatcgtttgttcctttcagttctgatgatatgggtcgaaccaatgtggtgtgcttagcaacccacatgtgccaataatagcttattcatgcttgaacatggaggtgatggtgtcctactgtcttgttcttagcagaagaaatgtggctgccatgacttgatttgtcagcacttgggcctctttagagatcacattttactttttcatcgagcaatgcagtttattgtgaactgaagtttggaaaattatttacaacttggagcaatgcatcagatctcaaaatattgcaaagtttttttataagttcaatgctggctctattgttctagccaaatatttgccctgtgggcttgatcatttaagattactggcaagtttgtttatgcttgaatttgaggagtccacaatgaagttgtagatttccctgatattaacatgcgac

SEQ ID NO: 34618 - DNA, 1030 bp, Setaria italica
  Peptide Sequence Number=SeqID_100592
caaccacctccgtccctctcgctccccactcctcactctccggcgttcgcttcccaaatccgatctcggccagccgccggcgtcacctccctcctactgcgccgccatggacgaagtcgtcagccagatcctggagaagcaggtgctgacggccgcgaaggccgtggaggacaagctcgacgaggagatctccgcgctcgaccgcctcgaccccgacgacatcgaggccctgcgggagcgccggatccagcagatgcgccgcgccgccgagcgccgcgccaagtggcgcgcgcaggggcacggggagtacgccgaggtccccgagaaggagttcttctccgccgccaaggccagcgagcgcctcgtatgccacttctaccgcgacaactggccatgcaaggttttggacaaacatttgtcaattcttgcgaaacagcatgtagagacacggtttattaaggttcatgctgagaaggctccattcctgacggagaagctcaagatcgtcgtccttccaacccttgctatagtaaagaatgccaaggttgaggattatgtggttggcttcgatgagcttggtggcaaagatgacttcagcactgaggatctggaggaacgcctcgcgaaatcccaagtgatcttcctcgacggagaagggtctgcgtttgtgtcgaagcaggccgccgctgcctccaaacgaagtgtccggcaatcaggcactggcgactcatcagactccgaatagctcgtccactgtatctaaaatgggtatacctcaggttagttggctttcatgccaacctgctgtgttatccttagcaggacaagtgaactttggtcaagttttgaagtttaacatggttgatatatgtaccttagattcttaagatctgaatctacaaagaatttgtgcctgagctgttgtatagtgacgccttgttgatcacatctggttggttttgtttttgagtggttcctccccctgtatcaccagaacaactcttgaacgataaagctgacagaaactttg

SEQ ID NO: 34619 - DNA, 326 bp, Setaria italica
  Peptide Sequence Number=SeqID_100593
acgccggcatcctcggctcctcctcctcctcctcctcctacaggtgcttcatccagtgctagtgcaagtagtaccagtgctgctgcagcgacgacgacgacgacaagaaaggaagccgaaggatcagcgccaagttcgtgataattgtagatcatctaccctttgattccatcaactcgatcgatcccaattctaatcccacctcctcatcaatcttaaattttagttgcttattttctattattgttattgttggttgtataagagaggtctaagggactttgtaggatcatgctaggaggagtacatatataagagaacatatc

SEQ ID NO: 34620 - DNA, 914 bp, Setaria italica
  Peptide Sequence Number=SeqID_100594
taaatttacaagggtaatagaagaaataataggaacaattagactttaacaattaataggtagctaatgttgaagggaatgtattcgccaccaaagcattgcaaggtatgttttagaatctgaacacatgaagaagttcttcgactatatacagcttccaaattttgacatagcttctgatgcttctgcaacctttaaggaactattgacaaggcataaagcaaccgtggctgaatttctcaccaacaattatgattggttctttgaagaattcaactctaggttgctatcatcaaccaactacataacgaaaaggcaagctatcaagttgctgggagatatgctgctagatagatcaaatgttgcagtcatgatgcgctatgttagttccaaagacaaatcttatgatcctgatgaacctcctaagggattcaagtaaaaatatttcaaattgaggcgtttcacgtgttcaagctgtttgctgcaaataaaaacaaaccggcagaggttgtaaacatactggtcaccaatagaagcaagcttcttcgctttttcgctggattcaagattgacaaaggtactatacctgctctaactttcgttcgtgtacttgcttgctaatgtactcacaagaccttggatgcagttcagtcatatttcagcgcatgagctgttcctaatgtcattgaatttagtcactgtagtcgtttactcgatggatctaataatctgccagtataacagtttggcattgactaacactgttattatattaatatgttataaaccagaggatgagcagtttgaagcagacaaggagcaggtcattaaagaaatatcggcactttgagtatgtctcaggatgtaattagtccttgtgattggtttttctttggttaaagaaagttgcatgt

SEQ ID NO: 34621 - DNA, 648 bp, Setaria italica
  Peptide Sequence Number=SeqID_100595
taatagcctattctgatctacttgatatgtcttaattagtatcatgtttttttttttgttatgaaaattttacttttttaaatcttaaccctcttgcattttccattccatagttcttttgaagaaattccaactctaggttgctatcatcaaccaactacataacgaaaaggcaagctatcaagttgctgggagataatcggcagaggttgtaaacatactggtcaccaatagaagcaagcttcttcgctttttcgctggattcaagattgacaaagaggatgagcagtttgaagcagacaaggagcaggtcattaaagaaatatcggcactttgagtatgtctcaggatgtaattagtccttgtgatggtttttcttttgttaagaaagtgcatgtgtaataatacatttctgtgtggtattctgtcggacttagcggaacaatatgaccaaattggagttggatttctgccatgaaaatgtgataatttctatagagcgtgtggttcttcttgccctttttttatgggtgtatttcgatgacatacaaaatatgataatattaaagagttcagaagaacaaaaatatcaaatgaaggcatcatatcttatctggaccaaaaacaaaaaaaaaaacaaaaaaaaaa

SEQ ID NO: 34622 - DNA, 1350 bp, Setaria italica
  misc_feature (1338)..(1350): n is a, c, g, or t
  Peptide Sequence Number=SeqID_100596
ggtcgggcgggcggaggcggcccaaggcctcgcccttgccctccccgccgcgcctgaccgcctcggcggccgcggccgccgcggcagcggacgacggggccaagatgaagggcctcttcaagtccaagccacggacgcccgttgacgtcgtgcggcagacgcgcgagaacctcgtccacctcgacctcaactccggctcccggggaggcgacgccaagcgcgaggagaagatggcagagctaagcaaaaatatcagggaattgaagtctattctatacggcaatggtgaatcagagcctgtaaccgaagcgtgtgtccaactgacccaagagttcttcagggagaacactttgcggctattaattatacatcttccaaaactaaatctggagactaggaaagatgctactcaagttgttgcaaacttgcaaagacagcaagtatcctcaaagatagttgcgtctgagtacctagagtcaaataaggatctcttggacatcttaatttcagggtatgagaatatggacattgctttacattatggtgctatgttgagggaatgtattcgccaccaaagcattgcaaggtatgttttagaatctgaacacatgaagaagttcttcgactatatacagcttccaaattttgacatagcttctgatgcttctgcaacctttaaggaactattgacaaggcataaagcaaccgtggctgaatttctcaccaacaattatgattggttctttgaagaattcaactctaggttgctatcatcaaccaactacataacgaaaaggcaagctatcaagttgctgggagatatgctgctagatagatcaaatgttgcagtcatgatgcgctatgttagttccaaagacaatcttatgatcctgatgaacctcctaagggattcaagtaaaaatattcaaattgaggcgtttcacgtgttcaagctgtttgctgcaaataaaaacaaaccggcagaggttgtaaacatactggtcaccaatagaagcaagcttcttcgctttttcgctggattcaagattgacaaagaggatgagcagtttgaagcagacaaggagcaggtcattaaagaaatatcggcactttgagtatgtctcaggatgtaattagtccttgtgatggtttttcttttgttaagaaagtgcatgtgtaataatacatttctgtgtggtattctgtcggacttagcggaacaatatgaccaaattggagttggatttctgccatgaaaatgtgataatttctaaattaaaaaaaaaaaaaacctaaaaaaagaagtaaaacgaaacgtgaactacgaaccgaaggacnnnnnnnnnnnnn

SEQ ID NO: 34623 - DNA, 237 bp, Setaria italica
  Peptide Sequence Number=SeqID_100597
gttctgctatttggaaatgcacaccaagagtcctcatacaccgtgagagcactggcaggtgcaaagcccttcatccaggatggaattttgctctgcaaatgataaacttttgaagtgagttggcccttgccaagcttttcatcctcaaatgggacctgctgcagtacctctacaccctccttgctgtttgtgttttgctgctccatcttcatgatggtgtagctgaggcctatttca

SEQ ID NO: 34624 - DNA, 273 bp, Setaria italica
  Peptide Sequence Number=SeqID_100598
tgggccttactacattctcctcttcaggtggtaatttggcctcctcttcttcattacctgaggcgtaatgcagagcagagtacttaccggaatgcatggagctcatgtcatcgtcgtcgcttaaagaagtgtagcatccgtaatctttggaccagccaccgccatgtgtgccggagaagcctcccgaggcgtaaggccccaccccgcagagagagccttgggaggaggtgggggaagaggaggggtagtagaagggaggagggcgctcctcgt

SEQ ID NO: 34625 - DNA, 357 bp, Setaria italica
  Peptide Sequence Number=SeqID_100599
gactgctgctgggccgtatctgctctccctgggcttctgctgctcctctctcctgggctgaatcttgatgcctttgctgtgcaggagctgggccctactacattctcctcttcaggtggtaatttggcctcctcttcttcattacctgaggcgtaatgcagagcagagtacttaccggaatgcatggagctcatgtcatcgtcgtcgcttaaagaagtgtagcatccgtaatctacaccaacaaaattttgtccaaaatgcaaacgtgtcaaggctcaatggtgtgctctccccgtgaagatatgatgtacactagcaccgcataccaaattttggcatgcagcaagcaacaacgaa

SEQ ID NO: 34626 - DNA, 932 bp, Setaria italica
  Peptide Sequence Number=SeqID_100600
cgtacaaaagtagttgggccgagatatatgcatgacataagcatttcatgtgtatgtgtatgtttggaagaattatggtccgaaatcaatcaaaagtttatttaaaaaatcaatcaaaattaaagtaagcacgatgttttaaaactgaaaagagaaatgctgaaacatttaaaagaacaatctttttaatacgtcgcttaagtgtagcatccgtaatctttggaccagccaccgccatgtgtgccggagaagcctcccgaggcgtaaggccccaccccgcagagagagccttgggaggaggtgggggaagaggaggggtagtagaagggaggagggcgctcctcgtttccgtcatcgtcgtcaccatttgccgcgtacacactgtactcgtgctgctgctctcgcccgggcagcagcctctcgatctcctgctcgatcatggccgcgatctccgacgggtcgcggtccgtgatttctagctccttcaccatctcctccgccacctccatcgcggtgtcgctcgccatgtcgaacgggaagtagatgttccgcacattatttcctgtctggtcggcgatctgtactttgaggaagatggtgtcctcctcggcgttgagcttgccggtgatggtcatgtccgtcctgatgggggtaggaggttctgcatcctcctcaacatcggaggtgctgcaggtcgaagaacaagaagcagcaacatgcaatgacgacggtggcatcacggcacaagcagacttggaatgatgatgatcatcgagcaggaaagggtccgtcaagagctccgcagccgatggcctcttggacgcaatgacaaggcacctgccgatgaacctgcgcgcgtcgtcgtcctggacgcggtagaaggcgtcgggcagcttgccggcggtgaccttcttgtagatctgcgcggggtt

SEQ ID NO: 34627 - DNA, 454 bp, Setaria italica
  Peptide Sequence Number=SeqID_100601
agcagccaatgagctaaagcatgtaggcaaggaggaataagctatgacattacttcaaatgttcaccgaaataaccatagagctattggctgcatgcaagcaatgattactcaaattatttgatgctctatcatacttttccttattgaaaaggatagcgcagtaataaccataaaagtacagcagaccaaataaattggaatctggtacatactttaggctctagtaaagtcattgggtcttttgtcaacagcagctggcctagatttatattgcagagtacaatgaattgcgttgcatgggtcacaaaaacctgtaactacgataatttctctactgagaaattttgtttcgaagtattttggcaacaacctcaggggcaagcagtgaaatcaagtaggttcactcgtacaggaccatgtggttcaaagaggactaaattacagaagtttgg

SEQ ID NO: 34628 - DNA, 487 bp, Setaria italica
  Peptide Sequence Number=SeqID_100602
ctcccagcccgagcccgacgccgacgccaacatcccggcggttcggcgcagacgcgagactactacatggacacgtcaagccggcggcgccggagccttgaccggtccagctccgtgcgtcaggtccttcgaggtcaccgacccaaagccagttcctgtgcccgtgcccgtaccagtgccagtggccgcgccggccgccactgccaacggcaaggagtcccctctcatgggcagctcggagttctaccacttccagcacgcggaagacctgctcgaccaccaccgcttcagcaccagctccctcgtcgaggacttctccgccagcctggacggcgcgttccacggccccgcgaagaagccgcggcggtggagcaaagcgtggagcctctggggcctgatccaccgccgggccgccgggcgccgctccgccgcctcggacgcggcggaccgcgcgttctcggagccctggccggaactgcgcgtccgg

SEQ ID NO: 34629 - DNA, 184 bp, Setaria italica
  Peptide Sequence Number=SeqID_100603
ttatcagaatggaagcctgacagctatttcaggtaagcaccttataggtctaatgcgttttttcagctttggcaccctgttctccaatctagctgtgtatctatagccatgctggtgtgattcttatccctctctctctttctctgtgatgcaggaaacaatttaaatctatttgcattccctt

SEQ ID NO: 34630 - DNA, 238 bp, Setaria italica
  Peptide Sequence Number=SeqID_100604
cggagcgggaccggagcgaggaccggaagctgccgtcgaaccccggcgaggtggaggccctgcggcgcggggcgtcggcggcggcgcggaacccgctggtggccttctccttcgccgagctccggaaggttgccagcgacttccacaaagacgcgctcatcggcggcggtggcttcggccgcgtgtacaagggctccttcgcgcccgccggagacgccccgaccctcgcggtcgccgt

SEQ ID NO: 34631 - DNA, 335 bp, Setaria italica
  Peptide Sequence Number=SeqID_100605
gcagcagcgggggcggagtggccaccggagcggcccgcgtgcggcgagggtcgtctcgagaagccgccttacagttcataagagccttttgggaaggtcctcaccatggatctatcacattccctaacttcatctagtgacaatgagaccagggcacttaatacattgcttgatgtgtttggttgtgccttttcacttgatgatattgctgatgcatatatcaaagcaaagggcgatgtcaaacaaagctggagatttcttaactgacctgcaactttcgttgcctcatatcaatgctgtcgagccaagcgttgagactaaccttccccaggctg

SEQ ID NO: 34632 - DNA, 674 bp, Setaria italica
  Peptide Sequence Number=SeqID_100606
gtgcgacgcggccaacgccacggtcgtggagctccacctcccgggcgtcggcctcatcggcggcgtgccgcagggcacgctcggcgggctgcggggcctccaggtcctctcgctgcgcgacaaccgcctcctcggggacatcccgcgcgacctcttcgtcctcccgcggctccgctcgctgtacctgcagggcaacctgctcaccggcgtcatacccgatgaggtcggccggctcgccgcctcgctcgagcacctagcgctgtcccggaacaacctcaccggcgacgtcccgtccgcgctcaacaacctgacgaggctccggtcgctgaggctcgacgggaaccgcctctccggcagcctcccgagcctcagcagcgtccgccggctcgaggtgttcaacgtcgccgacaacgacctcaacggctccatccccagctccctcgcgcggtttcccccggagtccttcgccggcaacgtccacctctgcggcccgcccctcgtggaccagccatgccaggccgtcccgtcaccggcgccctctcccccgggtgtccttgtgccctcgtcgaagaagaaaagaaagctgtccggcgcggcggtcgtggccatcgcggtgggcgccggggccgcggcgctgctcgccctggtgcttctcgcgctgtgcgcggtccacc

SEQ ID NO: 34633 - DNA, 359 bp, Setaria italica
  Peptide Sequence Number=SeqID_100607
cctcgccgtctctgtgcttgctgagcaaagaaaaggagcttatcatctactaaaccaccttcagcatcaaatatgaacaacaagaccagcagatacctgaggagttcattttcttcctcgtcatcctcttggtcatcctcttcctcctcatcttggtcttctgaagtttgatcttgtgggttatcagatagtattgagcgaggtagaatgactagctctacagctttcttgaggtcatccacaaatactttttcacgtccttccatagcagcaaggcattttgccactcgagcagcatacaacggcagccatggcttccatcaccctcctctccctcgctcccaccgccaccttcctcc

SEQ ID NO: 34634 - DNA, 663 bp, Setaria italica
  misc_feature (1)..(83): n is a, c, g, or t
  Peptide Sequence Number=SeqID_100608
nnnnnnnnnnnnnnnnnnnnnnnnnnnnnnnnnnnnnnnnnnnnnnnnnnnnnnnnnnnnnnnnnnnnnnnnnnnnnnnnnnntttttttttaataaattaagtaccaacaattttaagttacgttccttctaattggtatacaaatatccgatgtgacccgaactaaaaattagtccatggatccaaacaccccttactcgagctttgtgacggattacccaacacaaaagcgacagatttacatttgccaaacattagggagaagggcattcaatcgttacacaatgccatgctcagaatctttttcctgcattacatggtagagacctacaccaaaattggtcacaagacgagagccgaaacgcccaccccaagccttgaccttgaacatagcaacacagtttctgcacaaacgaaggctcgctactcatcagatggtacagaataggggtgcccatgtccgaaatcatgaacccttcaagtctgtcagggcggtcttggtggcagcagaaatcacagcatctgaagcattgggcaggtaatagtattttccttgggcaacccttgcaatttccttggcaaatcctgtagatacaaacttgttctcagtgtcaatgacaagaagcgacattcctgccttgtatattttgccagccacctc

SEQ ID NO: 34635 - DNA, 2523 bp, Setaria italica
  Peptide Sequence Number=SeqID_100609
gacagatttacatttgccaacattaggagaaggcattcaatcgttaggtctctaccatgtaatgcaggaaaaccttctgagcatggtagagacctacaccaaaattggtcacaagacgagagccgaaacgcccaccccaagccttgaccttgaacatagcaacacagtttctgcacaaacgaaggctcgctactcatcagatggtacagaataggggtgcccatgtccgaaatcatgaacccttcaagtctgtcagggcggtcttggtggcagcagaaatcacagcatctgaagcattgggcaggtaatagtattttccttgggcaacccttgcaatttccttggcaaatcctgtagatacaaacttgttctcagtgtcaatgacaagaagcgacattcctgccttgtatattttgccagccacctcaagtatctcatcctttaattcttgagtagaaggtcttggtgcatctgaagcagcagcagcttctggatcagtggacctcttcagtgatacattagctcttccatcggtgattgcaacaatcataattcgtccgacatccccactcttctcagcattcaaacccactctgacagctgtactgagaccatgagctaagggagaaccaccaccacatggtagcttctcaagacgtttccgggccattgctatagatcttgatggtggtagcaaaacctcagcataatctccacgaaaaggaataattgaaacctgatctcggctggtgtagctttccgcaagcaacttcaatgccgcaccttttgcattttgcatacgattcagagccatgctaccactagcatccacaacaaatatgaccagagcacctgcttttcgagccattcttttggctctcatgtcagtcttttcaacaaaaacctttcttgtcttgtcgttatctttcgctttgcgcagtttttggtatggtgcggctgctctaagcgtggcatcaacagctaacctccttactggaccctttggaagcataggttttatgtatcgacccctatcttctgagaatatgacattctttgctcgcccagcttttcctcgccgtctctgtgcttgctgagcaaagaaaaggagcttatcatctactaaaccaccttcagcatcaaatatgaactcctcaggtatctgctggtcttgttgttcattttcttcctcgtcatcctcttggtcatcctcttcctcctcatcttggtcttctgaagaatcttgattttctggaggtggtgggggtgggggtgggggtggttgctcttgctgttgatcttgtgggttatcagatagtattgagcgaggtagaatgactagctctacagctttcttgaggtcatccacaaatactttttcacgtccttccatagcagcaaggcattttgccactcgagcagcatacaactcagcacggtgcccctgacagccacctcgtatagcttccatgacaagatatttgagctgctctgtgctaatattaacatccttcagatactctcttgccaaaattatctgagtttttgcaacttcagtttcttcttccaccattttgaaaacctctttgctagactcctgaaactgtgttgcaatttccacggctgcaacgcggtcatcaaaactcattggaagatcagcacttaaattaattgcaatacgatcaagtaagtgttcacgtacagatccttcctccgggttgtaagtagcaattaaaagtggtttgcagggatgacgaaagctaatgccctctctttccacaatgttaactccctccgtcaagacattcagaagtagattgcttatgccatcatccaacagatttatctcatcaacataaagaacacctctatgagcttcagcaagaagaccaggttgaaacacagtagtccctgatctcacagatgcttcaacatcaactgatccaatgagcctatcctcagtcacaccaagtgggatctgcacaaaaggtgttttaacaatctcagttttgacattaccatcagcatcatattgaagacgatcagctaaaccatcctcccattcatctggggagttagggtccgcatttgctatggagccaacaaccacttcgatgggtggaagcatagcatgcaagccacgagccatcaccgtctttgctgtcccacgcttccctgagatggcaatgcctccgatctcacggtcaatcgccccaagcagcagagcggttttgatagcatcctgccctacgacggcagccaaggggaagtactccctcccgtacccgcgggccgcgccgctcttcgaagcagtggggatggcgccattggtggagtcgaggacctcggaggccgtcggagccacggccgcgaggcgggactcccgcagccgggcggcacgggagtggagggggacggcggcggaggatgaggggaatgacgtgacgcggcggggcgggaggtgcgggagtgaggtggagagcgcggtggccgtcgccatggagggcggtctcgtgcgtagac

SEQ ID NO: 34636 - DNA, 160 bp, Setaria italica
  Peptide Sequence Number=SeqID_100610
tgttacgtgtgccgcacaagctgatggcacgaaaaatgctcaggtctaagcaaaatcaaactgtgccacagaaaaagaactggttctttttatgcatgccgaatacatttgattttgtgataaaactggccgccaaatgcaagttacaacaaggatcgat

SEQ ID NO: 34637 - DNA, 488 bp, Setaria italica
  Peptide Sequence Number=SeqID_100611
ggtcttacttcttgtcttgttttgtaaacagtagaaataacacctgcgtaaaagtgattccattccatcccagccatccttacaaacatttccgtggtgaatataagtcacggtagtataacaccgcgacctataacttcttgtggggactgtgaagcctatccccctgcatagcagctgttgatctttctgaatgaatgcaggattgtccatccagcaccgggtgtcccagaggccctaatacaagaaatgttccggcacaacccagagatgtctagggagggcctcggcctgtacataagccagaagctagtgaagacgatgagcggcacagtacagtacctccgggaagccgacagctcatcgttcattgtcctggtagagttcccggtcgcccagctcagcagcaagcggtccaagccttcaacaagtagattctgacgctcttgcacccagaactgtaaacagcattccctccactgagagct

SEQ ID NO: 34638 - DNA, 2864 bp, Setaria italica
  Peptide Sequence Number=SeqID_100612
tcttccaggctgcagtcgctgcccagcgggaacctctcgctgctctgcgatgtccttgtccgtgaggtgagcgagctcacgggctacgacagggtcatggcgtacaagttccatgaggatgagcacggcgaggttatcgccgagtgcaggagatctgatctggagccgtatcttggcctgcactacccagccactgacatcccacaggcgtccaggtttctctttatgaagaacaaagtgcggatgatatgcgattactctgctgttccagtgaagatcattcaggatgatagcctagcacagcctctcagcctatgtggttccacgctccgggctccccatggttgccatgcgcaatacatggcaaacatgggctctgttgcgtcgcttgtgatgtcagtaactataaacgaagatgaggaggatgaggatactgggagtgaccagcagcccaaaggcaggaagctgtgggggctggtggtctgccatcacacgagcccgaggttcgttcctttcccgctgtcttttgcttgcgagtttctcttgcaagtgttcggcatacagctcaacaaggaggtagaactggctgctcaggcaaaggagaggcacatcctccgaacgcaaacccttctgtgtgacatgctcttgcgggatgcccctgttgggatatttacccagtcgcctaatgtgatggatctagtaaagtgtgatggagctgcactgtactaccaaaaccagctttgggcgctcggatcggttccctccgaggcagagataaagagcattgtcgcatggctgcaggagaaccatgatggttcaactgggctgagtactgacagcttagtggaagcgggttatcctggtgctgctgcacttcgtgaggttgtgtgtggcatggcagccataaagatctcttccaaagatttcatcttctggttccgagcccacacagcaaaggagatcaagtggggtggagctaagcatgaagcagtggatgcagatgagaacggcaggaagatgcatccacgatcttcgttcaaggccttcttggaggtggttaaatggagaagtgttccctgggaggatgttgaaatggacgctatccattctttgcagttaatattacgtggctccctgcaagatgaagatgccaacagaaacaatgtaaggaccattgtaaaagctccatctgaggatacgaagaagatacaggggctacttgaactaaggacagttactgatgagatggtccgcttaattgagacagcaactgcccctatcttggctgttgatattgccggtaacataaatggatggaacaataaagccgcagaactaactggattacctgttatggaagccatagggaggcctctggtagatcttgtcatgtctgattctgttgaagtggttaaacagattttggactcagctttacaaggaattgaggagcaaaatctggaaatcaggcttaaaacattcaatcaacaggaatgcaatggccctgtaattttgatggtcaactcctgctgcagtcgggacctttcagagaaagttgttggagtttgctttgtagcacaagatttgactgggcagaagatgattatggataaatatactaggatacaaggagactatgttgccatagtgaagaaccccagcgagctcatccctcccatatttatgatcaatgatcttggttcctgcttagagtggaatgaagctatgcagaagattaccggtatgaagagggaagatgccattgacaagttgttaattggggaggttttcacccttcatgattatggctgtagggtgaaagatcatgctactctaacgaaacttagcatactgatgaacacagtgatttcgggtcaggatcccgggaaactcccttttggtttcttcaacacagatggcaagtatgtggaatcccttctcacagcaaataagaggacaaatgctgagggcaagatcaccggtgctctttgcttcctgcatgtggccagcccagagcttcagcatgctctccaggtgcagaaaatgtctgagcaagcggctacaaacagctttaaggaattgacctacattcgccaagaattaaggaacccactcaatggcatgcaatttacacatagtttattggaaccttccgagttgacagaggaacagaggcggcttgttgcatctaatgttctctgtcaggatcagctgaaaaagattttgcatgacactgatcttgaaagcattgaacagtgctatatggagatgaacacagtagaattcaaacttgaggaagctctgaatacagtcctcatgcaaggcatgtctctgggcaaggaaaaacggatttctattgaacgtgattggcctgtggaagtatcatgcatgcacctctatggagacaatttaaggcttcagcaggttctagcagactacctggcatgcactcttcaattcacccaaccagccgaaggacctattgtactccaagtcattcccaagaaggaaaatattgggtctggcatgcagattgctcatttagagttcaggattgtccatccagcaccgggtgtcccagaggccctaatacaagaaatgttccggcacaacccagagatgtctagggagggcctcggcctgtacataagccagaagctagtgaagacgatgagcggcacagtacagtacctccgggaagccgacagctcatcgttcattgtcctggtagagttcccggtcgcccagctcagcagcaagcggtccaagccttcaacaagtagattctgacgctcttgcacccagaactgtaaacagcattccctccactgagagctcggctgtgttaaatagtcaaatgtagc

SEQ ID NO: 34639 - DNA, 698 bp, Setaria italica
  Peptide Sequence Number=SeqID_100613
cgcgcagctgcacgccgagttcgagggctcccagcgccacttcgactactcctcgtcggtgggcgccgccaaccgccctttggccagcaccagcaccgtctccgcctacctccagaccatgcagcggggccgctacatccagcccttcggctgcctgctcgccgtccacccggacaccttcgcgctgctcgcctacagcgagaacgcgcccgagatgctcgacctcacgccgcacgccgtccgtaccatcgaccagcgggacgcgctcgccgtcggcgccgacgtgcgcacgctcttccgctcccaaagctccgtcgcgctgcacaaggccgccaccttcggggaggtcaacctgctcaaccccatcctcgtgcacgccaggacgttggggaagcccttctacgccattatgcaccgcatcgacgtcggcctcgtcatcgatctcgagccggtcaaccccgccgacgtcccggtcaccgctgcgggcgcgctcaagtcgtacaagctcgccgccaaggctatctccaggctgcagtcgctgcccagcgggaacctctcgctgctctgcgatgtccttgtccgtgaggtgagcgagctcacgggctacgacagggtcatggcgtacaagttccatgaggatgagcacggcgaggttatcctattgtaggtattgtagtctacggtcgtaggtttattct

SEQ ID NO: 34640 - DNA, 392 bp, Setaria italica
  Peptide Sequence Number=SeqID_100614
agacagcgctgctttcctgttgatcgagatcgtggtgcacgctcatggagggcacaatctccaatccgccaaacactaggattgccgtggtcaccggcggaaacaaagggatcgggctagaggtgtgccggcagctggccgctagcggcgtcaccgtcgttttgacagccagggacgagacgaggggcgcagccgccgtcgagaagctcagggagcaggggctctccgatgtcatttttcaccagctggaggtcaccgatgcttcgagcatcgctcggttggctgacttcttgaaggccagttttgggaagctagacatcctggtgaataacgccgccgttggtggtgctgagtacgtccaaggtcttgtttatccttcaaccggcgaggat

SEQ ID NO: 34641 - DNA, 367 bp, Setaria italica
  Peptide Sequence Number=SeqID_100615
ttcatcatggcaggcagacacataaaatgggagatatttttttgtctgatgagcaagttctatgcataggctctagtaaaaaaagacctgttctaaaatgggaagaaaacactgcatggcctggaaaccttaccttgacagacaaggcactatattttgaggccattggactgtcaggtaccaagaaaccaatgaggcttgaccttacagatcggaattcaagggttgaaaaggcgaaggttggaccatttggatccaaactgtttgattctgctgtctcagtttcttctggttcaacgtcagatgaatggacactagaatttgttgtattttagtggtgagatgagacgagaagtatggcttgcct

SEQ ID NO: 34642 - DNA, 621 bp, Setaria italica
  Peptide Sequence Number=SeqID_100616
tttaatcttgcaagataaggtctgtgatggagatttatacatctcctccacctgacatgattgtaatgtgagttcatctctaatctatattcatgttgagcttttgtactgaatactggagttctcctcgtttataacagtgttacaatgtgcaattgaatagggttcatcatggcaggcagacacataaaatgggagatatttttttgtctgatgagcaagttctatgcataggctctagtaaaaaagacctgttctaaaatgggaagaaaacactgcatggcctggaaaccttaccttgacagacaaggcactatattttgaggtaccaagaaaccaatgaggcttgaccttacagatcggaattcaagggttgaaaaggcgaaggttggaccatttggatccaaactgtttgattctgctgtctcagtttcttctggttcaacgtcagatgaatggacactagaatttgttgattttagtggtgagatgagacgagaagtatggcttgccttcatcagtgaaatgatttcagtttatagattcattcgtgaatatggtccgggtgataatgatccagcaattcatcatgtatatggtgcccaacgaaggcaagaaaag

SEQ ID NO: 34643 - DNA, 1736 bp, Setaria italica
  Peptide Sequence Number=SeqID_100617
caatgatcttaagcagttacatttacttgtacagagtgttgtaataatatcatgtgcttagtatgatcacaattccgaagctaactagtgtactgcttcaacgtcagatgaatggacactagaatttgttgattttagtggtgagatgagacgagaagtatggcttgccttcatcagtgaaatgatttcagtttatagattcattcgtgaatatggtccgggtgataatgatccagcaattcatcatgtatatggtgcccacaaaggcaagaaaagagctgttagcagtgcagcaaacagtattgcaaggcttcagtctctgcagttcatacggagattgcatgaggatccagctaagctagtgcagttctcttatttgtccaatgcaccatttggtgatgttgttcttcagacactagcagtgaaattttggggtgggcctttaatcacaaaggtcaaatctgcaaatcacaggtcacctcaatggcatagatcttcagaggacccatctagtggtcatgcacatgtttatgacatagatggtagtgtgtacttacgcaagtggatgacatctcccagctgggcatccagccactcagccaacttttggagaaattcttctgtcaagcatggtgtagtattgagtaaatctttagttgtagctgataaaaaccttgtagaaaaggcaatgattaactgtaaagagaagaggaaagtagttgaaaggacacaggcaacaatagttgctgctacaattgaaggtattccaagcaacattgacctcttcaaggaacttatgcttccttttgtaataatggctgaaaaattcaagaaactgcaacgctgggagaacccacgttcgaccatttgttttctactattagttcatactgttgttttcaggaacatgctttcttatgtatttccattcaccctgatgatgatggccctttccatgcttgccgtgaaagggctgaaagaacaaggcaggctaggtagatctttcggcaaagtgacaattagggatcaaccgccgtcaaacacaattcagaagatcctagcccttaaagaagcaatggcctccgtggaaaattatctacagaacctgaatgtctctcttctgaaaatccgcacaatctttttagctggccaacctgaggtgacgacacaggttgcgcttgttcttctagcatcctcagccgttcttcttgtttttccgttcaaatatgttcttgcattctttacgtttgatctcttcacaagggagctagaattccggagggaaatggttagagccttcatgaactttttgaaggaacggtgggaatcgatacatgctgcccctgtggtcgtgttgccatatgagggcgccgaaagcagccccaagccactcccatcgaaagcttcggggcaatcagaacctcagaatgtgcaacgtgttggcagctacgtcacttcaaagaacggcatcagcaattcatgatccgttcagctttaaggattgtgttgtaagtttgttttgtacagttataacgtgtacagaatatttgagaggtcagattaggcatagcccataccaaaaggtggattctgcaggagctcttggagcagtatttcactacgtcgtaatgagtaactagacaacagatggtagctggtaggattaagaaattttgttctattgtcggtctccttttaccggtcgatggcctgatattctgtaatgtcaagttgac

SEQ ID NO: 34644 - DNA, 250 bp, Setaria italica
  Peptide Sequence Number=SeqID_100618
tgcatccacagtgtatccttcagttagttttgatgctgttcagaaatcagtaacccttttcatgccaggctttgataagtctgaaatcaagctatatcaatatagaggcggatcagaactgttgatcgaagccggagaccagaggcgggtcataaaattaccaccggcgatgcagggtaaggccggaggcgccaagttcgtggacaggaacctcatcgtcagcatccggtagcggactcaccagaaccgg

SEQ ID NO: 34645 - DNA, 384 bp, Setaria italica
  Peptide Sequence Number=SeqID_100619
gctattccctggtatgttggagccattctgctctgctgttccacagtggaccacagggagaaaccagcctatgtcgcatgcacaatagccgcagccctcgctacaattgctgtgatcattggggcgactgctggagctcacgtttattgattctttttttttacactgtgttgtcattgtacataatgcaaagtattatgtatgcgcaaaaaatttgtatgatgtcatctccaattcttcattattgtaatggctcattgttttgcatttcgattcttaatgtttaaaaaggagggggggatccttgttcgtggtcataaataaatcagactgagatgacttcgccttgtgaacgtggaacaatttgagtctggaaagagattg

SEQ ID NO: 34646 - DNA, 669 bp, Setaria italica
  Peptide Sequence Number=SeqID_100620
ctttttagtttttttttttttttttactaactcaaaaattgcttgaaataaaagtggttgaaaaatacagaaaatttacacagaagatttaccagacgtaccactatgtacccaccgtgtataactatcaaactgccccttaaagattaaacatatattgcaatttttggactagtgcaatttgctaccatgtaaactaatttcatatgcatcccttccctctcttagaccattaaggaacatctaaaacttgaaatgcccaaaataaaattttacacataaaaggtttacacgcagacaaaccactatgtactcaccatgtatacatacaaactgtccattaaagattaaacacatattgcaatttttgaactagtgcagtttgctagcatgtctaaggtgcatctctccctccttccccccctctctcattccccacaaaccatctggtatcttggcaatacacagttatgcaatgaggtgattgattcgatgaatttgatttagcatcctgtcgagtgatgcttgagggagcctctgctcgagggagggagacgcggaggtgacagagtgacagaagaacgcggtgaccgaccccatctgccatggaaggcttgccgatcccttggactgcctggacacgtcaacggcaccaaagggacggagctg

SEQ ID NO: 34647 - DNA, 249 bp, Setaria italica
  Peptide Sequence Number=SeqID_100621
aagggcacggggaagtaggacggggtcgtggccgcggccgccgccgcggcatggtaggtgaactgcgcggacgcggaggccggcgaaatggactgcgtcgacatcacgatcgccggggggcggcggtcgagaggggcggagtcgcgccgggagaggccggatcgccggagcgctgggctggaaagcctggaaggtggcgtgaggtcgagggattcgccgattcggctgcctcctgcctgtgcgtcttct

SEQ ID NO: 34648 - DNA, 397 bp, Setaria italica
  Peptide Sequence Number=SeqID_100622
ttgctgaatgcactcgcttatcacactcattttggattttgttgatggcaatctttgtaatacctacacttagactaagcgctccaaaaattactactgtttggaaatatttgtttaccgttcttctaaagaaaatgctttcaagcaaaagcactggcattggttcaaattgatattatctctatactagaagttgctgaaaccataggatgctaattctatgctttaattagtactggtctatctaaacttgccaaacaccattttgataggtgatgtcctctttgagttctattgaggcatactttgagttcttctcagccaaatctgctcaagaaaatgaggaacttgaagaagctgagattgaattggagcttattcaaaaagagaaatcagt

SEQ ID NO: 34649 - DNA, 4028 bp, Setaria italica
  Peptide Sequence Number=SeqID_100623
gagcttgttgttcttgttgcactcagcaaccgaattattttgtccaccagagaatgtaattgatataattttgaaatctgctgaaaatctcaatgaacagcttgcatgtctttacagttgtgttaatgcagggaaaaagaatctggatagggtaaaagtacatggtctaagaagacgttggacccttctccagaagctggttctggcttcatctggcagtgataatacgagagaaattgccagaactaaaagagatggtttccgttttagaagcttagtccctccatcaacatggatacagaagatatccgatttctccaggttttctagcccactccctcgctttcttggatggatggcagtgtctcgttatgccaaggaatatctaaatgagaggctgtttcttgcttctgatttctcacagcttacatctttgctgtcaatttacatggatgaactttgtttgatggatggagtttcaactcagaaggtcaggcctgcaaaaggtgaacaatctaattgtaagcatttgctccttaagaaggaaactactctgtcagatcaacgaagcatggccaaacagtttaaaattttactgccagaactacatttcttctttccaagcatgagtagactgtttaatgcatttggagagagcatcttggaagctgttgggctacagttaaaatgtcttcccaacaatgcagtaccagatgttctttgttggttttctgagttgtgcttgtggccttatctcgaacgcattaaggagcatcttgtagctgcaaaccgaattagttacttgagaggaaatattgctgctaatgtgaaggcagttgttttctatctacttgagagtattattactgagcacatggaggctattattcctgaaatgcccaggatagtgcacattctcgtgtcactctgtagagcttcttatactgatgtggccttccttaagtccgtgctatgtctaatgaagccactcatctcctacttcttaaggaagggaactgataatacaaaagtattgggtcatgtaatggagggcagtaattttgagctgctttgttttgaagaattgtttgaaattgttcgctgtggtaaagatttagaggatacatctgtagataagattcaggtacccttgcttatcttcattctgggatcaatgtttcctgatttctcatttgagaggaggattgaaatgttaagctccttgttagtatgggtggattgtatcagttccgatccaccatcattgttatgcagttatcttcaaggcttccagaaacttcttgatggttgtgaaactgtgctagttcaaaatatcgaactacttggtgtcagcatcctttctgcgacaagccaatctgtagaatctactgattccttgggtgttgacggcatcatgcaactagagaagaacacacaagatagtgaagagcaaatactagtgaaatccacagcatattatgagaatgatggaagtcgtaagggtgtttattctctacatccaagtagtatcatagaattttgtggtgcgatggagaagtttatttcacaccttactccatctattgagggtagttggaaatggcaccatcagttggcctctgggctctctttgtcgattgcaaagtgtttattgtttgcaaattttttgaagtccattgcacaggaagagacagtgtctagtagcagtgagcaagatgttgctgtgaaaatttccagtgagcttgcacaaaagcattggcaaagtgctcttgaaggtcttggaaaaattattttagcaaatcagaaaacacagtgctggcaggtggcatcaaatatgcttgattatataatgagcatgccaaacgtccttgcttggggtaatgttcttagtgctacatgctctgcagtcaagggcttctgctctcatgcacctaggatatcttggaggctgcagacagataagtggttatcattattggtttctggtggaattgagagcttcaataacagcgagacatgtttgattgatcttttctgtacaatgttgagtcattctgaaccagagcagcgctctattgcattacagcagcttgggaggattattaactcaacaagttccactgaagctgatttgaaatctcctacttatgaccaaaatttcctcacatctgtctcaacagttacgtcccttctggttactcatacatgggacagagtagcagcattggctctccatgactcttctatgctattaaggaatcatgcaatggcattgcttactgaatatgtgccttatgttgataggaagcatctgcagtcctttctcgcatccagtaacagtatcctgaatggtttgggacaactttctggtgtagttgaagagggctattttacacgaatgtctttgctgttgctttctagggcatgtctttattccactcctgaagatatcgctctgatacctgaatgtgtttggcagaagttggaaaacatgcaaacatcatctggaggttttggttatatggagaaagatctctgccgagctctgtgccaactaagaagtgaatcagatgctaaaaccgttgtgaaagaagttctctccggatctacctgtcaggcagtcagccctgattttaagagcatccgtgattcgattcttcaggtgatgtcctctttgagttctattgaggcatactttgagttcttctcagccaaatctgctcaagaaaatgaggaacttgaagaagctgagattgaattggagcttattcaaaaagagaaatcagttcataactttgttgtgcatcgcggtgatactgtggttcctgatatgccatcataccacaagggtggtaatgatgttaataaacggctccagcaagtacgggaaaatatacgatccctggaaaagtccaggcttaaagaggaaattacagtacgcaggcaaaagaagctgcttataagacatgctcgtgaaaagtacttagaagagacaagctctagggaaatggagcttatgcaagagctcgatagggagagaggcctcgagatggaacgtgaagtagaaagacagcgacaattggatattgagcgtgcgaagtctagggaactgcagttcaaccttgacttggaaaaagaaaaacaaactcagagagagcttcaacgtgaactggagcaagtcgagttggggcgttcatcatcaaggcgggagttttcagccaatccaaacagccggtccagggagcggtaccgcgaaagggatggcggcagagcacagcaggaggcagggagcctgaggtcaagcagccgaggccacgagggaggctccgctcaggcgactgcgccggccggaggcccccctgtcgtgctcgccggaacgagatccttctccggaggcacccttccgacgatactgcagcctcgcgaccgtgctgctgccgctgatgatgacaacgcttggaccgagggaagcagggacttcggtgacgccagcagcatcggtgaccccgagttcgatgggccgaggccgcaagggccacgaggcggcggtggcggcggcaagtcgtcgtcgtccaggcaagttgtggagcggagggagcgtgatggcaccagtgccggcacaggcagaagggaagggaaatgggagaggaagcaacattcctgacttgtaaaactttgtccaacagactaggcacactactcccattatgttttgttgccaatatcaacatatagcaatcataggctattctttttgtgatcgaggcaccctcattgcatcgaatggtactagatcaaatgctcgtccaactcgttggtgaatggtgttggctatcgcatcaatcaaggcaagtgaatactggagtattcaaacggttcaagctgtgcactctgctctgcttgtggtgagtttacccacatggacttcttgttgctgtagcagtagtttacttgtggtaagtttgcttgacaccgttcagtgattgattcaattttgacgatcgatttttaaacgcaaacagctttgt

SEQ ID NO: 34650 - DNA, 386 bp, Setaria italica
  Peptide Sequence Number=SeqID_100624
tttttttagtacgggaaatttttttgtctgcgttacgcttggagagtgggaaatgtatttgattggcaatttggcatggcaatggatgtctgggaagcagataggttgagttagagactagagagtgaaaacaaatgctataaatcgatcgaaagaaagcagctttgccctgcggcattgggttgcgttgcgttgcgcaggtggcgtcacggcgttgggcccctggacctctcctcgtccgacgcgcccctcgtcccctcgctctcctccgtcgccgtgcgcccgtgcccgccggcgatctcctcgatcatcctgacgacgtcgggggcgtccgggcgcgcgtccggcgcggtggacacgcacgccatggccacctgcagcagcgc

SEQ ID NO: 34651 - DNA, 546 bp, Setaria italica
  Peptide Sequence Number=SeqID_100625
tccattctctctcacccttgtacgactttagtgactcttcagtcatctcatagtaaagtgagataccagtggacttgattgtgataccacgttctgcttcatctgcgtgggtatcagtcatgcgaacatctccagcaacttcctgggcaataatcccagcagctgccacaagggaatctgtaagggtagacttgccatggtccacatgagcaatgacagacatgttacgaatgttattcttcttatccatgatgccacggagctcttccgctgtgaacttcaccatcttgactgcctttggatatcacgctacaaatctaaatctctgatttgcaagaaaaaacacatagttagaatccaaccaaacagaagtgtgaactaagctaaagaacatcactgcagacagatcaggaattgtataaagtaataatgtatataatcaattatggatcacaagatgagttattttcttttagtttgcgagataaaaggtgagcattctatccagcccactcaatgagcatggagtagaaaatacaaaaccag

SEQ ID NO: 34652 - DNA, 597 bp, Setaria italica
  Peptide Sequence Number=SeqID_100626
acggccgagtcgaatgcgagacgggaacagatagcacgccgcggcgccgcgatggaagcctcgtccttgccgatgctcaccgcctcccgcttcctgcctccgcctccgccgccgccgctgctgacgccgacatgcccccggcaggccgtccccttcgtccgcgcggccgcgcggacactagaagcgccggaggcgcccaagccccagcggccgtcccccaggcgcagcgccgtcgccgaggtcaaggcctcctccgaccccgtagccgcgctcaacaggttcgaggatgtgctgcagacacaggactgcaacataatcctgcgccactgcggagacactaggcgctgggatgacctctctaaggtcttcgagtggatgcaggagcgcgagatgaccaacgctgcatcttacagcagttacttcaaataccttggactgagccgtgatcccgcgagggcgctgcaagtgtatggtgccatccaagactgcacgatgagggttcacgtctctgtctgtaattcggttctcgggtgcttggtgaagaatgggaggtttgacagcagcttcaagctctatgacgagatgatacgcgaaggg

SEQ ID NO: 34653 - DNA, 684 bp, Setaria italica
  Peptide Sequence Number=SeqID_100627
gtttgagatttcatttgtgttatccctagtatcagtgcttgccgttgatggttcactagactgcacactggcaaaactatcctcgcttttggcagccttcaagctactgatttcttgcctcaattgtgcaactgtttctcgtagttctgcattttctgttaccttagcttgaagttggtcttgaagaattctattatccgcagacataatctccagttcaaatgtcttctcgctcaactgcgtgctcaacttcgaaaaggtctgggacaactctgtcttagtggctggatcttctgtagtttcaagtgattgaaccatccgctgctctagcaaatgtatatgcaacttcttttcggcgatttcctccttcaacttctcaatttgcccctgaatatgtacatcatcagggttgttggctgcttgctctgacagccttttgagtgagcttgtacaaagtgcaacttccccagccagcattttgacctgctcttgtagaagatctatttgatccacaatggttgttccacttggaggagggtgatgtgctctggacgcagcactaaataggtcaccagcttgagtcctttcaagaaaagaatcagcaagtgtcgcgtcatctcctttcctggtcatagatttccttcgaccatccttcaggtcaagcagcaagtctgagacacgcaa

SEQ ID NO: 34654 - DNA, 583 bp, Setaria italica
  Peptide Sequence Number=SeqID_100628
aaaatacaatagtttataacaacatatcaaatactgaacctgacatgaaaaatggtgctaactttgataacgaaaatgaatgcctatacccactagtgttgcccagttttgatgcagatcctctcatttggttacctccggaaccagaaaataaggaagatgacttcgatactgttttaaatatctgtgatcagagtgaaaattacagcacgtgggtgggctaggtcaagtttcaactttaacttagcagagcgaagcaaggaaagccatgaagaccaattgcagaaagtaatgtcagaagttatgaatgggcaattcaagatccttgtaagtcgtttcttggctgctgaagggttctctctgtcttatggaggcaccgagaagaactggtttgatattgttgcttcattgtcatgggatgctgcactacttgtcaagcctgatgccaattctggaaatgcaatggatcctggtttgtacgtgaaggttaaatgcatagcttcaggatcttaccagcagagtgaagtgatcaatggtcttgttttaagaagagtgctgcacataagcagatgcgtgccaatgt

SEQ ID NO: 34655 - DNA, 370 bp, Setaria italica
  misc_feature (337)..(337): n is a, c, g, or t
  Peptide Sequence Number=SeqID_100629
tagacaacaacaataaacatgaaattgagcctctggtgaatgtggctgctcgtcaccaattctatcaagcgagtgttcatccgggacctctggagggtacggttgactgtagtagagtgggaattgcccatcttgaggtgcatcatgatttgatggagatggtccagtggctgtgtcagcttggccccactggcttgagcttgcttgaggcatttggtgctaaggcaatggactgggacacagattggaaatgattttatcaatgtttagtgggtctgaattgcattgatttgaagtagctggctgctggacaggctcatcgttgataggattttcnggctgtttagacaaacgtgtactacgcctaaga

SEQ ID NO: 34656 - DNA, 1385 bp, Setaria italica
  Peptide Sequence Number=SeqID_100630
gtaatggttagtgttaagcagtatgtacttccagtccaaatcaccaggcaaatacttccttctaacaatcagtgcccctagaactggtgaatccttatgacatcaccaatagttccaataatataatctagtctagatcagctgcggatgcttctttggagcaatgtatatatctacaatgaagccccatatcgctcatttttctaatgagtttggtttatcaactctagaagggctcaggcgttcagagtttgtcaatgtgcagagagctttccatactggaaccaacattttgacaggaggacgacatttctggaaaactagcaggagttcctcttcatcacgcaaaagcaatgccaagctccagtaacaggtcaccggtgtcacacactcatttatcagtggcttcagaatcttgccaataggcacaaaacgacgatcaactcttccactaagaatgacagttttaaattcttaatatgaatgaatcaacaaatggaaccaaagcttcaagcagcctatattttctaagctagaagaaatagacaaatagtcataaaacaagtacatagtagagaaaatataattctctacttatatgctgtatgcctgtatattagtttcgtcctaaactcataattatcaatacagtactccaatcttgttaaagctacagcgaaaatctagaaattgtcagacagaccccaacccatacttcagaaattatttaactaaataaattgatctttagcaccagtcatacacagaatccaatttatgcatcccaatgctcgtaagagttccgttttgctcataatcataagctcaaacatccagcattgggatagcatgctcctagaggaaagttgagcctacagctcaatgcatatcatttatcatgcgcgatcagtgatctagagcttccagtgtataaagagaatgaattgctgccatctctctcgacctcgttttgggaaaaagtaaaacgaaattaccccattgtagttgttgggtagcagaaagtgcttattcagcatcagcagctagcacagagctgctgatggacgaggcccttggtctgctaattggttgggtagcagactagcagtgacttccaaaaagagatttcattgcaacagtcgacttgaatgattggtgctaaatatattcaactgagaaagtgatcattctatttttggctaccttgtccaactcaagtataataacatgccattatccccaattatcaagtacagtggataactccaaaaatggatctctagctgaaccccaaaagctggcataatcactacagactctttcttcacaggtttgtattgcaaacatttggcaacaagaattggcaaattgttaattatttccaa

SEQ ID NO: 34657 - DNA, 415 bp, Setaria italica
  misc_feature (368)..(415): n is a, c, g, or t
  Peptide Sequence Number=SeqID_100631
gtcggcgcccgcggcgtccgacggcgtcgtcccgtccttctgctgagggagagacggacggcgacccggcggcggccgccccgacccctctcttccgctccccggccgacgacctcgctaattttgccgactctgaagggatctgaacgcatgcgacgcgcgcgctccgtgtagcatgaataattgtacagtagttcgatgcactgcacgaactcaatcgcattcgcacggaacgcatgcaatcctcctcaccgtctctgtaatccagccttgtacattatccatctagaggtgtttgtgtttctcttttgcatgagtgcatcttcaacctgaaaacttcgttgttaagaaaaaaaaaaaaaaaaaannnnnnnnnnnnnnnnnnnnnnnnnnnnnnnnnnnnnnnnnnnnnnnn

SEQ ID NO: 34658 - DNA, 216 bp, Setaria italica
  Peptide Sequence Number=SeqID_100632
tttcaaccaattgtctagtgtacttgttctgagacatcgcatgggtgatgagatcaatagacgcgatggtagccaggggagtacgatggtgaagcgtttgaactgcttcaaaggcattatccaggttctggattggtaggtccgctgcaaagtggcggcggcactctgctcttgcggcgtttcttgctcgtcatagagttctttgagcttcgatct

SEQ ID NO: 34659 - DNA, 460 bp, Setaria italica
  Peptide Sequence Number=SeqID_100633
atataataattatccttttctgtttatagagcagaatgctgaacagttgtaaacttgatatgatctctacttaaatatgaaaaaaaatcaatgccatatgtaatatcaggacacttttcgtattgttgtttcttttacgctcattactttccagttttgtattgtcaagtacggattgtgttcctgtacaatgagacatgatggagaagggtgtcagattaggggagttgagtccatgtgttatgccgtagctgatgcatcgtacagctaggggttacagtgtgattgaattgcaaggcactgctatacaatttagttattttgttggcatgggctgaattgattagggctatggtgaatgaatcatgaagccaatccttgttagtggtgaaagtggtgtgggcaaaactgaaatgacgaagctttattatggagtatctcacttttgtttagttggtta

SEQ ID NO: 34660 - DNA, 202 bp, Setaria italica
  Peptide Sequence Number=SeqID_100634
atcatagtgctgcattggatgaatatggtcatttgtacatctggggaagagcattaattgggcaacatgacaatgatcaaccttggtcggttttcccctctttgagtatttctcaagtggcattaggatggcatcatgcactacttttatctggtggagaattattcaccattggtgtttaccgccaccagaagtgtgatca

SEQ ID NO: 34661 - DNA, 694 bp, Setaria italica
  Peptide Sequence Number=SeqID_100635
tttttcatattttttagaaaggaatttagcatacatatatcaatacaatgtaccctcggattacaataaaactgtagcaagatgtaatctatccatgttccatttactgggctgcaacaaccaaaagtatccaagcggatgatacaacaacaaaatcagttacatagttggggtttaattcccctcgacaccggctgctgtcacggctggtcctttgcctacccagtatttgtatgcagcataaacggaggacacaactacgacaccaaggaccaagtaggtgaagatggtggtcacgctgatttggctagggcccttcttcactttgctttgtgccaacaacgcctttggcttgatcttagccatgccgcgcttcagagaacggagagagcagctccaaagcgcgagacgaggacgacgagtcgacgagggagccgaggacgaggccgccgcctacggggcgagtggaatgaatagtctcgggggaagactgcaactcgggaagggggatggaatgcctggactggatctggatcgaggcgtcgtgttggaagttgggaggaaacgcccgaggccgagacgcgcttgtgccgttgcgcgccgctccgttgggttttagccggggactttgtttgtgggagctggaaaggaatcaggtccggctgccctggcgatttgagctgtccggctggct

SEQ ID NO: 34662 - DNA, 476 bp, Setaria italica
  misc_feature (433)..(476): n is a, c, g, or t
  Peptide Sequence Number=SeqID_100636
aggacgctactccgcgctgcccttccgcgacggcgccgccatcgccctcgacggcgagcccaaggagtcgtggacgaagccggtgtcggtgatcgtcgccggcctgctggtgcccgcggtgatggcggcggtagcggtcaacggggtgccggagcttctgcggtcgtcgaggttgatcaacgggatcttcccgccgtggatcctcgtcagcgcggtcatcatcttcgcgcgcgccaggacgcggccaagggctccgtgagccaggcagccggagcttacatgtatcgctcttgaacgcatcagtttctttcccttatgggccacatacaatccttgcctaatgtaagaattaattgtgatgtaatgtcgagaaaatggactatatccgcaccagattttgcttgatgaaatgttatctgaattttggaagttnnnnnnnnnnnnnnnnnnnnnnnnnnnnnnnnnnnnnnnnnnnn

SEQ ID NO: 34663 - DNA, 442 bp, Setaria italica
  Peptide Sequence Number=SeqID_100637
gtgagatacgcacgcctcctcttgcagcctccccttcgcgaactcccccgacaacgcgtctcctcttttcctcacggcaccaaatcgcgcgtcatctccccggattcgcgtgcacgcgctgtggacggatcgggggaggaggaggtcaggggcgcaatggtggtgatggagggtaatggcggcgccggcaagatcaccattggcgtctgcgtcatggagaagaaggtgttctcttctccaatggagcagattctcgagcggctccgcgcgtttggagaattcgagataataatatttggagataaggttattcttgacgatcctattgagatttggccaaactgtgattgcttgattgccttctattcctccggttttcctctacaaaaggttcaagcttatgctgctttgagaaggccgttttagtcaatgaattggagcc

SEQ ID NO: 34664 - DNA, 295 bp, Setaria italica
  Peptide Sequence Number=SeqID_100638
ttttttttttttttgttgccatcgttcactccaaaaaaggaaggatatttcattaaccttcccaacaggacatcacaaaatcgattgcctactaacgtttgccagaagaaagtacaagctgcatatgtggcgacaaaatactgttttgagccacaaattcttcatggatgtctataaggttaattgaccattgcttccaacaaagtcatgtatcttgtctgtgtgtatcatgtcgtcatgtctactggtagggatgaactgaaaattctgtccttggccttcaaagcttctttct

SEQ ID NO: 34665 - DNA, 1030 bp, Setaria italica
  Peptide Sequence Number=SeqID_100639
tcaacacacacaaaagatctgtgttttaatcacacatcagttggcgaaatggaaagagcgcaagtgcgcaggctattccttcttggtagcaaccttgctgccaggcttcactggtgtcgagaagagtggggtgtacttgtggtgtttgatcaccatgagcataacaaatgtgttagcagctagaaacacgaggcctgcaagccagagttgcacaaagacatttcggcccttgaattccagcaggtaagcccacatgagccaatgtagttgagatcccatccacactagcatgcaggccagacccttccacttaagtttcatgctgctccaagggaggatgagaggcaacaggcagaagaaccacacgaagtactgtgccgtcatcaccttgttaaaagcaacaaatgcaacagtctggagaaacatgcaaaatggaagatccctacagaagcgcgcaatcaatgccagttgcacgatcagttgaggcagaaacgaagcaagcctctgaatacttgagaacccttgctgatgatgtagatatatatgatagaaatatatcgagaaattgtgtcttggatcagtccgagtaagatggtaaagtaatgcttcgtttaggaactcccacccataaagatagaagaaaacaccagtccagacaaagaacatagatcctgagagcaacccaaataggattgcatttcttgttataaagtttgaaaggaaatcccatagagtggccaggaatgatgttggtccttctctttgactggatttgtcattttgcaagtgctgttcggacctccacaatgtaagagtaggcctaccagaagaaccagcataactcttgccaagaacaattacaaaaggaatcgcatatatgattgggtatattctgaagtgcacgataagcccataccagaatgctgcctgaaatactctacctgcaaaaggcagttaaactgtaacataccatgctaatctacattatacccaacaaattttaatcattggcaatcctacttcttttctt

SEQ ID NO: 34666 - DNA, 372 bp, Setaria italica
  Peptide Sequence Number=SeqID_100640
acaatgaacatattcagttggaagttccgcgagctttgtgaacttccattgtttgaagatagcaacttccgcctgaacctgaacatgggctggacttgggcgggagaagaagagggctggcttattttgggccataatcagctaggcaggctgttggatacaagtatcggccgtgagcttcattctggatttccttcttcattgccggaggtggaggaggaccgcggcaagccggcaacgaaggctgatggcggcgacgggcgcaagttgctcttgtaaaggatctatgtgtaattttcttgttagtcaggggtgtcttgttaaaggggctggctgtaatagttttatatcaataaaatccaaaccctttct

SEQ ID NO: 34667 - DNA, 355 bp, Setaria italica
  Peptide Sequence Number=SeqID_100641
gttccaacttgcatatctcctttacttcggtgttgatcaaattataggagagcatcttgtatccttcaatagggaggaacaccagatccctttcaggatgaaacacaactacgtagaaaatttctgagcacaaggcattaccagcataatcaaacagtatctttgtctgcggagccacttcaatctcaaatcggtgcttcagtatccactctcccttctcgaaatccttcagagtccaaatctgcatcatggtgcaggtgcagtcttcttgtacagcatattgcaggaatccctgagagtgtccgaggcacccaaccaacccaaacaagctggatacaggcaaggaaatcagaac

SEQ ID NO: 34668 - DNA, 338 bp, Setaria italica
  Peptide Sequence Number=SeqID_100642
acgtaatggccctacgaatgatgagaaaatgaatgttggtgatgatggatctggaaaatcaaattcaacaagtccgatgtccttatctcaaagtgtgaaacagcaaggaagcccaaatggtcctttgcgcaatgagtcatttgaaattcattccatatcacctgctaggcaactgacaagagcaggcatgtttgagattcttcacccttaaagtaaaaaaaatgttatgtatagttacaagaacattttgaacctaacataacatgtaatatatgtatttttttgaaatttagttgtatctttgatttttaacttatatattattattgcagtagtat

SEQ ID NO: 34669 - DNA, 623 bp, Setaria italica
  Peptide Sequence Number=SeqID_100643
tttaacgtacgttttctatttgaacttgatattgtcgatgaaagtacccagctacaagatcttagaacacgtaatggccctacgaatgatgagaaaatgaatgttggtgatgatggatctggaaaatcaaattcaacaagtccgatgtccttatctcaaagtgtgaaacagcaaggaagcccaaatggtcttttgcgcaatgagtcatttgaaattcattccatatcacctgctaggcaactgacaagagcagtttctaactgcaaggatgttgatgaatatctggagaaaactgcctttcaaaagggccgctttaaagtgatacatgattatagcaagcttgaaggagcaacacagagagagaaggagttattggagcgcattaatagtttagagaaaatgcttcttgctacccaagatgaagttgagaggcttaaaagcaaaggaggcaaaaacaagcagagggatgcctacaacaactatagtagtgaagtgaaagttaattatgtttgttacttaggtgatgcttgcaatggtagggagcgactgtaatacatatcatatccttgttaccctaagagttcactaagttggttaagtgaattatatgttagaaattgttg

SEQ ID NO: 34670 - DNA, 1039 bp, Setaria italica
  Peptide Sequence Number=SeqID_100644
tgttgagttcttctcttgccgcttggatctcgggagagagacatcccaagccccagacagggcgcgactgcgggagcacgagaccagcatcctctcccaagctcgcgcgttcgtggcttccgacggagtggggagcgcgaggcggtggccgcggaaggggagcgtcaagcacccatggatcagcgccaggtggttagcgagaattatgccaatcccattacatgcttcttccatgtgcttttcaaggcggcggcactagccttctacatcctgttctcgctctttgtgaagagcttcgttatcatctttgtgatcaccgtgctccttgcagcactcgacttctgggttgtgaagaatgtcagtggaaggatactggtcggactgcggtggtggaatgagattaatgacgagggagagagcgtctggaagtttgagtgccttgatgcagagtctctggctaggatgaacaagaaggactcatggctgttttggtggactctatatttggctacttcaagcagattaccttcttgttattggagtttgcttgagtctcagcattgcaaacattgttgggttcaccaaatgcaacaaagatgccaagaagaacatccaggattggactaagaatgcccttctatcagggagcgtcaggtcacatctgcagtcagcatttggtgtctgaactctgaacacctatgacatagtgtcacgtatagtgctgtacaatttactgataagatgatgacacattttcattttgttcattctacctaattaattgccgtacctatacattgctctgccccccttgatgcccttggcatcgtttggtcttctgtttccaaagatgatggttttgactatagttacatgcagaatagcacctctcggtagtcggcactcactagctcctgaagtacttagaagctggtttggccttctcattgatggtgttgtgttgctacttagctgcaaaatcttctgcttgtgatggaatgggtacatatacagttacaccggcgattcttggtcaaaa

SEQ ID NO: 34671 - DNA, 1011 bp, Setaria italica
  misc_feature (13)..(13): n is a, c, g, or t
  misc_feature (924)..(1011): n is a, c, g, or t
  Peptide Sequence Number=SeqID_100645
ccacccttcattnatctaacttgcactatcgaccctcgccgtctccctcgtccatagcgagggattcccccaaagcgaagcaaacgccattagaaaaccagtaagatccggcgaagaatcatagcggaaaccaagttcacccggcgagagctaggtgcggggaaagggtccgatggatcagcaaccccaggggattactgagaactatgcaaatccgaagacatgcttcttccatgtcctcttcaaggcagcggcattggcgttctacatactgtctgcgctgtttgtgaacaacttcgtcatcatctttgtcatcacggtgctcctcgcagcactcgacttctgggttgtgaagaatgtcagtggaaggatactggtcggactgcggtggtggaatgagattaatgacgagggagagagcgtctggaagtttgagtgccttgatgcagagtctctggctaggatgaacaagaaggactcatggctgttttggtggactctatatttggctgctgctgcatggattattcttgggatattctcgctcatcagacttcaagcagattaccttcttgttgtcggagtttgcttgagtttaagcatcgcaaacattgttggcttcaccaagtgcaacaaagatgccaagaagaacatccaggctttcgctcaaaatgcgctcgcttcccgcgtcacatcatcgctgcaatcagcatttggggtcatctgaaatcccatatggagtctacaatttgtcaaaactcaaaagggcgaccttgcaaggatgcaactccaccggcgtagatagcacattgtactgtcctgttttcagactatttttttttgactcatacaacaaataggtcgattttgatgtgagtaccagcaaacaactttggtacagctctttgggtcattcgtccatannnnnnnnnnnnnnnnnnnnnnnnnnnnnnnnnnnnnnnnnnnnnnnnnnnnnnnnnnnnnnnnnnnnnnnnnnnnnnnnnnnnnnnn

SEQ ID NO: 34672 - DNA, 248 bp, Setaria italica
  Peptide Sequence Number=SeqID_100646
gttaagagggctgcgcctgaggctgaggctgaggctgctcgtgatgcggggtggttgtgtccagaacatcaaacagggccgagtaatagaacagagcctcccggaaccttgtcacaaagaacggtgcactgaaggagccatttacgattgcatggatgaaggcatgaggcctcatcttcctgatgttattgagaacaatatcccttgggctttcaatcaaaacactctcatccatcaagttttaaccg

SEQ ID NO: 34673 - DNA, 2325 bp, Setaria italica
  misc_feature (13)..(13): n is a, c, g, or t
  Peptide Sequence Number=SeqID_100647
atcaggaaagagngcctatgtactttttttttttagtacaaaaacacaggcttcatcgctttatcatacaaggctattgtctgacacaatgcagcaagcaccggatacagagcaacccattacaacctgatcaactgactggattgatcacaactcgcaagtgatgctgcagccaacatgatccagcgggaccctaagtctaaattctactaaatagcattaagcagaaacataatggacatctatttcacattacatcaaaccacggatttctgcatgccttctgccatctgatcccccacatcttctgttaaccatgttcctcagaacctgaatcggatgaatgagcaaaacaatctacccatggaaagaacaggtccatgttgaattctgattaggcgtaccttgggtaaggaacccactgaaccatggttattcactgggccatacagaacagagtcactagatatatctagatgacatacctaaacctacatatgtagataactgagtgaaaaaaacagctaaaaataagagccagcatcatcatttgccacccatgtcgagatggcatagaggatgcggcccttccatccctgcagaagccaattgtgatcaatatcgatcacaaagtccttgtggtagcaaccatcgaccttgtctcgcactacctgcacgacatcagggttcaatggcagctgcttcaagcctgctcgctgattccgcacctgccattgcttgtatgtctcagggcgctccacccgatctgtaccctcacacgcaatgacattcagggcggccctcccaaagatgttctgctcaatcagcatcctctggttgctatctcttggggtggttgtgtccagaacatcaaacagggccgagtaatagaacagagcctcccggaaccttgtcacaaagaacggtgcactgaaggagccatttacgattgcatggatgaaggcatgaggcctcatcttcctgatgttattgagaacaatatcccttgggctttcaatcaaaacactctcatccatcaagttcttaaactggtataagcagttcacaatgagcacctcctctggatcaaggttcagatcctcggcacggatggtctccatcttggatgctgcaatcacctggtacttgaatggcacgccaaactcttgggcatacttgctgagccggcgccctgtctcctcaatgcgctgagttgggcggaacccaggctgcggaaggtcaatgcctgtaatcctcacctctggaggcccaccctccctgcatgctatccttcgcaggaagcatggccactggaagccataatgtatgccataatccacgatatgtatcttcttcttacccagggaggcattgtagatggtttggttcgagaagatgaaaaccaccttcttgaagcagatggcggccatgtacagctggtacgcctggagtatgtcgacggcggaagtgcgcttggccatgagcgactgatacaccatgctgcccgtgccggcgagccgcgcctgcaggccctcggcgaagcagtgcgccaggcgctgcgtggcgtccccctgcggactggcatgctgcttgatctgcttgagcagctcagttgcgttgcggcggtcgtcactagcgacggcctgcgcgcagtggatgagcagcgtgcgaaggtccaccacctccctcccgccgcggcgccctcctcccttggccttggccttgccgtttccgttgacagcctccttcttggcggcctcctcctgcatggcgatccgcagcttctccatctgctcgacgcacatctcgtgggaggtgatcatgtacttgtcgaagacgtcccggtcgtcgccgtccccctgcagcgcgctctgcttgctgctccggcggtccatctccaggtcctcctcgtcgtacgtaagaaaccggttcttccggaccgcgaccccccagccgccgccgcctccaggcaccgcatcaggcgccgccacggccaccacctcctccttcacggccaccgctgcggcgactggggcggagccgttgaatccggcagccgcgaacttgttctcggtggggaggacgaacctcttggcgtcctcgggcgggtcgaggtcgatgacgagcttgtcctggctggggaggaacttgttggcctcctccatgcccttgaggaaggcggagctcatgaggtcggagttggcgccgtcgctgaagaaggcggcagggtcgaggtcgaagccgttgaactgggcgccgggggccgaggcgtaggagtcgaccgccgcgggggtgaggggcgcgttggcggcgtcggaggagcag

SEQ ID NO: 34674 - DNA, 499 bp, Setaria italica
  Peptide Sequence Number=SeqID_100648
aacttcctttatttgcattccttctttcaatggagcatagttgtcctgtccctcttgtatgatagcttgtgcatttatgatttaatcaacttacctcaggcatttatcctattactactttatgcttcttatttcactttctgttggattgtgtggattgcttgatgggtggatggcctatttatatgctattactctaaatgtagaaaattatttcgaaaatgcattttgccagaagttggaagcttcagttttttgaagaactttttaacaccatgtctggttctagaaggaaaactcgttttttttagcattgttgatttcatttttccacatcaagagtactcactctaaaaaggaactatctgtacctcaactgtggcgattagcgaatcgatcttagcaagatattgtttgtactccttctcaatgttttagaagtattttcaaaatgttgttcacacatgatccataattccatgtatcaaacttccaacac

SEQ ID NO: 34675 - DNA, 732 bp, Setaria italica
  Peptide Sequence Number=SeqID_100649
aagaaaggaaggttctggcgactcggtagtaagcgccatggggaggaagcggcagctgatctgcctcgccaccgccgttgcggccgcggccatcctcctgacagcctcggccaagaagtccggcgacgtcaccgagcttcagatcggcgtcaagggaacactcatcgatggatcagtatttgattctagctatgacagaggtgacccatttgaatttactcttggaaatggacaagtgataaaaggttgggaccaaggattactaggtatgtgtgttggtgaaaagcggaagctaaagatacctgcaaagatgggttatggtgagcgaggctccccaccgaagattccgggtggagcaactctgatctttgacacggagcttattgccgtcaatggaaagacatctggtggtgcaaaggcagaaagcaacagcgagctttaacacattgaggagtttcaactctcagattgcagcagattcaataatagtggctcgctgtggctccattagatgaaagggttgctgtttccttcatgaaaattatgatttagatgttacaaagacaagtcaggctaagccatacatgatctgtgtaagcgactgctcatatactctgaaaacattttttcgctgaactgggtgagaactcgatttgtcttgttgccagtcttcaacataacctgcttctaaatttcaaatgtgatcagtgatcgaaggcacacgagggagta

SEQ ID NO: 34676 - DNA, 594 bp, Setaria italica
  Peptide Sequence Number=SeqID_100650
acgacgtccggacgtcactgcgaagtctgaaagaactgcacggggaagaaggaaggttctggcgactcggtagtaagcgccatggggaagaagcggcagctgatctgcctcgccaccgccgttgcggccgcggccatcctcctgacagcctcggccaagaagtccggcgacgtcaccgagcttcagatcggcgtcaagtacaggccagaggcatgcaccctgcaagcacacaaaggcgacaaaattaaggtccactatcgtggaacactcatcgatggatcagtatttgattctagctatgacagaggtgacccatttgaatttactcttggaaatggacaagtgataaaaggttgggaccaaggattactaggtatgtgtgttggtgaaaagcggaagctaaagatacctgcaaagatgggttatggtgagcgaggctccccaccgaagattccgggtggagcaactctgatctttgacacggagcttattgccgtcaatggaaagacatctggtggtgcaaaggcaagaaagcaacagcgagctcgtagaccttgaggacgttacaactatttttttgttttttagtttttt

SEQ ID NO: 34677 - DNA, 201 bp, Setaria italica
  Peptide Sequence Number=SeqID_100651
cattaccttagttaccaaatctattaaactggaaaaggactttttgaacaagcaacaccccaaaacaaacacaaataacgcatgcttttattatataggattgctacaaagtacgaacttaagaagtacaacttaattcaaggaaaacagttccgaatagttgttacggagaaaacatggaatcagaattgtgacaactga

SEQ ID NO: 34678 - DNA, 265 bp, Setaria italica
  Peptide Sequence Number=SeqID_100652
agacccaactagtagaattaggatgaggtgaggactggtacttaccgccagctcttccaccctgagcagctcatcagtggcaaggaggatgctgccaataactttgcccgtggtcactacaccagtaagtaacatgatctgatctcaaagtgcacattgtttccagttatccatccttcattgaaagtctgactttgattgcttgtcttgcagttggcaaggagattgttgacctgtgccttgaccgcatcaggaagcttgccga

SEQ ID NO: 34679 - DNA, 467 bp, Setaria italica
  Peptide Sequence Number=SeqID_100653
cccacaagtgtagacattagaggagctatatcagcctggttgacatccgctctctcaaagccttcgagggcccagtcctgcggagtgggcgtatcatgtttatggtcatcaacaaccgaaagccatcatctggcttctctgtataagccaagaactttgggcttctaattccagcaccccatgctacaagaggagtatcggtattcgaagggtgtccatctccatggcttcctttgtcactcattccatgatctgcggtaaacacataagctgtttggttgtctttgaaatagttctccatgagattgtacatactttcagcaatttgatcaacaaccttgacattgttcagataaatgcttgaatagggtcggtgtgcatggccattggtatcacagcccagtaagtgcagaaatataaccaatttatcctgtaagagtaactgcctcaatttaatgattcaaaaa

SEQ ID NO: 34680 - DNA, 252 bp, Setaria italica
  Peptide Sequence Number=SeqID_100654
cgaacacagacgcgaaccctgccgtgagcgaagcaacccgtgcacgctcccgaattccgatgcactcgtcaggctcgagcgcccaggccagatcgcaaccctacgccacaccgcaggccacaccgaatcgatctgcacccaaacgccaccagcaaaaatactcccatgcagacccaaaagcagcatccgatattccgatcccggcaaaaacattcttccagaaagaaagagattattttcccgcaacccaat

SEQ ID NO: 34681 - DNA, 1194 bp, Setaria italica
  misc_feature (1158)..(1194): n is a, c, g, or t
  Peptide Sequence Number=SeqID_100655
cgccacggacctaccctacctccgcatcctcgagctacccggcaaccgcctcaccggcgggatcccgccagccgtcggcagcctctcccgcctcaccgtgctcaacctcgccgacaaccagctcaccggcgccgtcccggggtccatcacctccctcgcctccctcaagcacctcgacctcgccaacaaccagctcaccggccgcgtccccgccgacctcggcaagctcgtcatgctcagccgcgcgctgctcggccggaaccggctgtcgggtcccatcccggcgtcggtgtcgtccatgccccggctcgccgacctcgacctctccgagaaccagctcaccggcgcgatcccgggcggcctcggctccgcccacgtgctcacgtcgctgtacctcggcggcaaccggctgtcgggggggatcccggcgagcctgctccggaacagcgggctcgggatcctgaacctgagccagaacgccctggagggcgccgtcccggacgtgttcacgccgcagtcctacttcatgctgctggacctgtcgcggaaccggctcagcggcggcgtgccgaggtcgctggcgtcggcggcctacgtggggcacctcgacctcagccacaaccggctctgcggtgccatccccgccggcccgcccttcaaccacttcgacgccgagtcgttcggcggcaacagctgcctctgcggcgggccgctcggcaagtgcacgtgaggttaccagccgccggcgtcctgccggctggccgggtcgatcagagccggacggacacgcctgctctgtgctacctgctacgtatacagtgtgtgacgtggtataccgtgcacgacgcgtaacaaacttttttacgtccgcgtgacggcgcacgtacgttgtgtatcgtacgtgcggcgaggttaattgattaacctgggtaatcgtataggtttgggtacagatgacgacagcttttggcgttgtggtgtgatgaggggaagttaaaacgagtgaggaaaagggaaatatgtgtgctttcctcctttgatttcttcctctttagttctgtgatttctctttgcttaaagcttgggtgcttaaagcttgggtctgtacaagtgtcagaagcagaaagatcaaagaggtgctgagagcttgtttgtagnnnnnnnnnnnnnnnnnnnnnnnnnnnnnnnnnnnnn

SEQ ID NO: 34682 - DNA, 730 bp, Setaria italica
  Peptide Sequence Number=SeqID_100656
tatccaatagcagcatgaaggaagcaggctctcagccaagattgtcatcaccttttggtcatcaaggtgttgcagcagctgttaactctcatgaagaacccattagttgtaaaaatatccccatctataaactatagcaccaggaagcaaaatcaaaatctggaatgccaaagtgaaatttcacttattgatttggtcagttatgagggatcaaagaataagtctactgcgagacctgcccgtgagcttcatgcttcattttctgttaaaggccttggccatatcaagatggaaacacctccccattcaccgaggccaatcaaaagggttttaccttacctccaaaggccatacggtccacgtataaagcaaaacggtctatcccctttgatgttacaaaggcattggattctatgaatagtatcaatatgttgaaggagcaaagactatcagccaaaatgggcagtacattcaatgaatcaggctttgaaaaaagtaaacagtttaactgctattttccaggttcatctgagaaccataattctgacctctatcttgaggacgaagccatgttttgtgaacctcaacctaaaatggaatggcaatcaaagcatatgagatcagatggcaatcttgttgatgagggttctgataggctctggaggatagatcaatttaattcagaggatcattttcctaatcaaagagaggaacattttgatacaagtgg

SEQ ID NO: 34683 - DNA, 680 bp, Setaria italica
  Peptide Sequence Number=SeqID_100657
tttttttttttctttctctgcagattctgcgaatgggcaatctacaagaacagcaggttaccttgctcaattagcacggggttcactcacaaggatccactgtcttatttgtaagtgatgtagcaaaacagtgatgtccctagtatcaagttcatcgacccctagttccaactctgtccaacccctaccgttttccctctttaatatatccatcagcatgaatccatgtatacgaagaccgaataataaacaaaacaatggctaccaagcgaaacccttttagaacccgacaacaaaaaccttacaaattactgcatccaccagtcacgggagcagggcgcttggcaggatcaacagtcttattggatttgtcttccaaagcaagcacatgagcttctttcggaatgtttgcaacatacgtttcaattgccgcaactaaactctctgtatcacgctccccgtagtatgattcgtgatcatggtgaccctgattctccttgacatcagaccctttacggaaaacacgaatggatgggtatccttgtatgtggtgcctcctacacaagtcagcttcctcagtgcagtcaaccttagaccaaagaaaaggaaattaactaaaccaaataaccaaatttaacaaagggtaacaaataaataaactaactaacccttaaattaaa

SEQ ID NO: 34684 - DNA, 724 bp, Setaria italica
  Peptide Sequence Number=SeqID_100658
actgacaatgggataggccaggtggaattctgatccagttggtctaaattccgatcaatcgaaaacttgcgaacagtcttcgttatgttcaatctgttctgcatatggatttaacagataactaataaagttaaccagaaaaaaagaatgatgcggtgtgcagatgtatacatagcttcaaaagctagtgaaaaatgattttaacgtgcaagatagtatgcatgagtacttcaatgtttctttgttttctgaaaatataatgtctcttatgttccccttttttctcgtaccgttgaaggatagcaactaataatattgccatattctaaaagatagaacaaaaaaaaagacatatgaggcaaagatatatcttactgttcccagcacatcactgacatcaactgatgcaaattcacatgaaagtgcaggaaagctgtaaaagacaacggcagtcagtaaacatttgagggaacaacaattaagcttcacagtcaagaattgctgaaattgtcccaaattccaaccaacaccaaagccttgtacgagtaatttggtgtatgctagagatgaaacccaacaggaactacatgaaccaaggaagggaagaaataaacgacacttgatccgatgtgttcaaggaaaaaatataatggcacttgattccccaaaaccattcgagagctcaaatgaccagcaagaccaatgaaaccaaattaattgctga

SEQ ID NO: 34685 - DNA, 1003 bp, Setaria italica
  misc_feature (23)..(23): n is a, c, g, or t
  Peptide Sequence Number=SeqID_100659
tggggggggggggggggttcgtntttgtaacttagggcaaatattaaaaacagatatagaacaaacaaatgtttgcagaccaagtagcgtatccctggagactagataagcaaaccccagaaggtatctaaatagaatgtaagattactgtgcttacttgacatcagaccctttacggaaaacacgaatggatgggtatccttgtatgtggtgcctcctacacaagtcagcttcctcagtgcagtcaaccttgccaagaaggattctaccatccatttcagggtcatatctctcccttattattgtcgcagtcttctcccacgaaggtttcagtcgattgctccagtaacaccagggggcataaaagttgacaaccaaaacaggatactggtgcgaatagctatcaaaattgcgagatgacaagggaactgaaccatcaacaacttcttcaacatcatcaccatgcttactgacaatgggaataggcccagggtggaattctgatccagttggtactaaattccgatcaatcgaaaacttgcgaacagtcttcgttatgttcaatctgtttgttcccagcacatcactgacatcaactgatgcaaattcacatgaaagtgcaggaaagcttatattgaaatctatacgtaaaaactccccatctgaactcctatcaacgataacagatgtggtagtattgactgctaagtaactgctcaactccattccaaacaaaaacatcatagctagtgctgctacaatggataatccagcgccagatagtgatgcctcggtcaaatccctagggattttcctgtagaagtcgacggacttgagcttgctggagatcatggctgccaatgaccctcagatctgcggcggcagccggggtgtgggggaagagagatcggccgctgggaagaaaggaggaggagaaaggtgaaggtagtttttggtgggggtttccgttcggtcgtcccggtcggttccgtttcgttccgtt

SEQ ID NO: 34686 - DNA, 1977 bp, Setaria italica
  misc_feature (49)..(50): n is a, c, g, or t
  Peptide Sequence Number=SeqID_100660
tctttactaaattaagtactagttggtattcctttgttgagttgattgnntttttttaacaaagaaacaagacaaggttaaccttagtctcaatttgcttttttcttactcacaaggatccactgtcttatttgtaagtgatgtagcaaaacagtgatgtccctagtatcaagttcatgacccctagttccaactctgtcaaccccacgttttccctctttaatatatccatcagcatgaatccatgtataacaaaacaatggctacctagcgcatccgccaaagcttgtagcggcaccggaacttagatgttctttcctagctcaaccttcttcaccatccttagcgtgttgtggaagatggaatccagtattccagcaaccgtgaagactccaccaataatggcgcagacatttgtgatgaaatgagagaaggatcttggaacttcagttaccaagacctgcatgggagaaggctcaaaatggaatttcacaacagggacatagaagctgtgcaccaagctgctgtgtgctgtgtattcgtattcctcaagcactttcagttcctttgaggacctcagtgttacaagctcagtcttcacaatttgtaggtaatgctcaatagtaacattggcgttaacctcaccatgcttaaccatgtaagactggccagctaatctatcgtggtatcctcgaagatagggagttagtcttacgaattcatagaacatccttggcgaaagttttttgccaaatgagaactgtgtcacatagtgtgaaacatttatctgggatggatcaaaggagtgtgacccagatcgagccgatataacaacactccctggaacccttttgacccgcacaaaaccttcaattctgcatccaccagtcacgggagcagggcgcttggcaggatcaacagtcttattggatttgtcttccaaagcaagcacatgagcttctttcggaatgtttgcaacatacgtttccattgccgcaactaaactctctgtatcacgctccccgtagtatgattcgtgatcatggtgaccctgattctccttgacatcagaccctttacggaaaacacgaatggatgggtatccttgtatgtggtgcctcctacacaagtcagcttcctcagtgcagtcaaccttgccaagaaggattctaccatccatttcagggtcatatctctcccttattattgtcgcagtcttctcccacgaaggtttcagtcgattgctccagtaacaccagggggcataaaagttgacaaccaaaacaggatactggtgcgaatagctatcaaaattgcgagatgacaagggaactgaaccatcaacaacttcttcaacatcatcaccatgcttactgacaatgggaataggcccagggtggaattctgatccagttggtactaaattccgatcaatcgaaaacttgcgaacagtcttcgttatgttcaatctgttcgttcccaggatttaacagataactaattaatgttcccagcacatcactgacatcaactgatgcaaattcacatgaaagtgcaggaaagcttatattgaaatctatacgtaaaaactccccatctgaactcctatcaacgataacagatgtggtagtattgactgctaagtaactgctcaactccattccaaacaaaaacatcatagctagtgctgctacaatggataatccagcgccagatagtgatgcctcggtcaaatccctagggattttcctgtagaagtcgacggacttgagcttgctggagatcatggctgccaatgaccctcagatctgcggcggcagccggggtgtggggaagagagatcggcgcgtgggaagaaaggaggaggagaaaggtgagatttttgtgggggttccgttcgtcgccgtcgtcttcttggggatctcaccggcgcgcggtatggcacgcacgaacgcaccgacctcgtgtcctgcctcg

SEQ ID NO: 34687 - DNA, 821 bp, Setaria italica
  misc_feature (808)..(808): n is a, c, g, or t
  Peptide Sequence Number=SeqID_100661
attgttaaagcccgggaaatgggtggtctgcactctactggggaccttgtcaaactaatccagagaaaatgtaacgtctaaaaaggacggcagggctggattaagactgcaacaagagtgtttcaggccctcaggattgcagttaatgatgaactccgggttctggaagattcactccattcaagctttgactgcctagcgacaggtggccgtcttgctgtaatctcgttccacagcctggaggacagaattgtgaagaagaccttcttggagctcatccatgggggtgaagctgatgatgaagaggatgatgaagacgacctggcactccctgacatcgatgatgaagatgaaccatggtttaaccagagactgcaaggaaggaacgggatcgtcctcacgaaaagaccaataaccccttctcaagaggaggaaaaactaaatcagaggtgcagaagtgcgaagctcagagttatccagaaggcctgaataatttcgagcattgctgtggatatcggctcacgaattgttatagccagagcacacgtgaaatgagatcgtgacttacgtacactggcaaccgcgctccagatcaccagaaaaaaatacctcaaccggagaaaatggcagcgttttcctccgcacgaaacctagaggcttaggttagttgaaaaatctcactgtatctgcatcagttcctgaacttcacccatggataccatcagcacatgtactctgtaagaccattaccttgcaagatacaatagtccccttcacttccttgctcatcataaccaaaaaaaaaaanaaaaaaaactaaa

SEQ ID NO: 34688 - DNA, 253 bp, Setaria italica
  Peptide Sequence Number=SeqID_100662
gcggcggcagcggtgggagctcgtcgggtgggtggcgcagatgagggcgatggggaggcgggaggaggtgctggaccacaggctgagggggaacggcgacgaggcgcagatgctctacgtgctcgatttggcctgcctgtgcgtcgacgccgcgccgttcagccggccggcgatccaggaggtggtcagctggctcgagaacgtggacaccatcgtcaaaacatccgaggatgtaaaagactagggagaggag

SEQ ID NO: 34689 - DNA, 783 bp, Setaria italica
  Peptide Sequence Number=SeqID_100663
ggccatgatccattaccaccccgtcagtatgcacagccacacaggtaacagcaccatcaacaaatggatatagacattacactggagcacaagatcagcgtgtttcaaacactggaagttcaagaagcattacactattgttcccattaatatttgccaagcacacatgtaggttttatctggtattagcatcgtatggaacagctaactagccagcacacagtaggtattcatgtggtcagttcctaagacaaacggaacctgaatattacaaggaacgacaaatgtgcagggtcttcgaagtcaaaaatattactgtgacacatgcgttaaacaacatagcccacacgctcggaattaaccatagtttttcaggtgtcacgcgaaacttccaagatgctacccagagaaacttctatctatgacagtatgagattagttataataatgcaagtccttgccaaccacttaaccccatgatggtggttttagggagtgctatgctgctttaggcatcttacatactaataatgatctctaacattagctgtaacaaacaaacaactatacagttattttaaatgccaaacacaaaggtaccccaccactgataagatatcgtcatcctttttagtagtgaaagattgaagagaagctacatcattatttgccgagtctatctgctctattgtgtaactcaaaaactcttattgtgacactcaaaaactctgaaaagcttggttctcaactgataccaccacttgcaatcaggcacacgagggg

SEQ ID NO: 34690 - DNA, 228 bp, Setaria italica
  Peptide Sequence Number=SeqID_100664
ctcctcttcttcttcttttgcgattgagtagatcgatgcttgcaagtgtattttgcgcaggtgtagatcgatgcgaatggtagattgagctgatgatgaagtctaggtgtagctgtgtatagacttgcatttgattatttggaggagacgacggcgatggcgatgatggtgtggctgttgtgtgtgttcattcatgggcggagatgatgatgcgtcttgtttggtgcg

SEQ ID NO: 34691 - DNA, 671 bp, Setaria italica
  Peptide Sequence Number=SeqID_100665
aaaagaataggaattaactaatcaatcaacaataaactgcacatgacagatgtgaagcaaaaagagctgtcagtatcaccaatgcaatgggaaaagaaaattgtaggaagattctactcgaagctgatgctatatgctattcaggaaaagtcctaggctcgcaaacacaaaaaactatactggatagagcgaggcaaacagcaggaacctagcatgcaaaccatacccacatctccaaacagatgccaataccacatgcatatgctagtcatcgaagaatagagacaaataccaatgagatcgagagggtggcagcggtgagagcaaccgccggactccaaataaataccaatcagactctcgcaggatggtcgtggctgttgctggatctcgcagatcgtgcagcgatggccggccgggcgggcgcaggagtagatccagatctcggctagcccgtgcaccaatcgacgaaacaagaaacgatggccagggagcaagaaacctagggcgagagggagagaagacggggaaggctgcggcttactggcgagaaggcagcggtcgccgtcgcggtggtggccgttggagatgctgcgccgccacgccgcgagatcgcgccgtctcgcgcgccgccaacggagtgtccgtctcctcgcgtcgcgtgtggccct

SEQ ID NO: 34692 - DNA, 497 bp, Setaria italica
  Peptide Sequence Number=SeqID_100666
tttttttggtagcaattatatctcaaatcatcaacacggaatcaatgagaagcaattaagttacattatgaataaattagggaattaaactacatacgaaacaatatcgaatcagttcatcttacaacggtctagtttcttgttgccgagagcaacaggcactttcgcatcgcaaaatcgaaaccagccggcgggtagacaggcagatcaacccaatgcaacacagcaaatccacaacagacttccacaccaccaatcgccacatccaccctggctcaccatctcgtcccagcgacaatcccgtcaggaatcagccaatcaggtgcagatcgggcaccggacgaggccattctcgttgcactcgtcgcacttggtagtctccttgcgctcggtgtcgagcaccttgcggctgccgttgcagtcgcggcacatgacgaagcgcacgccggcgcagcccgcgcaccagacccgcgcccggggcagtccctccagcagcg

SEQ ID NO: 34693 - DNA, 437 bp, Setaria italica
  Peptide Sequence Number=SeqID_100667
ttttttttttttttgaggtacatgcaacagtgaaaaccgcatccgcggcaaaggacaatttctccatgggacgcttgatacaatagtttgtacaacacaagaccacttgaaatcaataacataagacttctctacagttatgtcgatagctttcgcagttgcagcctcgccttattgtacctcagtctccacctataaacataaacatactcgataaattgaggacatggaaactagattttctgggaaaatggtacagtatgtcataataccttgtataagctgagctacctacttcttgttaactatatggtacaaagccatcatctaagctggcggtagggagcgcctgcaagttggacactccatcttaatgtccatccatcgttgtaaacagcctgagtggaatatatgctcacaaggtgccaccatgtatt

SEQ ID NO: 34694 - DNA, 682 bp, Setaria italica
  Peptide Sequence Number=SeqID_100668
tgtagaaaggaagcatgcaactgcattgtatgcaaactatgttgattgggaatctattgacctactggcattattcttagtgtgaagaaatccgatgagtgtagcaagtacttacaaaagcggctgtaaagaacagacagctctcgcctcattatctcccaaccttctccactgtttaaaggcctacttgctttccatatggcgagaaggtaccaaccaatatcccagcagtcaggtgaagtagacacagatatgcatccatgatagcttgttggccaatcattaaaatagaaaccttagcagctcctgattgagtgttgctatgctccatttgtcgaatcagaagcagaacttgaaggaaagagataaaagtgaccatcagtgtgtagttgactgctttgttgtaataaacttctacattcaaagaagttgcatttagtaagataggtgagaagcactctccatcatcgccgacagctggactctcaatcaaaccctccaaccggttcgtctaggtttcttgaatttgtgaaatctaaaggtgattcggttctggaattgttgagcactccaacaaagataagcggagtgcattatgtccagggatcaattacattccatgatgtcattgacaatgcccacgatcatggagtggctcaaatcagattggaaggagtgtaca

SEQ ID NO: 34695 - DNA, 438 bp, Setaria italica
  Peptide Sequence Number=SeqID_100669
gaaatacttgtagcaggcaaaggcattaggcatgcaacagtgaaaaccgcatccgcggcaaaggacaatttctccatgggacgcttgatacaatagtttgtacaacacaagaccacttgaaatcaataacataagacttctctacagttatgtcgatagctttcgcagttgcagcctcgccttattgtacctcagtctccactaagctgagctacctacttcttgttaactatatggtacaaagccatcatctaagctggcggtagggagcgcctgcaagttggacactccatcttaatgtccatccatcgttgtaaacagcctgagtggaatatatgctcacaaggtgccaccatgtattcacttgttctctgggtatccaagcagcagtgcttttgcttcagcactatcttggttctcgctgctttattcctcgcc

SEQ ID NO: 34696 - DNA, 586 bp, Setaria italica
  Peptide Sequence Number=SeqID_100670
gctggtcggcatcgccctggccccgccgctggccgcggcgctgcggccgctccgggagcgcgtcccgtctcgcggagccgccacctccgccggttcgtggggcgatgagcacgccttcttcaaaagggatgagaatgatataggcccctattcatggaatattacgggaacatataaagggagctgggcctttgctggtgccacaaatggttcgtctaggtttcttgaatttgtgaaatctaaaggtgattcggttctggaattgttgagcactccaacaaagataagcggagtgcattatgtccagggatcaattacattccatgatgtcattgacaatgcccacgatcatggagtggctcaaatcagattggaaggagtgtacatatggccttttagacaactccggatggtagcaaacagtggagcagatggtgagccacttcaagaagaggattactttttttcaaatccataccatttgctgcagattttctcctctcaagttttccaagaatcttctgaagagaagaaccgaaggaagaattctctgacatatgacatggagaaacactgtaacacagaa

SEQ ID NO: 34697 - DNA, 1769 bp, Setaria italica
  Peptide Sequence Number=SeqID_100671
cgtcaggatcggacgcacaagatccactggggtcagaagactcccaagacagaaacaggcctcgctcataacgcggattgcatccgccacatccagcggcagtgaagaaagcatcacatctggaactctttcacagtgttaacaccctttgtacaacgctcagaccaaaaccgggggaccgaaatacttgtagcaggcaaaggcattaggcatgcaacagtgaaaaccgcatccgcggcaaaggacaatttctccatgggacgcttgatacaatagtttgtacaacacaagaccacttgaaatcaataacataagacttctctacagttatgtcgatagctttcgcagttgcagcctcgccttattgtacctcagtctccaccttgtataagctgagctacctacttcttgttaactatatggtacaaagccatcatctaagctggcggtagggagcgcctgcaagttggacactccatcttaatgtccatccatcgttgtaaacagcctgagtggaatatatgctcacaaggtgccaccatgtattcacttgttctctgggtaagatcaattgtagtcatgcaaataacacaatcgatgggctgattcgtgctatcctcgaccttcctgtggtagcagtatttctcaggcaggatctggcgaggaataaagcagcgagaaccaagatagtgctgaagcaaaagcactgctgcttggatacccatgaataccgtaacaactatgcaccatttcttgtcgggctcaatgcgcatgaagttactggggcaaccaaatatatacagtggaatagcgaggcgagtaactgtcatgcctaaaatatactgtggatgcagaggttttcttgtatccctgattatatttgtgacaatttgaggtacccaaaaggagtacatcaggagaagaagtgggcgtaagaaattgtgcaactcatacattagaaggattcctcccaaaagaatgccataaaagcggctgtaaagaacagacagctctcgcctcattatctcccaaccttctccactgtttaaaggcctacttgctttccatatggcgagaaggtacctcatttcaaaaatagaaaatactacaaatttgaagaatgcagccgttgcaaaggcattaaagagcgactcaaccaatatcccagcagtcaggtgaagtagacacagatatgcatccatgatagcttgttggccaatcattaaaatagaaaccttagcagctcctgattgagtgttgctatgctccatttgtcgaatcagaagcagaacttgaaggaaagagataaaagtgaccatcagtgtgtagttgactgctttgttgtaataaacttctacattcaaagaagttgcatttagtaagataggtgagaagcactctccatcatcgccgacagctggactctcaatcaaaccctccaaccggtacttctcatgttctccatcatttgggttagatgacacacgaaccaccttagcagctatttctgtgttacagtgtttctccatgtcatatgtcagagaattcttccttcggttcttctcttcagaagattcttggaaaacttgagaggagaaaatctgcagcaaatggtatggatttgaaaaaaagtaatcctcttcttgaagtggctcaccatctgctccactgtttgctaccatccggagttgtctaaaaggccatatgtacactccttccaatctgatttgagccactccatgatcgttgggtctatttgttctaattgt

SEQ ID NO: 34698 - DNA, 230 bp, Setaria italica
  Peptide Sequence Number=SeqID_100672
ctccatattcctctttccaagcaccaattgcaattgttctgtctggcctacatctaagctgcacacacatggctcaggtgtggaaccagagggaggatggtgagtgtgccattgcaatgggagagagctaccacgtcgacctcggtcaggccatggacctggccgaggctgacggggcgctcttgatggagctgatggaggacctgccgccctcggatatggcagatggt

SEQ ID NO: 34699 - DNA, 239 bp, Setaria italica
  Peptide Sequence Number=SeqID_100673
aaggctgtagaacctgggcagcacgcagtagagcacgagctggatctggtcctgcggcgacaggccgttgagcacgccggccttgagcttgtcgaaggcgtcgttggcggacgcgttgccgccgacggacgtgaacaaggcgctcaaggacgaccagttcagcgagttcaagcagctgctccacgacacgcgcgtggacacccagatcaacgcgcagctgacggacagctacaacgggc

SEQ ID NO: 34700 - DNA, 269 bp, Setaria italica
  Peptide Sequence Number=SeqID_100674
cttcttcttggtcttggacttggtcggcgccggtgcgggcgcgggcgccggggtgggcggcttggggccgaagagctcgtaggggagcggcaccttgtcgacggggtagacggcgagcgggaagtccttgctgacggggctccccaggagcatggagttgacgccggtggagatgttgacgttgttgcccgcgcgcttgatgtcgtacctgtagggcccggcgtgctcaacggcctgtcgccgcaggaccagatccagctcgtgctcta

SEQ ID NO: 34701 - DNA, 494 bp, Setaria italica
  Peptide Sequence Number=SeqID_100675
taaaggtaaacggaacgaaccggtaagaacgggaacgacgggacgaccggggtagggacggacttagggggaccgaaagaagctcgtaggggagcggcaccttgtcgacgggggtagacggcgagcgggaagtccttgctgacggggctccccaggagcatggagttgacgccggtggagatgttgacgttgttgcccgcgcgcttgatgtcgtacctgtagggcccgtcgtgcccggacccctgcgtgttgaccttgccgttgagggtgccgagcatggagaggctgtagaacctgggcagcacgcagtagagcacgagctggatctggtcctgcggcgacaggccgttgagcacgccggccttgagcttgtcgaaggcgtcgttggtgggcgcgaagatggtgagcccgttgtagctgtccgtcagctgcgcgtggacacccagatcaacgcgcagctgacggacagctacaacgggctcaccatcttcgcg

SEQ ID NO: 34702 - DNA, 1227 bp, Setaria italica
  misc_feature (1)..(80): n is a, c, g, or t
  misc_feature (88)..(88): n is a, c, g, or t
  Peptide Sequence Number=SeqID_100676
nnnnnnnnnnnnnnnnnnnnnnnnnnnnnnnnnnnnnnnnnnnnnnnnnnnnnnnnnnnnnnnnnnnnnnnnnnnnnnnntttttttntttttttttttttttcgtattccaatgaaaggagtactagtgtatatcacattaagttacaaatacaaatcaccaagaagcccaaaaaggagaggtagagagagagagaaagaataaagccgatggacatacgcacgcacgcacgcagcagcacaaatgcatggtacaggcaggatcaataaatcgatcgatcaatgagtgcacgggacaccagcaggctcgatcgtgcatggcaatgcacgacgcagcaagagatctcgtccatagatcacaaccctctgatctgaatgtgtccgatccgatggttctattatcctcctcagaagaggctgccgacgaccgcggcggcgagcgcggcggcgacccacctggccaccccggcgccgggcacggccgccgacttcttgtcctcgtccgaggcggtggagtcgtcggcgacgggcggctcggcgatgccggtggacttcttgtgcttcttcttggtcttggacttggtcggcgccggtgcgggcgcgggcgccggggtgggcggcttggggccgaagagctcgtaggggagcggcaccttgtcgacggggtagacggcgagcgggaagtccttgctgacggggctccccaggagcatggagttgacgccggtggagatgttgacgttgttgcccgcgcgcttgatgtcgtacctgtagggcccgtcgtgcccggacccctgcgtgttgaccttgccgttgagggtgccgagcatggagaggctgtagaacctgggcagcacgcagtagagcacgagctggatctggtcctgcggcgacaggccgttgagcacgccggccttgagcttgtcgaaggcgtcgttggtgggcgcgaagatggtgagcccgttgtagctgtccgtcagctgcgcgttgatctgggtgtccacgcgcgtgtcgtggagcagctgcttgaactcgctgaactggtcgtccttgagcgccttgttcacgtccgtcggcggcaacgcgtccgccgcccccgccggcccggacgccggcttcgccttcgccttctgcgccgcggccagcgccgacgacgccgccaggagcaccaccaggatagcgaggcggggcgaggcggccattgtgccggttggtgttgtgcgtgtg

SEQ ID NO: 34703 - DNA, 303 bp, Setaria italica
  Peptide Sequence Number=SeqID_100677
cagccgagtggagcctccattgacacgcacctctgatctggtgctacatagattatacgagctttcctctcttccaattcccagctctccagtcaacccgagaaccaatgccaaatcgccatcactgatgaaggcatgagctcctgagctgacagctgaggttgactccagctacgacctctgtgcgacccaccggcgacgcagtagcaaacagccgctcagcttatcccaagagaagaaagcttccattccatcccaccaccatgacgagcaccatgccgtcctctcggacgtctatctcgc

SEQ ID NO: 34704 - DNA, 619 bp, Setaria italica
  misc_feature (1)..(52): n is a, c, g, or t
  Peptide Sequence Number=SeqID_100678
nnnnnnnnnnnnnnnnnnnnnnnnnnnnnnnnnnnnnnnnnnnnnnnnnnnngaagctgaagcgaacagcccctacacttttttattgaccactgttctcgcaatccttagatatacatacagtttcttgatgacctccggctcatggttacaaacaagcactcaatcaagctaataaaagaataaacaaagctatatatctctcatcatcagaaccaataaaaaaaagtatagaagaagaagaggaggaaccaaaaaaatgtaaaccaacactctactaagtcgtacacagctacagcccgtcacgattgaaccatccttatcagaggcagagcaacactctactaagccgcgcattacatacaatttaatcacacggtccaccccccaatcaaggaatgaaggttcaagacagcgcgcccaccgatggatggacacggacgggatcagctggcgaccctgcagttggtccggatggtgccggcggtgccggtgagcactccgatggcgcccatcttgaccatggcggcggcgaagtctgcctggaacgtgtcggggctgttggtgtaggcgacgacctgggcggcggtggtcgggtcggcgaggagcgcctggtcgg

SEQ ID NO: 34705 - DNA, 308 bp, Setaria italica
  Peptide Sequence Number=SeqID_100679
cgagccgccgacgcgaagggtcgcggcggtgacgtacctccggctgtcggacgagctcctggcgggcaacaacttccgggtcttcaggaccttcgtcaggaagatgcacgccgacctggattactgtccggatccggcccggtacggcaggcccatgaggcctctggagcggtcgtcgccggagatacccatggagcggctgctggaggccacggcgccggcgccggcgctcccgttcgcccggagaccgacatgagcgtcggcggtgggctcgcggaggccatcgactgggtgctcggcaagatcga

SEQ ID NO: 34706 - DNA, 1096 bp, Setaria italica
  Peptide Sequence Number=SeqID_100680
ccgtactcctccgcgttccacaccatcctcgtcgttctcctccgcgccgctgccagctctcccaacctctcctccagggccgcctcttccctcctcctggggcccatcgaccgcggcccgcagctctccggcccgctcgaccaggccgtgcccttctccggcccgctcccagcgaagcccaccaagccgccccctcatcgtcgtcgcgaggcttctcgaggaggttccggaagccgtcgttcggcagcctgcggcggagcgtgtccgagaagaaccgcccgtgcgttgtgccgctacgccgcgaggacggcgtgcagtgggcgcacggccgcgcgggggaggaccgcgtccacgtggtggtctccgaggaccagcggtggctcttcgtcggcatctacgacggcttcaacggcccggaggcccccgacttcctggtcgccaacctctaccgcttcctgctgcgcgagctccgcgggatcttctacgaagaggccgacccggactccaagcgactgtggcagttcctggcggacggcgacgacgacgacagcgagctcgacttctcgggctccggccggttcgcgctgtcgctcgccaggctgaaggagcggcggcatcccatatgggcccacgctgctgctgctggcgacggtcaaagcggcagggagtgggaagttaagaggttgacggctgcgccggcggtgagggaccacagtgctgtactggccgcgctcacccgggcgctagctgctacagagtcggcgtacctggacatgaccaaccaatcgatgggaacccacccggagctggcggtgaccggtgcgtgccttctcgtggccctgttgagggacgacgacgtctatgtaatgaaccttggggacagccgcgccatcgtggcgcagcggcgggacgacgatgatgattgcgtgcttggaaccatgcgggtggaggacattggtgtggccttggagaccgagacaaggatccatgggtattctgcgattgggcttgaggcattgcagctgtcgactgatcatagcacaagcattgaagaggaagtgcagaggatcaaacgtgaacaatccagatgatgatc

SEQ ID NO: 34707 - DNA, 441 bp, Setaria italica
  Peptide Sequence Number=SeqID_100681
aatctgtaccttcagctacatttgaggcgagttggtgtagaacctaggccagatcttgtccaaggcttcacacaaaatggcagttctgggagttcaaaggatcagatagagggcagggacggcttcggtgatagccctggagacaatggccaccgtggtacaggtggaagtgatcatgatgttcggtattgtggatcagaatcacaagattctgatgagccgataccaacaagcacaatgtactagacagctgttcaatatatgcagaagtgggtctgaagaaaaacatggaagcgcgtgtcacagctgcatcggagtcagggttgccagtgggaaaggcggcagatggaaaggcacttctgtacgtttgtataatatgcttgccttctgtatttatatgtaggtctgtaaattggattccattccatatatgcccgagac

SEQ ID NO: 34708 - DNA, 1285 bp, Setaria italica
  Peptide Sequence Number=SeqID_100682
gacgcgatccaggccgtctcctccgccttcctgatctccccactcgccgctgccgcaacgccggcgtagcgagagatgaagggcgttactggcggcgcggcggctccgggggactacgtctacttcaagtccatcgtcccgctccacaagatctccattggacaaaaactgtggaggtactacgactttgggcccaaggttgtaccttctcttgtctgcatcccaggaattgcagggacagctgatgtgtactataaacagattatgtccctctgtatgaagggttatcgagtgatatctatcgacgttccgcaagtttggaatcaccatgaatggattcattcatttgaaaaattcttggattccatgaacatccatcatgttcatatttatggtacatctcttggtggatttttggcacaaatatttgctcaacaccgtcccaggagagtgaagtccttggtcctatcaaatacttttcttgagacacacaagtttgctgctgccatgccatggtctccagttgttaattggaccccttcttttttgctgaagcggtacctcttgacaggaatccgagatggtccccatgaaccattcattgcagactcagtagattttgttgtgggtcaggtcgagacattgtcaagagatgacctttcatcaaggttgatgttaaatgttaatgtttcatcagttgggtcattgatgctacctgattcactcatcactataatggatacaaacgactactctgctgttccccagcagttgaaggaccagttgaatgaaaggtatcctggtgcaaggcgtgctgtactgaagactggtggcgattttcccttcctgtcccgtccagatgaagttaatctgtaccttcagctacatttgaggcgagttggtgtagaacctaggccagatcttgtccaaggcttcacacaaaatggcagttctgggagttcaaaggatcagatagagggcagggacggcttcggtgatagccctggagacaatggccaccgtggtacaggtggaagtgatcatgatgttcggtattgtggatcagaatcacaagattctgatgagccgataccaacaagcacaatgtactagaagtgggtctgaagaaaaacatggaagcgcgtgtcacagctgcgtcggagtcagggttgccagtgggaaaggcggcagatggaaaggcacttctgtacgtttgtataatatgcttgccttctgtatttatatgtaggtctgtaaattggattccattccatatatgcccgag

SEQ ID NO: 34709 - DNA, 325 bp, Setaria italica
  misc_feature (14)..(14): n is a, c, g, or t
  misc_feature (39)..(39): n is a, c, g, or t
  Peptide Sequence Number=SeqID_100683
ggttgctcctcatntcccgaaagtcgacgagggcgttcnccaacgccggcgccatcgcgcgcgccgccaccgcgctggggtacgaggtggtggtcagcgagccttcgcggcagcacgcggccgccctggcctcgttcgcgcggttggtgaactcgtgcgacgtgctggtgggcgtgcacggcgccgggctggcgaacctggtgttcctgccggcgggcgccgtggtggtgcaggttgtgccgctgggcgggctggacgccatggccgccgaggacttcggggcgcccgcgcgcgacgcgggactccggtacgtgcactacgccat

SEQ ID NO: 34710 - DNA, 268 bp, Setaria italica
  Peptide Sequence Number=SeqID_100684
ctgcttgaatttctttgcatcctgactgcaagagtggtttgcgcttgcaaacacgatgaaattcagcaaggcacccttcaagaacaaagggggatcccattccattcatgaaatttcagtagaatggagatgtacataaaaatgcttgtgttgtgattgttgaaccatagaacatttatttatattcttcccaaagacagttgacgcgtaggataggaacggaagtgttccagaaagtttctcattttcaccctgttcacagtgataa

SEQ ID NO: 34711 - DNA, 399 bp, Setaria italica
  Peptide Sequence Number=SeqID_100685
cgcgatgagcacggcggcgaggaagttggtgagggagtagtccaggtaggtgtgctgcggcagccggccacggcgctccagcagcgtcagcagggccggccaggtgcccaggaacaggagcgacgccagcatcagcgcgatggcgccggccttgtcctcgatcaccagcatcttgagggctcctcctgcgatcaccttgtcccaagcgagcaggggagaagacgcacatgcgacaacgctgtccacggccattttaagcgtctagctagcggcggcaagtgcgaagcggccgctgacgcaaaaactctggcgagatccttcttcctatcactgaggggaaaaaaaagggtcccgacctgataagttgatatcaatggagttttcaactcgtgcggcgca

SEQ ID NO: 34712 - DNA, 517 bp, Setaria italica
  Peptide Sequence Number=SeqID_100686
tgttgtccttatttacctacctacctattgtcttggtagtcttgtattaaccttctagttctaccgtagtaggtccctactattacgtcccacgcgtactgcgtcgacaggttcccaacgctgagcaccacaccgcctgccatggcgaatagcaccgaaggccagttgtcctggctgagctgggtgaaaaagttgggcatgccatccttgctgttcccgagttggccgaaggtgagcgcaatgaggacggcggcaagggaggttggtgatggagtagtcgaggtaggtgtgctgcggcagccggccccggcgctccagcagggtgagcacggcaggccaggtgccgagaaacaggagcgacgccagcatcagcgcgatggcgccgcccttgtcctcgatcacgtacatcgtgaggccggttctgacagaggacagggagctcaggagagggccttcaagcacctcgtggcaagtgagcggagaagacgcacatgcaagaacatggtccatagccgtt

SEQ ID NO: 34713 - DNA, 1027 bp, Setaria italica
  Peptide Sequence Number=SeqID_100687
aggccgatgccgatgacgaagcaggagatggagaagtagaagaaggcggtgtacaccaccaggtgcggcacgccatccttaagggtgtgccactggtcgttggtggccaggttgaacgccggtgagaagagcgagaagcacacaccagagaagaagacaatgccaagcccaatgaaggtgcttgatccgaagaccttaattgatcgccgctcctcgagctcaatgagatattctgccgtccctgcctcagctttggtaacatgcttggttccagaggctccattctccaagtccttgggagtgtctttgtctaggactcctttacttggttccacacttccatttgccccaagtttgttggaggcattgagtttctccgcgttatcggtggcattggaggcatggacagcggagccgaggatgacagcaactaggaagcatgccacaccggtgaacagaatctctgccctgttgatgcggttgtcaaggaagtagttcagtgtcgtgcctattaccaccaccatgctggagctgataacctcagtcaccgagaggcccacatacgcccaggcgtactgcgtcgacaggttcccaacgctgagcaccacaccgcctgccatggcgaatagcaccgaaggccagttgtcctggctgagctgcgggatgaagttgggcatgccatccttgctgttcccgagttggccgaaggtgagcgcaatgagcacggcggcgaggaagttggtgatggagtagtcgaggtaggtgtgctgcggcagccggccacggcgctccagcagcgtcagcacggcaggccaggtgccgagaaacaggagcgacgccagcatcagcgcgatggcgccgcccttgtcctcgatcacgtacatcgtgaggccggttctgacagaggacagggagctcaggagagggccttcaagcacctcgtggcagtgcttgtcgctgctataagacggctatggaccatgttcttgcatgtgcgtcttctccgctcacttgccacgaggtgcta

SEQ ID NO: 34714 - DNA, 1909 bp, Setaria italica
  Peptide Sequence Number=SeqID_100688
ttttttttgagaaacttcttgaacaatttttcagttgctatcctttctgccgcaaatattctttggaaagaacaggaaaaaaaactatcatacatatagttctatactttttaagttatcatggaatcgcaccacaagcatttttatttacatctccattttattttaaatctcatgaatggaatcccccttgttggttcctgaagcagcgcccttgccttgttgcctgaatttctttgcatcctgacggcaagggtggtttggcgcttgcaaacagaagatgaacatcatttgagaagcataaggggtgatcactcgttgcccctgtgacctgacgaagccatgagcaccgcgacggcagtgatgaacatgaacagcatgaacccgagcaggatgtaagtcctccgcgacgacctccggtactctccgaacagaacgacgccccagaacgtgctcacaagcggcaatgcctgaacagcatcagcagcagcgtagccagcagcctggccgcccatgaactggagcccatttccgaagccaccgatcaggccggctaggagggcccactgccggcctttccaatcgttgatgtaggccctgaaggaggacttgggcgcgccggccatcggccggtaaaggagcaggatgttgaggacgacgttgatgacgaagcaggagatggagaagtagaagaaggcggtgtagaccgccaggtgcggcacgccggcggggagggcgtcccactggtcgttggtggcaaggttgaacgccggggagaagagcgacaggcacacgccggagaagaacactataccaagcccgaagaaggtgcttgacctggataccttgatggaacgccgctcttcgagctcgatgaggaattctgcagtgcctgcctcagctttggtgacatgcttagttccagaggctccattctccaagtccttgggagcatctgaaattgaagaaattatggaaagttacaatttgcaagaaatgatcgtcataagcagcagcagcagcagctcttccgacataattggataacattcctttattaagtgcttctttgcttggttcctcactttcacttgccctaagtttttcctcgttgtcagctgcattggaggcatggacagcggagccgaggatgacggcaacaaggaagcacgccacaccagggaagagtatctctgccctgttgatgcggttgtccaggaagtagttcatcgtcgtgcctatcactaccaccatgctgcagctgatgacctcagtcactgacagacccacataggcccaggcatactgcgtcgacaggttcccaacgctgagcgccacgcctccggccatggcgaacagcaccgaaggccagttgtcctggcttagctgcgggatgaagttgggcttgccgacgaccgaccgaagactaggaccgaaaggtagaagaacggaaagaaagaacaaacggtaacgtaagttcccgagttggccgaaggtgagcgcgatgagcacggcggcgaggaagttggtgagggagtagtccaggtaggtgtgctgcggcagccggccacggcgctccagcagcgtcagcagggccggccaggtgcccaggaacaggagcgacgccagcatcagcgcgatggcgccgcccttgtcctcgatcacgtacatcgtgaggccttctcctgcgatcaccttgccggttctgacagaggacagggaggctcaggagagggccttcaagcacctcgtggcaagtgagcggagaagacgcacatgcaagaacatggtccatagccgtcttatagcagcgacaagcactgccctcgcgaaaaaaatccgctagcaggccactgactgaaaagtccaacttgatctgcggtgatttgactcgcacagcgaacgcgag

SEQ ID NO: 34715 - DNA, 624 bp, Setaria italica
  Peptide Sequence Number=SeqID_100689
gcccgccgacctcaccagtcaccacccaatccccacctcccaccttcgcggcggcgttctatggcctacacctcctccctccacctccccaagctcttgctcctccccaacccccgccggaccaggcacaggccctccttcgtccccgccgccgcggccaaggccagcggcgtgaacgggcacgcgccgcccgagaagccggcgcccaacggcaaggcgcacatcaacggcgtgaacggcaagaagggcgtgaacggcgtcaacggcaagaagggcgtgaacggccatgcggaccggatccacctcacggtgagcacgggcggcgggggccaggacggcaccgggctccgcgtggcgttccagggcgcgccgggcgcgtacagcgagttcgcggccaagacggcgctgccagggtgcgacacggtcccgtgccgagcgttcgcggacgcgctggcggccgtggagcgcgggggcgccgaccgcgccattctccccgtggagtccaccatggagggcaccgcgctgcggaactacgacctgctgctgcggcacgacctggtggtggcgcaggagatcaacctcttcgtgcactactgcctcctcgccatgccgggcgtccgcgcc

SEQ ID NO: 34716 - DNA, 240 bp, Setaria italica
  Peptide Sequence Number=SeqID_100690
aagttgggctaggaggctaggcctgcctggctgtctgttgagggtgccatgtctgttgaacgagaagaaacggtgacaaatcgattcctctgctacaggtatccgcgactgcacgcgagcagtagatgatcaagaacaaggccgaacatgatcgggtggatgggacggcagcacagtaacatcaagagttgccgatcgagcttctttttatttttcgcaatggaacgctcatccaatccg

SEQ ID NO: 34717 - DNA, 580 bp, Setaria italica
  Peptide Sequence Number=SeqID_100691
agcctcactccgaagtccgaaacatgctctcccctaccagctgaccgtagcagcagccgccagccgccgcaggaagcgccgagcagccaaccaagccgccggagcccaaagggttcttgctccccatttccgcaattggagccacctgcttccgattcctctttctgcgctcgtggggttgtcgaagcgtcagatttcttgcttccccgcagcaatttggctggcgtccgagcggcggcgggcggcagctggtagtttccatggttcttggtttgctgttggggtggaggagatagcacaagggaggagattgggggcaggctaaccgaggtcgggggggactggcggcggggcacggccgcacgggatgatggagccccaggtggtggacctcgaggatgatagcatcaacttctgggcctccctcggcgtcagcccccatgtcgaccagatgccgctgcacaacgtccacatcgtcgaccaccaggctcagccaccgccggccgccgcggcggcgcagccgcagtcagtctgcagggacctcttcccggtcgagtccgacgcctggacggagcctcgg

SEQ ID NO: 34718 - DNA, 577 bp, Setaria italica
  Peptide Sequence Number=SeqID_100692
catcttcgtgacctcattttggcacaaaggacaggttcattacttgtacgcgaccttgaaaaggaggttggctttgtccaaaaatggaactttctttcgcttatcgagcgccatcccaatatcttccatgtctctggtggaagtgcttcccgagagcccattgctgtcacgcttactgagaaggccagaaggatatcaaatgaagaggatcgagcacgagagctaatggagccaatcttggtgaaaaacctaaggaagttactgatgatgtcaatggactgccagattcccttggagaagattgagctaatccagtctgaactgggcttacctaagaacttcaagaacaacttgcttccaaggtatcctgaatttttttcaatccgtgatgtgaagggattggactatttgtgtctagagaattgggactcttcactagcagtcacagtgcgagaagaaaaaataaattttgagggtttccagataggctgtagagggattcctaaagatggaaatatcttgggtccttttgctttcaagttgaagtacccagcaggattcaggccaaaaccggaag

SEQ ID NO: 34719 - DNA, 410 bp, Setaria italica
  Peptide Sequence Number=SeqID_100693
ccctgtgcagtttgattcctgagatgcaaatagtaggctatttggcatggcggaggatataattttacttctttttgcaggattttaagcacaacatgctggttctttatgtgcactcatgaatgcttgaacctggagtgactacatagcttggtattcatacaacataaatgacgggaagaagattggcagggcatgagtatttgagtcccagaaccatttacttcatacaatggaagtctatgtcatcattctcagctggtcatggacgccgacccaagaagaagctatatcaccgtgagcctggtcttgacaaggccatggaccttcaaaagaagcctgccctcctccttcatcttcgtgaccttctattttcggtctgcacaggggtatcatatgtacgcgacctt

SEQ ID NO: 34720 - DNA, 247 bp, Setaria italica
  Peptide Sequence Number=SeqID_100694
taatctacaaatgaacaaaatttgcaagttatcatcagtcccaatgtggaggaaatttagagtcacaatagtgaacattgtcatccatctcaaacgaagaaacttccaagattctattgtatggtttttgttgattgaaggaatggttaaatttgcatgagttgtattgaagaataattggcaatgtaatagctcactaggtgaactgagaagttggtatgagttggttggtgatgtaactactaca

SEQ ID NO: 34721 - DNA, 243 bp, Setaria italica
  Peptide Sequence Number=SeqID_100695
tgccacagcttgacctcgacgccgtcgacggacgcggcgccttcttgatctcctccgcgagcgtcgcgacgtggccataggtggagtagtacacgatgtagatcttggtcgccatggcgagagacggccttggcagcttgttggagaagaacaggaggagattggatcggcggtagctttgagcaggcaggcaagagctactagaagagtactaggggtatagcttcgagcagtggtgtgctg

SEQ ID NO: 34722 - DNA, 372 bp, Setaria italica
  Peptide Sequence Number=SeqID_100696
ctttcctgatttcctctagtccgtcggcgaatcctgaactcacgttcaaaggagaagagtggcggcggcggcgtctgcgcaacggcgtagctctccctctgtcccgccgcgcgcgcctcgccgccttgcccgtcgtagtatttgcgctcgtacgctcctgatccagctcaaagggggacatgtcggcgtcggatcttcccgacgagctgtgggcgcgcgtcctggagctgggcgctgcgtcgtccgcgctggggtttcgcgacctctgctgcctcgccatagcctcccgccgcctcggacgcctctccctccaccccgccctctggtcggcgctcttctcccgcgacttcccctcccaatcccaaccctcgt

SEQ ID NO: 34723 - DNA, 383 bp, Setaria italica
  Peptide Sequence Number=SeqID_100697
ggagaagtcaaatgtcgtgggcggcggcggcggcgagaaagctcgccggaatctctcagtcgagcgatccaccagccttgactggtggtcttctctaccgctcctatggaagcggctccagcggaagccgaaagagatcgctgccttggagggtcgtgtcgatcggtgccatcagccttgctggggggctcgtgctcagcgccgttaacgacctcgccatcttccatggatgtacaactaaggcaattgagaaggcggctgacaacccaaaggttgtcgaagcaattggagtgcctatagtcagaggaccgtggtatgaagcttcgcttgaagtgggccatcgacggagatctgtttcatgcacattccctgtatctgggcca

SEQ ID NO: 34724 - DNA, 392 bp, Setaria italica
  misc_feature (356)..(356): n is a, c, g, or t
  Peptide Sequence Number=SeqID_100698
cctctttctttttcaaatgaatccccgtactccctttgtgatacaatagaacatttacattctttaatccattgacccgtgtttacaaatacaatggtcctgaagtgcagaattgataaaatgccaacctgacacacaccttgagatctactcgttgggatcaaggaatccgacaaggcacttctccaagaggaactctgcatttacccaagcatggtatttattgaacaaagcagtgcagtcctttccagcagctttcataagcatatcaactcctccaggatgaaatttcatgtatggagcaatattgtaaacacggcctttaagaactgtccaaatacaatctccagttttangctgcttaacttcttccaaaagaaattaaccttcgg

SEQ ID NO: 34725 - DNA, 884 bp, Setaria italica
  Peptide Sequence Number=SeqID_100699
cctcttctttttcaaatgaatccccgtactccctttgtgatacaatagaacatttacattctttaatccattgacccgtgtttacaaatacaatggtcctgaagtgcagaattgataaaaatgccaaccgctcctatggaagcggctccagcggaagccgaaagagatcgctgccttggagggtcgtgtcgatcggtgccatcagccttgctggggggctcgtgctcagcgccgttaacgacctcgccatcttccatggatgtacaactaaggcaattgagaaggcggctgacaacccaaaggttgtcgaagcaattggagtgcctatagtcagaggaccgtggtatgaagcttcgcttgaagtgggccatcgacggagatctgtttcatgcacattccctgtatctgggccacacgggtcaggatctttccaaattgaggcgacccgaaatggagaggatggaatgctttcctttctgcggcatcatgactgggagattcttaccatggaggctcatctgcatgtaccttcagatgatgagcagcagaaaacgttggtgaaggttgcaagcaatggcagtgctcaatctggggagcctgagtgagagttaagctgccatattctcatatcatcagatcctttgtacgaaggtgaatcttgcaatcaatggcagtgcgcaatctggggagcctgatagttaagctgccatattctcatatcattagacccttgatatgctagtgtagcttttcaaaggtctggtcattggtcaatctatgtgcttggtatgtagtagtactgaatctgatagatggctgactaaatctgatagatggctgaattcatccaaagacttaagttaattaattaattagtttaacta

SEQ ID NO: 34726 - DNA, 402 bp, Setaria italica
  Peptide Sequence Number=SeqID_100700
tagcccatccgcccaccgcagccatggcgcagcccgtggagagctcgttgctcctgttcttggtcctcctctcgccgttggtggcgtcagctggcatcgccaagctcaactcttcttcgcccctgtttggcatcgagttcccgccgttcaacaccgccgtcagcgacaccggctgcgacggcaagctggtggtagccgaggaggcgagggatgagcagacgcagccggcgagcctatccccatcgctgaagctgcagatgacccgtcgcgccgcggcggcgggctggacgcggaaagactcgttcttggattcggcccagaaggacgcggtccgcatcgagacgatgcaccggagggcggcggcacgggccggcggcgagcgggcgtattccccgcggcgcg

SEQ ID NO: 34727 - DNA, 508 bp, Setaria italica
  Peptide Sequence Number=SeqID_100701
aactggagcctagggtaatttgtgattgggacacaatataccaacttggttggcagacaggaagaaattggaagcattttgattacagagccagtcaactgtaaacttgttgtgttcttctttttggtggcaatgtgtaccacagcagcctcagtccagaagagtgtaacccaattttgaaatgtacaaaccgagaattatattaacagtcataccttttatttatacttatctggcaaagaagtaattttatatgttttctgttctataagtgtttgttatggtaaattccagatgccctttaatctgcattccctattggagattaattgtcaacttgtcctggatatacttgatagtactttgcacagaagcagaactgacatagtacactttcttttcagaattatgagttcatgggagtgaaaccagatataagaaaatcctgcttgcttttggggataaataagatttaatacttgggtgagagacaaaaggacaagtgcaa

SEQ ID NO: 34728 - DNA, 1705 bp, Setaria italica
  Peptide Sequence Number=SeqID_100702
ccgaacaaagcgaaccttccttctgttattcctttgtacacaatcaagcccccacgagcaattcatcactatgcacagtacatgatgtacacacattattaaacttgaagaaataacacgaatcacatgctcctgtaaacacacaacacactgtacgctaactgttcacatactgcaatggccgtacgcctgaatcgctacaggcaacgacgtacacgaggcctacgctacggatacacttccacaagacaataccgtaatgctctgctccactagtccaacgaggccaacggattgaccctgccagcctgtaatcgcggcgactcctctaattactacgaagcccaaccgggaacacgtaccgctggtcgatttcgcggtcaggcggtgccctcgacgcgcgccttggtgacgccggcgcaggcgtcgacgaagtcgccgtcgatgaagtcggtggagaacacctgcagcttgtcgccgaggcccttggcgaagacctccgcgatgaagaggcgcgcgtacccgtggatgcgcttggtgaccggccacacgcacagcaccgggttgtctgccttgggcgtcaccgtgttctccacccggtagaagaacctccggtccgccaccggcggctgctgccccaggaacttgacgttgctctcgaacttggtctccggcaggtccgtgtcgatccagttgtccttgaggtaccccgcgctccacagcggctccccgggcttgggcgccggcgacttgcgtggcttccacacgcatatcacccgccgcgggagcagctccgcgatggtcttgtggaacaccgcctcgtcctgcgggatcaggttctcctccccgagcttctccaccaggaacttggcgaactcgggcgggtcctcgtgcccgaactctgtgcgcacctcgaggatgaccacctcctgctcggtctcgcccaggaaccgcctcacgtcgtcgagcacgacatcgacggggtacgtggccaggatgccgtggcagacgcggcgctcctcctggacgcgcacgtcgatgacgcgcgtgcccatggacagctgctcgtacacggacatggactggcaccgcgcgaaggggcgggtcaccagcgggacgccgatcttgttggtggccgagtcgtgggtgcccggccacaccacctggtgcacgcgcaccctgtcggcgcccagctccgccatccacttcttccggtccgccggccggtggtcggagcccgggaacgtgtcgccggacgacgacaggcgcgtggccagcgcctgcttctcggtggtgaccagcttccgccggtcgacctgcttcgcgaagaaggcgcccatggcttccagcgggttggtgccgttcttgccagagctattggaggcggccattataaatataggatcctcgcctcgagctctgacctggacgacgacgtcgctgtaagctggggatcgattgattgatagcaagacaaacaaggaagaatatatcagcgcgcggggttagccagccaacatgtgccgatggttgatctgtaggggctttggccttggctgatcgatccggatcggaggaggaacggggaagcgaggcgtggtgttcttgcgagctccgcagctgtttcctcaaagatttcggtttcgttggatggtccgattggcgttaggtgaggctatgctgctgcctgctgggaaccgatggc

SEQ ID NO: 34729 - DNA, 1226 bp, Setaria italica
  Peptide Sequence Number=SeqID_100703
ggtgctttgggtacttctgatctctccccctgtttgatgtatctgggtttttgccttgagttccagcacgtactgcaggggttcctgactttggaccaggtttcactccaagcttgttcgaatttttctttttgaaagaatcttttgcttctctaaatccttgagtaagaaaggtatccctctcgcatattttgtacacttctccagagtagaacaagcaatgctcaagcggaacaggccttttgttggtcgaagtgacacgaattttcttctgctttgttcgaccaatccagtcagcaaattcaactgtatttggaaccgttgccgaaagaagaacaatgttaatgtgcttcgggagcattataataacctcctcccaaactacacctctttcagcgtcgtttacataatgcacttcatcaaagattacccattcaatatcgcgtataatgtccgcacctctgtagagcattgagcgcaatatttcagtagtcataattaaacaagttgcctctggcctgatactgacatctcctgtcagaagtcctacatcaaacttcccagagaaatctcggtatttctggttgctgatagttttaataggagcagtatagacagcccgagtacaatgttttgttgctaaagcaaatgcatactcggcaacaactgtctttcctgctgaagtatgggctgcaacgaagactgattcacccttctcaagataatatatagcctccttctggaacttatctaattcaaatggaaattcaattgccatatcaggaacgagtttgtagaagttagtcacaatgtcttcgtccccgccaacaagtgcccaaaccttgccatcctgtgttggcttgtcatcacctgatacacctgattctcttcgtgcatattgaacttcagcagatagcattagatccaagtctgtttgagttccaggatcatcacttatagcatctacttcatgtttctcagcatctagcttggttacggtctcagaagcatcttgcaatgcatcaactttttgttcgccaactccttcagttccctcatcttcagctgattgttgaacatcatcctcctgtaacgccttgttggcggcatcttcctcccaagctatcttgaaaagatcatcaaactgcaccgagtatttttccattgtatcattcgatgacgatgcaggttgctcctctacaagttctccattccggaaacactta

SEQ ID NO: 34730 - DNA, 1799 bp, Setaria italica
  Peptide Sequence Number=SeqID_100704
tgattgaaaggggaagggaagctttggaagaaataaatgttagaatggggcttgcttttgatgaacaagatatcaaatactacacccaccttttcagagatgacatcaaacacaatcctactactgtggaactttttgatatagcacaatccaacagtgagcacagtagacattggtttttcaatggtaaacttgtgatagatggagaaaccatggctagaactatgtttcagttagtgaagagtcccttgaaggccaaccccaataattctgttattggatttaaggataattcaagtgcaatcaaaggatatcaagtaaatcagttacatccagcactaccgggttccacttcaccactatcccttatgatgcgtgagcttgacattttatttacagcagaaactcataattttccatgtgctgtggcaccttatcctggagctgagactggtgcaggcggtcgtataagagacacacatgccactggacagggttcttttattgttgcttccactgctggttattgtgttggtaatcttcgaattgaagagtcatacgcaccctgggaggattcatctttttcatacccatcaaacttagcctctccattgcagattcttattgatgctagtgacggcgcttctgattatgggaacaaatttggtgagcctttaattcagggttttacaagaaattttggtacaaggttaccaaatggagagcgtcgtgaatggttgaagccaataatgttcagtggagcaatcggacagattgaccatgtgcacatctcgaaaggagacccagaaattggaatgctagttgtcaaaattggtggtccagcctacagaattggtatgggtggtggtgctgcctcaagtatggttagtggacaaatgacgcagaacttgatttcaatgcggtgcagcgtggagatgctgaaatggctcagaaactgtatcgtgttatcagggcatgtgcggaaatgggagaaaagaacccaatcatcagcattcatgaccaaggagctgggggtaattgcaatgttgtgaaagaaataatctatccaaaaggtgctgaaattgatatccgctcaattgtagttggtgatcacacattgtctgtcttggagatctggggtgccgaatatcaggaacaggatgcattattggtgaagcctgagagcagaagattgttggagtcactttgtgagagggaaagagtatcgatggctgtcattggggaaatagatggcagtgggaaaattgttttgatcgatagcgttgctgtggaacaagccaagttgaatggacttcctcctccaccccctgttgtggaccttgagcttgaaaaggttttaggagatatgccccagaagacctttgaattcaaccgagttactcgattgggtgagcccttagacattgcacctgaggtcacgttaatggatgttctgaagcgagttttgaagctcccttctgtatgttcaaagcgtttcctaacgacgaaggttgacagatgtgtaacaggtcttgttgcacaacagcagacggttggtcctcttcaactaccacttgctgatgtggctgttattgcgcagacatacacagatctgactggcggtgcttgtgccattggagaacaaccaataaagggcttgcttaacccaaggccatggcaagacttgctgttggggaagcgattgaccaatctggtctgggctaaagtcacatcccttgctgatgtcaaagcgagcggtaactggatgtatgctgcaaagcttgatggagagggagcaa

SEQ ID NO: 34731 - DNA, 2419 bp, Setaria italica
  Peptide Sequence Number=SeqID_100705
aaccttacgtacgttaaggaaacgctttgaacatacagaagggagcttcaaaacgtttcctaacgacgaaggttgacagatgtgtaacaggtcttgttgcacaacagcagacggttggtcctcttcaactaccacttgctgatgtggctgttattgcgcagacatacacagatctgactggcggtgcttgtgccattggagaacaaccaataaagggcttgcttaaccccaaggccatggcaagacttgctgttggggaagcattgaccaatctggtctgggctaaagtcacatcccttgctgatgtcaaagcgagcggtaactggatgtatgctgcaaagcttgatggagagggagcagatatgtatgatgctggtgttgcgctggctgactgcatggttgaacttggcattgctattgatggaggaaaggacagtctatctatggcagctcaatgtgatggcgaagtagtcaaggctcctggaaatttggtgatcagtgcatatgtgacatgtcctgatataactttgacggttactccagatttgaagcttggcgatgatggagtgttgttgcacattgaccttgctaaaggaaagcgtcgacttggttgttctgcactcacacaagcctttgaccaaattggaaatgactgcccagacattgaagatgttccctacttgaagaaagtctttgatgctgttcaggaattactcagcgaacgccttatttctgctggtcatgacatcagtgatggtgggctcattgtcactgttcttgagatggcatttgctggtaactgtggtgttaacctgaatgtaggcttaggagattatgatcttttacaagtactttttgcagaggagcttggcctcgttcttgaagtgcactcaaatgaccttgatgttgtaaagcaaaagcttcatgtggcaggtgtctccgctaatgtaattggcaaagtaactacagcaccagatataggtcttgttgttgatggtgaggtgcgactgaaggaaaaaacttctgatctgagagatctgtgggaggaaacaagcttccagcttgaagagcttcaacgtttgaagtcttgtgtgaagcttgagaaagaaggcttaaaaagccgaacgtcaccttcatggcgtttgtcttttactcctaaattcacagagaagaaaatattgaccacagccacaaaaccaaaggtcgctattattcgtgaagagggtagcaatagtgacagagaaatggctgctgcattccattctgcaggttttgaaccatgggatataacaatgtcagacctcttgactcagaaaatttctctaacagaattccgtgggcttgcatttgttggtggttttagctatgcagatgttctagattcagcaaaaggctgggctgcatctatcaggttcaaccagcccctcatacaacagttccaggagttctacaataggccagacacattcagccttggagtttgtaatgggtgtcaattgatggcacttcttggttgggttccaggaccagatgttggaggttcccttggtgtaggtggtgacatctctcagccgaggttcatccataatgaatctggccgtttcgagtgccggtttaccagtgtagctataggggattctcctgctataatgttcaaaggtatggaaggctctacgttgggcatttggagtgctcatggtgaggggagagcattcttcccagatgaaaacattttatctggtgttgttaagtctaatctagctcctctgagatactgcgatgattataataacgtaacagaggtttatcccttcaaccccaacggttctcctcttggtattgcggccctttgctcccccgatggaaggcacctcgctatgatgccgcaccccgagcgttccttcatgatgtggcagtatccgtggtatcccaaggattggcaggttgagaagagtggccccagtccttggttgcggatgttccagaatgcacgtgaatggtgttcataaaaagcgtgcagggaccaaaattgatagcccatatgatgctatgaagcatgatgaactttctgctgcagaactgatgtgctatggatgatctaattatgtttgcacctatgttaaagtatcagagtatttcaataattaagcgccaaggactggtggccaaggaagcgttgtttggataacttaagttgtcgcgttgagcatggcatgtgttattttgaatatgaggatatacctcctgttctgttagtcactttgcccgataattatatgccctagtaacaatgtaactaccagttttacgggaaccatttgcatgcccgtgtaacacgaatttttgatcggttgaaccagatggtgctccacggctcaatcatgatcgtggcaaaacttttgcttaagctcatttgact

SEQ ID NO: 34732 - DNA, 736 bp, Setaria italica
  misc_feature (271)..(271): n is a, c, g, or t
  Peptide Sequence Number=SeqID_100706
aggtatctgagcatgcccctaatgagtgaatcactaaagattgtgtctttcagaaatttcacatgacaaacgacacccacaagtacacatacaactgcatgggtgaagccacaaagtacctttcaagcaatttctacagttgaatttggacaaagtaaactattcctcaaagtacacccacacacccagttaatagcaggagctttattcttccctaaagaaataagtacttgcaaaagcttgaaaaatgtaagaagcaagcattgaattntgttcttatttaagtacagatagtcagtgggaaaaggctgcatccagaaaaagcattctgcttgccaaggttttactgttcacttgatgaggcttaaaggtgggagtagcattccagtcacagtttcgtaaaaccatcaaaacaaagcgcgagtactagtgagtatgctcaccaacctttttcactttgcaatcagattgcgatcagcatagccttggtccaagcaaaactcatatagctcttttgatatttccttccttcgatagtaaagatcgtatatgtagcgactcttctgatgagaaatacggaagatgggccatagagcttcacacttcctcttcccatcatgtggatcattttcagctgcaagagaaaatcacattactactcctatcagagaaaatatgtgtactaaaagatccacatataatacactaagttcacaccttccctcattttggccta

SEQ ID NO: 34733 - DNA, 542 bp, Setaria italica
  misc_feature (32)..(32): n is a, c, g, or t
  misc_feature (39)..(39): n is a, c, g, or t
  Peptide Sequence Number=SeqID_100707
ttttttcaataggagctcaagtataacaagcntcttgancggattagttttttgagattattttttaacgaagaaccgaaaagacttttaattaatcgccgctggcacaacccttgcatccgcaatggacgcattctatcactttctcctccctgaggtgcttggggaccctacagacgcaagtggttgcaaagttgtggtctcgtgtttgtatgcatcggaggcaacagaggcgctcataacctggctttttccactttgcaatcagattgcgatcagcatagccttggtccaagcaaaactcatatagctcttttgatatttccttccttcgatagtaaagatcgtatatgtagcgactcttctgatgagaaatacggaagatgggccatagagcttcacacttcctcttcccatcatgtggatcattttcagcttccctcattttggcctccaaatcacaaagtgttggctcaataagctcccatccttcacggatatttcacacggcttgtcttatcttagcatgtctcaaatctcga

SEQ ID NO: 34734 - DNA, 935 bp, Setaria italica
  Peptide Sequence Number=SeqID_100708
tcaaaatacaacgagacatatccagcgagcagcgactgcgttctgacattattttccaaccacgagatggaggaaactttaatcactgctggcacgtctcgacacccacaccattgcacaagctgtaatcacctggttgtacgatgtttgttttcaacttttcaataggagctcaagtataacgaagcatcttgagcgattagttttgagattattttccaaccacgagaccgaaagcttttattaatcgccgctggcacaacccttgcatccgcaatggacgcattctatcactttctcctccctgaggtgcttggggaccctacagacgcaagtggttgcaaagttgtggtctcgtgtttgtatgcatcggaggcaacagaggcgctcataacctggctttttccactttgcaatcagattgcgatcagcatagccttggtccaagcaaaactcatatagctcttttgagttttgcttggaccaaggctatgctgattgcaagtagcgactcttctgatgagaaatacggaagatgggccatagagcttcacacttcctcttcccatcatgtggatcattttcagcttccctcattttggcctccaaatcacaaagtgttggctcaataagctcccatccttcaggatatttcacacggcttgtctttatcttaggcatgtctcaaatctcgaggttgggactggcgaggaagacgggctcggagagaggtcctccgacggcgacgacggcgtagaagagatcggccggaatcaacgtcagcaacggcggggatgttgaggaccttgccgaatgacgaggccgcaaccggagatggcggtgggttcgtcggcggcggcggaagcggagatcgtcggctcggtcgggactggcggcggggaacggaggagagcgacggagccgccgggtttggt

SEQ ID NO: 34735 - DNA, 907 bp, Setaria italica
  Peptide Sequence Number=SeqID_100709
tccaggttatgagcgcctctgttgcctccgatgcatacaaacacgagaccacaactttgcaaccacttgcgtctgtagggtccccaagcacctcagggaggagaaagtgatagaatgcgtccattgcggatgcaagggttgtgccagcggcgattaataaaagctttcggtctcgtggttggaaaataatctcaaaactaatcgctcaagatgcttcgttatacttgagctcctattgaaaagttgaaaacaaacatcgtacaaccaggtgattacagcttgtgcaatggtgtgggtgtcgagacgtgccagcagtgattaaagtttcctccatctcgtggttggaaaataatgtcagaacgcagtcgctgctcgctggatatgtctcgttgtatttgatctccgttgaggacacagtgtaatcggttgatttcaaattgtgcaatgtattgtaaaatcaagtgactgttttcattaagtttacaaatatttgtgcaaaaaaaaaacaaaaaaaaaaaaaaaaaaaaaaaaaaaagaacgtaactagtaagggtaccccaaagacaacctacagggaggagaaagtgatagaatgcgtccattgcggatgcaagggttgtgccagcggcgattaataaaagctttcggtctcgtggttggaaaataatctcaaaactaatcgctcaagatagcttcgttatacttgagctcctattgaagtaagtagaacaaacatcgtacaaccaggtgattacagcttgtgcaatggtgtgggtgtcgagacgtgccagcagtgattaaagtttcctccatctcgtggttggaaaataatgtcagaacgcagtcgctgctcgctggatatgtctcgttgtatttgatctccgttgaggacacagtgtaatcggtt

SEQ ID NO: 34736 - DNA, 161 bp, Setaria italica
  Peptide Sequence Number=SeqID_100710
tttagcagacagatcactaaagctactgtacctaccacatgcatgaacagtgcaatctgtccaatgtggacagattcaccaaccaagcacggtgggaagtgggaactaaaaacattttagaaacattaaggtgccaccagggggcgacggattgactccag

SEQ ID NO: 34737 - DNA, 460 bp, Setaria italica
  misc_feature (443)..(443): n is a, c, g, or t
  Peptide Sequence Number=SeqID_100711
tttggtgttggtagctagtaccaccaatttctgggatcttgtggcaaggggtgttccactcaccacaagatcccagaaattgagtttctaggagaattaggcgacgagtggaaacaatcaccatgccttcagccaagaatgaattgcctaccgacagccaaatgatgggagggacgatccctgacccggagctgataacgcccggcagcttctgccggttgtcgccagttcctagcattcggctgtccggtaacccctctagtcatgctctgaggaggtcacaacagccctcagaagctgttggccacttgaaggggttaccgccatgctcaccgtccatgatgctcgggagcggggtgaaaaacggagtgcggaggtgatcaaagctgtggtagtgatccacatcttcatgatcgtatatgcttgacacctccgagcccganagactgggagacgctgc

SEQ ID NO: 34738 - DNA, 266 bp, Setaria italica
  Peptide Sequence Number=SeqID_100712
tagttgagcctccatggaagaacacagattcgtttctttcttttgtttagttataatcaaagtagtactaagaataactttcctccttgtccatgttctggtataaataaagaaatcttctttttcttgccaaacgcgacaggcggcggcggagctggcgagggagaggatcgtgatcggcgtctgcgacggcccgatgctcgccaagaaacagtatgccgacctcatacagccaatcgagaagcggatggaaaatgtcaaggatt

SEQ ID NO: 34739 - DNA, 605 bp, Setaria italica
  Peptide Sequence Number=SeqID_100713
gggccgtggagggcgccgaggcgggaggcgaggaggagaggggaggcggcgggtgaggtggggagcggaggcatctttgaccggctgcaccagggtcaccatctcttcctcaaggcggcggcggagctggcgagggagaggatcgtgatcggcgtctgcgacggcccgatgctcgccaagaaacagtatgccgacctcatacagccaatcgagaagcggatggaaaatgtcaaggattatattaagtccatcaagtgatccaaatttcaaaagaacatgttttgttatgttagttagctgctagtgtatgtagctcagtagggatgcccatcctgaagctgcaagcatcaaaacccacggacaaacattttttgttgttattatctacaactccctaacattcttttctaagacgacatcttgaaggattcatggacatcgtccatcaagcctgatcttgaggttcatgcagagccgatcgtggacccttacggcccctccattgttgaccaaggtcttgaggccatcattgtcagcaaggagacatttccgggagggctcgctgtcaacaggaggagggcagagagaggcctctcacaactgca

SEQ ID NO: 34740 - DNA, 333 bp, Setaria italica
  Peptide Sequence Number=SeqID_100714
aagtaaagtaaactaaagaaaataaaactttacctaccttagtaccatatgttctaggtaataaataaagaaatcttctttttcttgccaaacgcgacaggcggcggcggagctggcgagggagaggatcgtgatcggcgtctgcgacggcccgatgctcgccaagaaacagtatgccgacctcatacagccaatcgagaagcggatggaaaatgtcaaggattatattaagtccatcaagcctgatcttgaggttcatgcagagccgatcgtggacccttaccggcccctccattgtgaccaaggtcttgaggccatcattgtcagcaagga

SEQ ID NO: 34741 - DNA, 1008 bp, Setaria italica
  Peptide Sequence Number=SeqID_100715
tcctcctcctccggtttgtttgttgcgcgcgctgcctcgccggggcgtgtgcgtaggccatggccatggaggaaggatcaaggggaggagaggaagaagccgcggccgtgaccacggtggctgatgccgctaaagctgaggacgccgccgccgtcgtcccggggtcggagggcgacgacgggaaggaggtcgaggagaggaggaggccggcggcctacgcggccgtcgtgatcgggggcacctttgaccggctgcaccagggtcaccatctcttcctcaaggcggcggcggagctggcgagggagaggatcgtgatcggcgtctgcgacggcccgatgctcgccaagaaacagtatgccgacctcatacagccaatcgagaagcggatggaaaatgtcaaggattatattaagtccatcaagcctgatcttgaggttcatgcagagccgatcgtggacccttacggcccctccattgttgaccaaggtcttgaggccatcattgtcagcaaggagacatttccgggagggctcgctgtcaacaggaggagggcagagagaggcctctcacaactgcagattgaagcggtagaactggtaccagaggaagctacggggaacaagataagctcaacagcattcaggaagttggaagctgagaaagaattgcggcaacagcaagaaacacagcaacaggcaacagctcaatcggagtgcagaacgtagcctttcagtcactgagcagagcaacgcgctaccatgtacttttcctttttgccttatgaaccgttgagctacactctttttccttactttacaacgcaaggcatagcagaattagcgattgctgccaccttgtgaaatcatgcaggaggacagtactgtaatgagcaaaattgggcaaactacaggggtactggactgtaatgagcaaaatacagaaggacgagacagaaggatgacaaaagtacaatacatctcacaataatttacagaacaaaaaaaaaaa

SEQ ID NO: 34742 - DNA, 964 bp, Setaria italica
  Peptide Sequence Number=SeqID_100716
caatcccaaaccacgcccacctccgcggcaaaccctaaccccgggcccaaccccctgaatcaccgtcctaccggtcaaatcccccaaatccaaccgccaatttgatatgtccgtccacggaaaccccttcccctgacctcgccggagatgatcgcgtcgcagccgcgccgggtccggcccctcgccgccgtttccctggtgctgttcctcctcctcctgtacagacgctccgatgggggctcggcgcgcgctccacggctcctggtctccggattgcgcccggtgcaccgcaggttcctctccgatgccgatcctgccggccccgcacccagcggcgcgaacctttcggaggtcgctacgctgaaaggcgagcagccggaggatccttccgtcgcgtgcgctggcatcgcgcggcacgaggggttcgagacacagtgcgactacctccgggcccacccgcagtgcagctccggcgggttcgtggactacctaggcttcttctactgcagatgcgagaggttcaggttgctgggctacgccgtgctcggggtgtgcctggtggcgctgttctatatgctgggtaacacggcggccgactacttctgctgcagcctcgagaagatgtcagcactgctgcggctcccgccgactgtggccggggtgacactgctcccctttggtaatggtgctcctgacgtgtttgcaagcattgcagcatttatggggagcggcgcaggtgatgtgggactgaacagcgtgttgggcggagctgtatttgtgacttgtgttgtggtcggggcagtgtcgctgtgtgtcgcggagaagaatgtgcagattgacaggaggtgcttcatgagggatattgggttctttcttgtgactctgttcgcgctgtctgtagtgttgatcgttgggaaggtgactgtttggggagctatgatgttttgagactgccatgcaatct

SEQ ID NO: 34743 - DNA, 277 bp, Setaria italica
  Peptide Sequence Number=SeqID_100717
aggaggatggtcgcgtcgagcaaggtgatcagggtcgggccgtggggaggccacggcgggagcccctgggacgacggcccgcaccggggcgtccggagcatcaccgtcacgtacgggcgcttcctggagtcgatgcgcgccgagtacgccgacaggaacggccgcccggtcctcggcgagaagcacggcggcgggacgggccgcagcctctccgccaggatcgagctggacttcccgtacgagttcgtgacgggtgtgagcgggagctactgcgcgg

SEQ ID NO: 34744 - DNA, 2728 bp, Setaria italica
  Peptide Sequence Number=SeqID_100718
tccgctcccaaacctccccaatcagcagctctagggttttcgccgccgccgccgccgcccatggacgccactccggaccgcgccaatgccgacctccgccgccgcctcgccgtcgacgcccctccaccgccccagatcgccagagagaagcaaggcctggatactgaaatacccctttctcctcagtggcttatgaaggtggcagaaaacaaggatcccacttcacagggtgtccgctcagatgtttcaaagacatcaggaagtggtgaagacccgggctacagtgcaaagaaaaaggatgttttcagggcttctgtgcttgatggtgaaactgggcgacgtgaccgctggcgtgacgatgaaagggaaccaaattcaacccatcggtggagtcgctggagggagacggacaaggaacatggtgatccacgcaaagtggaaaaatggtcagatgacacctccaagtattctgtggatagtcgtcgtgctccacaggagcgctggggtgattccaataataaggaaggcaactatgagcaacgccgtgagaataagtggactgcacgttggggttccaatgataaggagtctgaaaattggcgtgataggtggggtgattcaggcaaagagggtgatgcttcccgtgaaaaaggtttctctcactttactgcacatgggaaggatggaaacaatcatgaaaaggatactgaacgggatgacaatgtctctcgttcatggaaatctagttatcctgtgggccgtgggcgaggagatttgtctcatcatccctctcagactccacagaagtcatccgctacttatggatatggtagagggaagccagacaatgattttgcaaattttccaagtcgtggaaagtttacatctggtacaaatgcaatcagtagtggatcttcacgaccattccaacttggtttactttctgacagacctggtggtccatctggagatcgctctgcattcaaatatagtaggatgaaattgcttgacatatacagaagttgtgatgtcactgactttaagattcctgttgattgttttgaggaagtctctgtgttcttgcaagaaaatgctttggaacctttagcattatctgcacctattgctgaagaagcggccattctaaaagcaatcgacaaaggggatattgtaaacagtggtgttcatcaggctaccaaggatggttctgttggaaaagctggtagagaagatcagcaaggaggcatagaagattataaaggggaaacttttggaagtgtcaggggtgttcctgggaatgctgatttgccagctagaggggagtcattgcggcctggaacgtctacttatgttgttccacaaagatctcagtttgttggagaacatcgacttggaccatcttctgagtttgttggccaccaaatgcccaatttcttgaatcaagaaactaaaactgttggcatgccaggtgttgatgactttgccagtatggttcagcctcatcctaatccagaaagcctttctctattctataaagatccacagggtcaaattcaaggccccttttctggtgctgacattattggctggtttgaggctggttattttggtattgatttgctggttcgtgttgtgaatgcaccccctgatattcctttcttaatgcttggggatgttatgcctcaccttcgagcaaagaggccaccaccagggtttgccacttcaaagtcaagtgatatgctagttcaggagactcaacctgcaggaaagttcatcagctccactagcatgcaagcaggatcagctggcattggaatgtttgacagtgggtcaagtaggaaagatactgcagttgaggctcaaaatcgtttcctagagtcacttatgtctaatactgtgcgcaatccttctgcagacaccatctctattactcgaggtatgaatgaacttggcagtagtagctttggcaacatttctgtgggcggaggcgagggtgggatcaatatgaattatcttttggcacagaaaggactgttggagaagcaaaattctttgcaaaaccctgttccctattggtcaggagatgctgttccaatatcacaagcacctaacaaggatatagccccagaagcatctatcctacattctaaattgcttcctcagatggctgatccgtctcgccaatctttgcaatctcagaatgttgatttgcttgccatgctgcaatcaaaggagaagcctcaagtgcctactggtaattctggattgcctctatggtccaactaccctgaagtaagaaatgttaatcctaacatgcatggtgtagacctcgctcaaggggcacttaacatgcgtcaagatctgcagaactcccagaacatcggtatgggtgttcaacagcacagcttcatgccacaaacccgaccagctttggctcatttgccacctgagaagcttgctgagatatctcaagatccacagctcgtaaatatgcttcagcagcagtatctattgtcacaactgcagttgcaatcacagacacctttgacgcctcagcctcaactctctatgttggacaagatgttattgctcaagcagcagcagcagcaacaacaacaacaattgcaacagctgcagcttgagcagcaacagaagttattgttgcagcagcaacaactactttctcatatggcacctcatggacatcccaatcagcagattgatgatt

SEQ ID NO: 34745 - DNA, 263 bp, Setaria italica
  Peptide Sequence Number=SeqID_100719
gaagtgtcataagatagcgcattgcattgtagggtggattcttccaataagatcgaaattgcttccatgtatttgccatacattgatttaggaaattttgggcatatttagaagggaaggaaagatcctggtagcctggtggtggaatgctcaactccttaataagttcttgattgctccggtaaagagcagaatttgcataaatttcagcaaaatcaacgttcatgcgagcctcagctaggaggagagctgaccttccagca

SEQ ID NO: 34746 - DNA, 584 bp, Setaria italica
  Peptide Sequence Number=SeqID_100720
acaaaagggaactgaatagacaccttacctctacttacccagcggtttgggaggagagcaggggacatgaagatggcaagcttggcaaattactttggtctagggaagcaaaggcacaggagtcttgatgatgttagaatgaaccttgaagttctgaagtactgtgctacagtgttgttcctggaggcaagtcttccagaggtgcttactgttgagaaccttgttgagcgtgcaatgacaaggagccgagctaatggggctgcttctcctgaggcgccaaaacccgaagcaaactcttcacctgattcttcaaaacggcagcgcacagtttgtccagctgacggtgcgttgcctgagggaagtaatcaaggaacaagtgatccttcaacaagcagggaatccgttgagttggtatcacatattgaggaaatgaagttagataccaccacacagttggatgcaagttccagtggttattctgggtttctcgagccagatgatatttcgactgagtatattaaaatctcagttgctccattgcaccaatttggtcggaggttatctgtccaacacaaagacagccc

SEQ ID NO: 34747 - DNA, 489 bp, Setaria italica
  Peptide Sequence Number=SeqID_100721
aatacaaggacaactaggtagttactactttaactaaggaaccctagtaccggagagaaaaactttatggcgagttccttgtcaatgctcagggtgaggatgtggtttctggaaatagaactccacaagaacttgatgcgatgaaggagtgcatgccagagccttatgcagaacttgtcgagaactgcaaaatcttggaaaaacattacaaagaaatgatggacattgagttcactgttcaagaaacagactttggatgcttcagtgcagaacaggtaagcgtactggcaaaggtctgtaaagattgctgtggacatggtcaatgagggcctgattgaccatcgctcggcaattaagatggtggaaccacggcaacttggaccagcttcttcatcctcagtttgagaacccatcgtcatataaagacaaagtcattgctgcggcctacctgcatcaccaggagctgctgtaggtcagatcgtctttgca

SEQ ID NO: 34748 - DNA, 233 bp, Setaria italica
  Peptide Sequence Number=SeqID_100722
gctagttgttcatcggaaagggtagtgaagaacaagaaaaggaatcaggttacataccagtattggtcataagatgaggagtgcttaatatttgttgacatcactttgcctgactcgcatcccttgactgcagtttggagcatgctcccactgcagttgctgcagtctcctgagtctgaaattactccaactccagcagcagttacaggatgcatgatgagcgcgccaagggg

SEQ ID NO: 34749 - DNA, 805 bp, Setaria italica
  Peptide Sequence Number=SeqID_100723
ttcaacaacatcattggcaagctatgtgagaacgggatgcttgctgaggcagagaagctctttgaagagatggagaccaaatcggtccttccagatgtatacacctacacttaccttgtcgactcgtgcttcaaggaagcccgtgtggaagatacaatgcagtatttccacaaaatggcagatgggagggagcatgggccaaagtttaatatcggtttcttcaacctcatgtttaaaggacttacggaagctggccggattgatgatgccttgaaggtgtatgggaggatgcctgacaaggagatcaagccaaacacaacaacctttgaaatccttgtcaaagccttatgcaaggcaggggacttggatcgagcacgggacctagtgatggacatggcaaggggtgctgttgagcctcctcaagagttccgtgagtctgttattgacattttcaagaagtccaatcgccaggaagaaatcgagaaagcttttgaagaaaagcctttgccaacacctcagccaaggacagagaatcagccgaggacagagtatcgccctcacaatgcagttggtgtttctcaagggagacagcctggctttagctcagcttcaccggtgcagcttggatttggttactctcagccgcaacagccagcatttaaggacactacaaatcagcagcctggttttgactcatctcggcaatggcattcaggttttggtgctcctcaagcacagcacccaggatatggcgcaccccagcctgtacaggctgtagttggtccccctcaaccaccacaggcac

SEQ ID NO: 34750 - DNA, 221 bp, Setaria italica
  Peptide Sequence Number=SeqID_100724
tgttgatatgtctagcatccgcaatgcgtgcgtacagatgtgcttctccattcgtgggagatgatgatgggtgatagagttgggcatcagtagttgcgataaaaagcacatccgcaatgcgtgcgtacagatgtgcttctccagttcgtgggagatgatgatgggtgatagagttgggcatcagtagttgcgataaaaagcttcgaggacaacagtcctcg

SEQ ID NO: 34751 - DNA, 696 bp, Setaria italica
  misc_feature (611)..(696): n is a, c, g, or t
  Peptide Sequence Number=SeqID_100725
taaggttgtacgcggttttcacttcctaatgttgatgaaggtgatctatcaataatgctgggggtatttcgggttttccaaggggtctcttgtgctgcagccagtgcagatgatgcagatcttgacccttgtgttgctgaacttcctccaagaccattgctcgagatattggcgcgagagctgcgccgacggctgggtcttagattgttcaacatcgatatgatcagagagcatggaacaagagatcggttttatgttatagacatgaactattttcctgggtacggcaaaatgcctgggtacgagcacgtgttcactgactttctactgagtctttcccagaaagagtacaagcggcgaccaagctatagctcaggcgaatggtgaaaatgctgaatgagccttttggccgggtcactgttgatatgtctagcatccgcaatgcgtgcgtacagatgtgcttctccattcgtgggagatgatgatgggtgatagagttgggcatcagtagttgcgataaaaagcttcgaggactgttgtcaggctgtaattaacttgctgcttcacatttgctaactgttcatgtcctagaaaatttttgtttcgacttnnnnnnnnnnnnnnnnnnnnnnnnnnnnnnnnnnnnnnnnnnnnnnnnnnnnnnnnnnnnnnnnnnnnnnnnnnnnnnnnnnnnnn

SEQ ID NO: 34752 - DNA, 1682 bp, Setaria italica
  Peptide Sequence Number=SeqID_100726
ctcacgtcgaagaaggccaagagcttcctccaacccaagctccgggggctcgccaggaaaaaggaatcttatttgtcgctattgatcacaaacgcccattgtccgaccaaggtccatttgacattgttcttcataagttgactggaaagggttggcagcaattgctagaggaatatagggaaacacacccagaagttactgttcttgatccacctggtgcaatagcacatttgctcgatcgccagtccatgcttcaagaagtttctgaattggacctcacagaccgttacggtaaagtacgtgttcctaagcagctatttgttaatacagatcccttgtcaataccagctgcagttactagggctggactatctcttccattagtggcgaaacccttggtggcaaaatctcatgagctatctcttgcttatgatccaacttcattgaccaagcttgagccgcccttggttcttcaggagtttgttaaccatggtggcgtcatgtttaaggtctacattgtaggggatgcaataagggttgtacgtcggttttcacttcctaatgttgatgaaggtgatctatcaaataatgctggggtatttcggtttccaagggtctcttgtgctgcagccagtgcagatgatgcagatcttgacccttgtgttgctgaacttcctccaagaccattgctcgagatattggcgcgagagctgcgccgacggctgggtcttagattgttcaacatcgatatgatcagagagcatggaacaagagatcggttttatgttatagacatgaactattttcctggtatgtggtctgacattcggacttctcttgagcatatcgtacctatccttgtatattattagtataagctaacttctgcatgtacgctttgaaacataattgcttgaagaatctcagtaattgtcaattatcacatcttattttggtagcttaaagtctttatgttaattcacagagtaatgctctgacactcgtgtgaaatactgaaaagaggtatatctgctccttttatcagctcaatatagttgttgatgatagggatactgagcatttgaggcactaaacgagtatatgatgcttttgcttgtgacatttgtaccatgtgccatttgtaaagcttttagaaacagtttggagtccaaagactggctagaacctggcacatcgaagttatgcctgctcaccgtgtattcttgtgggtagattccttgattttacaagcaaatcagccataggccacaacttcctgtttccttttttgtacttcatgcatttcttttctaaccaactggcggaccaacttttttgcacgcagggtacggcaaaatgcctgggtacgagcacgtgttcactgactttctactgactagaagtactttcccagaaagagtacaagcggcgaccaagctatagctcaggcgaatgggtgaaatgctgaatgagccttttggccgggtcactgttgatatgtctagcatccgcaatgcgtgcgtacagatgtgcttctccattcgtgggagatgatgatgggtgatagagttgggcatcagtagttgcgataaaaagcttcgaggactgttgtcaggctgtaattaacttgctgcttcacatttgctaactgttcatgtcctagaataattttgtttcgctcc

SEQ ID NO: 34753 - DNA, 581 bp, Setaria italica
  Peptide Sequence Number=SeqID_100727
tgtagttaaattgtttgtttccgtaagttaagtttcctattcgtattgtttgtctttagtattattttggtattctttggtagttgtagatgtcttcacacctagggcagtaaatcttcacagaactcgaacgaggaatatccgattgcccaactggaagacacggttgaccactgcaattcactcgagggcatctgccgaagtcaacattcttgtacttatccaacatcgcagccagccctttacttgtaatgatataccggacatgaatcagtccatagagcatctcagcagctgattcaataagttcattttgctcttctgtgaacatatcgcctgtgtatttgcacaatacttattgtaagtgctatgtcacaataataacttaggttcattttagcaataaagcctattgcaaatactactaggacaatattattcctgtatcctaacttacacttcatactcagttgatgatcttcattctaacatttttttctatcatgcagaaagaattaagagaagtagaaataacatacatgccactaagacttgtggaaagcattatgatacgtcttctt

SEQ ID NO: 34754 - DNA, 1422 bp, Setaria italica
  Peptide Sequence Number=SeqID_100728
tcaaaagtgaacttaaatgcttgttcaaaacgtcaaatgttgagaacagatggagtatcacagcagagggagaattggcagcatcacagtaacattttgccctcttcagcaactgtgaaattcaaatataaaggccttttcttgttttaaaagaatacggatgttcacctaggctaaacaaaccacaagcatcaaatcagaataatcaggtcaaggtgagaagccagactatggaggtcagccgggggcgtccaggtgcattccgatgatatgtgaacattggaggagccagggctacaccaatcgaacaaagcaataaacggcaacacacagacagaaaccagcagctcacaaggggctattgaacgcagatgaatctttaacatcttcagccttcaaatttctcatggcttatgaattttgaacccaaataccctggggatgtattgttgcgcgggcttctggggcttcaaatgcgggtatgtcatcagaaacaagtgagtaaatgttgttccgaagtaagttccatcgatgttgcttagatatttggatcttggagtgtagatgtcttcacacctagggcagtaaatcttcacagaactcgaacgaggaatatccgattgcccaactggaagacacggttgaccactgcaattcactcgagggcatctgccgaagtcaacattcttgtacttatccaacatcgcagccagccctttacttgtaatgatataccggacatgaatcagtccatagagcatctcagcagctgattcaataagttcattttgctcttctgtgaacatatcgccatgggaagattcaacatccaatatcagatcaagagcataatcgtaatatggaacttggttgcttaacccacagagattgaaatcatcttgtatgtagtcttcatcaacctcacagaaaaactcattgccccttaagctacagaaccatgaaatccatgaagtatcttccccatctgaaccactaacatctacatctgattcttcgctgtcagttcctgattcttcgtcagcgagcttgctcatggacatcgcggtggatccggagccggagcggggcacctccggctgcttgcccgcgacgatccgctccttctcgcggcctccggagaacccccacgacgtcgacggagacgacctgtccatcggctcgccgatccgcttccggtcgccggccgcccccggccgccgctgcggcgcctcggtctcggtgcatctcctcgcgggggaccccacctcgtcccccgcagccctgaggcgggatagcgggatgggaacagagggcaggatagtgtttggaggtggtggaggtgagcggtggcgggatcgcgtgccctcgtgtcgaggtcccgagacgggacgagggaggggggacggggcggcgaggaagaac

SEQ ID NO: 34755 - DNA, 322 bp, Setaria italica
  Peptide Sequence Number=SeqID_100729
cttcgacgaaatagccgccatggccgccgtgtctccagcctaccctctccaccgctcgccgcgccaccgccttctccttctccaggagcaggaggagccgcctctcctcctcctcttctatccccgcctccgtctgcgcatccccgggcgaccacacccacgagcagcagagggacaacgaggagcagtcgttggtcgtggtgggcggcggcgcggcgggggtctacgcctccataagggccaagaccctggcgccccgcctcaacgtcgtcgtcgtcgagaaagggaggttcttgtccaaggtcaaggtctccggcggtgg

SEQ ID NO: 34756 - DNA, 316 bp, Setaria italica
  Peptide Sequence Number=SeqID_100730
ggggggaggggagggcggcgcacgaatccgaatgcggcgagcaggcgtgcgggtgcatgggcgcatgggttcccgagcgagtcagcgtcgggaagggatgaggcaggggcaagagttaaaggaggtggcggtgtctgcgtcgtgtctcagcagagagcagaggcggctctgtctcagtgcatggcatggggagggccgagggggggcattcaatggcgccgaccgcgtcggcctctggagggagttggtgtgcttggggaatggcggagctgctgggctgagctcgataaacagaggagagggaggatgcggctgg

SEQ ID NO: 34757 - DNA, 244 bp, Setaria italica
  Peptide Sequence Number=SeqID_100731
ggagagtgtgggaaagtatttggcaagccggatgggatggccatccaaatagcaactctgttggatcgaattttttagcagaattgtcaaattttggcttggagagggagatggcaaggctgttggagtcgctcgctctatatataagtgccatcctccagcctactgtgttattgcaggttacatgtaatactggatggctgaaagtgaagcatcagtattcagtagtagtggacaaaaaagc

SEQ ID NO: 34758 - DNA, 1566 bp, Setaria italica
  Peptide Sequence Number=SeqID_100732
caaccgatgatgtagttgccaggagagttattaggccataatctgaatgggcacccgctccatagacgccctttgcaggatttgagactcgacctgtctttgtccacctggcctattcctaaattagtctaacttcttgtttgttttggatcgaattttttagcagaattgtcaaattttggcttggagagggagatggcaaggctgttggagtcgctcgtgagaacacacagtgccatcctccagcctactgtgttattgcaggttacatgtaatactggatggctgaaagtgaagcatcagtattcagtagtagtggcaaaaaagcacagtaggggggcatcatccttcaggccttgccgtcgctgtaagcgctcagatctgcgtgagtgtccttgtagcgctgggacaggtaggcagagcaggtgattggggggaactttggagggttggcttcggatttgcaggttggcaggcactcgactatgcagtcgtggcttggctccacaaagtaggctatcgagtagcgttctcgtccatctaggactactcgatgtaaggttgacctgaaaatgcagttactccacctttcaagcatatcaccaaggttgacgatgaatcctcctttcacaggagctacatattcccacacttgaggctgagcattcctgtccttacatatttgaagtccaactacatcatcggttgccaggagagttattaggccataatctgaatgggcacccgctccatagacgccctttgcaggatttgagactcgacctgcgccacttcatagtgtaagagccttaaagtggctataggcttggcaagcatttcaggtctatcaaagaagtccacatcaagatccagagcaagagcaatgatccttgcaaccgattttgctactctcaatgcctcactgtggtatttctccatcacctccctccattttggcaatacttcttcagaaggccactgatttggaccatagaatggtttgtttgcttctggattatctgcaggtacctcaactcctatataatatccctccttgtagtcaccattcacttgattttctggatcaagaatttcatcaagcattggtgtataccctcgatttttctcgtctcggagaagcttcattttctcactgtggggaaggtcaaagaacttcttgctctcagcaaaaacttcatccatgaagtcttggcttatcccatgatccacaacatagaagaagcctgaatccaggcatgcctgcttgaggagcgtgaccgaattctggatgtccgggtccgccaggcttatgcaattcaggtcagtcctcgagatcgggctctccatgctcggcctgtcaactctctccatcaggctctgatctctcatggatttgccgctcttcttttgctccctgcttgccgccgtcgccgccgccgccggctaccctcctcttttctggtagccgcctctttttcctgatgcgcgcaggcagagcgcggaaattgccggattggagtggtatgacgggacgatttatcggatgggtcagactggagaggaagg

SEQ ID NO: 34759 - DNA, 264 bp, Setaria italica
  Peptide Sequence Number=SeqID_100733
tacgatttaggtgacactatagtgcagatcaaatcccgaatctatttatagtacccaatcggattggaatatcataataatggtagaaattgactcccttttgttttgatatagatattttatacaaaactccataagtctaaatagaatttaccaattcctttgtatttgatttgtagttgttgcaaattccaatttgagtatcaaagtctctttattcctacgttcatatgtatttcatgcattacatctattacacctatg

SEQ ID NO: 34760 - DNA, 1079 bp, Setaria italica
  misc_feature (1044)..(1079): n is a, c, g, or t
  Peptide Sequence Number=SeqID_100734
ttgtcgccgggtacggcgaggcaaaagagaagcacgagtgcctcgcgtggctcgacgggcaacctgagcacagcgtggtgttcctctgctttggaagcaccggcgctggcaaccattcagaggagcagctaaaggagatggccattggtctggagaagtccgggcaccggttcctgtgggtggtgcgagcccctgcacccgacgacctggagaagccgttcgacccctgcgccgacccagacctcgatgcccttttgcccaaggggttcttggagaggccagtgggcgtggtctcgtcgtcaagctgtgggtgccgcaggtggaagtgctctgtcatagggcgacaggagcgttcgtgacgcactgcgggtggaactcggtgctggaagggatcaccgcgggcgtgccgatgctctgctggcctctgtatgcggagcagaagatgaacaaggtgttcatggtggaggagtatggggtcggcgttgaggtggtcggatggcagcaggggatggttagggccgaggagatggaggccaaggtgaagctggtgatggaggccgaggaaggcaagcggctcagggcacgggtctcccagcacaaggaagccgccgcagtgtcctggaaggatggtggctcgtcgcgcattgcttttggccagttcttgtcggacgcaggttgtctcgggcagcgactgacacgcccatgatgcggtgggtcagctacagtttggaagcatcattgcatttgctgcacgcctgcagtctttattggatttcagcatggtggtatgttccttctatatgaagaacttgaactcatttctaattataacaaccttacatatatgaaaattagcattaccatagtcagtttaagagccaatcccaaccttatatatatgccattaaatgttgtcaatcacagcccaaattttgtttagaatcgctggctgggatttgctgtttttctcctgcgctgctcaaattggttggtcttgttggcgtcagatatttgtgatgcatcctatcgctattacaagtaacnnnnnnnnnnnnnnnnnnnnnnnnnnnnnnnnnnnn

SEQ ID NO: 34761 - DNA, 801 bp, Setaria italica
  Peptide Sequence Number=SeqID_100735
gtttgtttcaccagaatacaagaatcccaaggaattctagcgaacacgttcggatcgcttgaggctcgtgcagtgggagctcttggcgatccacgggttttccccaaaatgcctccgctctactgtgtcggtccgtttgtcgccgggtacggcgaggcaaaagagaagcacgagtgcctcgcgtggctcgacgggcaacctgagcacagcgtggtgttcctctgctttggaagcaccggcgctggcaaccattcagaggagcagctaaaggagatggccgccggcctggagagatccggccaccggttcctgtgggtggtgcgagcccctctccgcgccggtccggggaggccgtccgagccggacgtcgacgcgcttctgccggacgggttcttggagaggaccaaaggtcgtgggctcgtcgtcaagcactgggcgccgcaggtggaggtgctccaccacaacgccacgggcgccttcgtgacgcactgcggatggaactcggtgctcgagggggtcaaggcgggcgtgccgatgctttgctggccgttgtactccgagcagaagatgaacaaggtgttcatggtggaggaagcagggatcggcttggaagttgtttggtgccaacaggggctggtcgaggccggggaggtggaggccaaggttaggctggtgatggagtccgaggaaggggagcggctcagatcgcgagtggcggcgctcaaggatgccgcggcaatggcctggaaggatggcggatcatcgcgtgcggcgttcgcccagttcttgtcggtcgtgaac

SEQ ID NO: 34762 - DNA, 412 bp, Setaria italica
  misc_feature (380)..(380): n is a, c, g, or t
  Peptide Sequence Number=SeqID_100736
gtttgtgctgttctggagcgcttctgaccatttgacctacatgggagttaagatagaagccgacgattggagcacctgcagaatcgtcttgggacaaagcgttgagcaactcgggatgagtctcgccagcaacattgctacgtcaggacactccgtcgacgttgtcattgcagaccatagcgtgcaggttgattgatgcagttcaggctagtcatgcctattagcctatagataagctgttacttttttcagagcaaaggaaatatttgttccattttgctctgtggttctttcaggcatttacagtttgtgaatgtacgctctgtttagaaactgatacgtttcttggtttcaaatatagcttttttttaaaaaaaacntaagcacgtaggcttcagataatctcgtaagg

SEQ ID NO: 34763 - DNA, 3104 bp, Setaria italica
  Peptide Sequence Number=SeqID_100737
tggtaaagacacagctggtgacaaaggttgctggtccactgcccaatcccgctcaacatccccttcaaagaggtttctcggtgtcagagctttgcagtagatagaccacatgcgcaaccacttcctcttcctggatcacgtgctagggtgacacgcactatttctgatattaccgactcaaaatccactttggaaaagcgtggcaaaggacacctgctaccactccctcggcctcaaaaaagacctgaagctactgaacccgttgctgaagaggctactgcttctgtctccagcaactgttctattgatagtgatgatccaggagattctcggcttcagagccctgtgggaaatgaaactgaaaatgccactagaattactgcaacaaatagttcaagtgttgtgcacagagagctttctagtgctatcaccagaaagagcaccaaagatgttgcaaagccaaacaatacctttctcagtaaccaaattctgtcaacatctccaagaggtactgttgctgacagctatcaatccaatttacaaggcccaaggcaaattaccttggagagtgctcccaatagtttgatgtcaagtcctactcgaagcccaagaattatatgtcccgaccagattccaacttcagctttttgggcagtgaagcctcatgcagacgtaactttccttgggtccggtcagtgctccagtccaggttctggtcagacatctgggcataattcagtgggaggtgatatgctagcccagctcttttggcagcctagccgcggtagtccagagtgttcaccaattccgagcccaagaatgacaagtcctggtccaagttctagggtgcatagtggaagtgtctctcctttgcatccaagggctggtggggtggctcctgaatctccaacaagtcgacatgctgaagggaagaagaagcaaacccacagattgccgcttccgccattgagcatctctaatagttccacctttttgccaaacaactctaccccaactagtcctatatctcgtagtcctggtagaacagaaaatccacccagtcctggatcacggtggaagaagggaaaactgattggccgtgggacatttggccatgtatatgttggttttaacagtgataaaggtgaaatgtgtgctatgaaggaggttacccttttctcagatgatcctaaatcaaaagaaagcgcaaagcagctgtgccaggaaatatcacttctgagccgacttcagcatccaaacattgtgcggtactatggatctgaaacggttaatgataagctttacatatacctcgagtatgtttctggtggatctatacataagcttctccaagagtacgggcagtttggtgagcaagcaattcgaagttatactaaacaaatacttttgggcctagcatatttacatgcaaagaatacagtacacagggacatcaaaggcgcaaacatattggttgaccctaatggtcgtgtgaagcttgctgacttcggaatggcaaaacatatcaatggacagcaatgccctttttcatttaagggtagcccatattggatggctcctgaggttataaaaaattctagtggatgtaaccttgcagttgatatatggagtttaggatgcacagtcctagagatggctacctcaaaaccaccatggagtcaatacgaagggattgccgcaatgtttaagatagggaacagtaaggagcttccaccaataccagatcacctctcagaagaggggaaagacttcataagacagtgcttgcaacgtgatccatccagccgtccaacggcagtggatcttttgcagcatccatttgtacgaaatgcaccaccacttgaaaaatcagctgcctctgatccactggaacagttgacggttatgtcctgcaaaacaaattcgaaggtggttgggcatgccagaaatatgtcctcacttggtttggaaggccagtcgattttccagagaagagctgccaaattttctttggcaaatagtgatatccatatacgaagtaatatatcttgtcctgtatctccatgtggaagtcctcttctgagatcaagatctccacaacatcaaaatggtagaatgtcaccttctccaatttctagccccagaactacttcgggtgcttccactcctctaactggtggcagtggagccattcctttaaaccatgtgaggcaaccagcttacagaaatgagggcttcacagttacatcaagaggtcttgatgatcacttacctagccggcctgctgatccagtacatggacgttttgttcgagtacagcattcagcaggtattcaggagagggtagtctctgaagctgacatcctgagctctcagtttggaaagatgatacatgcaaatgtgtgggattcgcatgataggccattgccttccgagcgatcctctcagcagagctttggggattatgtgaagctaaaaccttcactggatttgagatctggtcctcctgggcgcaatcatggccattgattctctagcaaaaattgctgcttaagctttcagtcaggcatatgtggtagctagtggttctaagctggtttgtggaaacctttaattgtatcatattagaagagatgtccattaattatatctgatgctgacaattggcagtggataaagattctccaatgtcaatcccattacttcaaaaaaggtgagacatgccctatcaggtggggatgttgtatactagactgtccagataccgaaggactcaaaacagtgactctgaacctgtatactcttactcccgtatctacaactattttctttttgtttcttttatggggttgaaggccattgtacagaaggggactcaactagaagtccatattttgcacaggagaaagcaagtgagccgttaaccacccttttcttttcttttttctttgttataaaaaaacttaacagctacatatgaatcagctgcagtgcaccctgcaaagtgttgcttctgctgttgtaataccgggtcaatccattaaacatatcaattactctggaaaacatattaagtaagtaatcataattctaaaaaaaaaaaa

SEQ ID NO: 34764 - DNA, 197 bp, Setaria italica
  Peptide Sequence Number=SeqID_100738
ccgaactccaaaaccggcgagggaacaaaacaagcaagtggggggcgagcgccgctgtgctccctcttctccaagctcgccgatggacgggccccgttggacggaggaggtggacgacctggtcgacgccggcgacgtcgacggcgccgtcgccctcctcgagtccgtcgtctccaacctctccacctccgccgccg

SEQ ID NO: 34765 - DNA, 388 bp, Setaria italica
  Peptide Sequence Number=SeqID_100739
agtaatagggtattacaagcagatatcgagtctaccagaagcatgtcttgctagtggatcttggtgttagcatcccagttactacttgtactgatttgacttttgatgtatatcgctgcttttgatttctacagtgaccaggagcgtttgctcgttgaagagcttgctgcactaaataaagctcagaataaacccatttcaggaactacaaacataggaaattttcaagacagaaaccatcatccatctgcaaggaggaaaagatcattctgggtgggcatctggaatctgttcagggaagataaaggggatcagagattcgcttccatcagtgcacaacctattattccaggatggacttcttgccgagggctgatcctgctgttcc

SEQ ID NO: 34766 - DNA, 618 bp, Setaria italica
  Peptide Sequence Number=SeqID_100740
tcgtctatggtaaaaaataggcaaaaggtcaacattcaaatttccaaaaaggaaaatacaaagtggtaaaactagatactttccactttctaatagtttacccatacaacctgtgtgccattttacgaaacgtgatcttctggggcttatatcgtggattatccttttactagctattagctaatagacatcttgcatggaatgaatttaagaaatgtttgataccttatccttcattagggccatacacatcacataatgtaattttatctttgttactaacttactgtttcctcagtatcatccatttttgcataattttatttcctgaacttcaacatgatatagtttatgcaatatcctatattgttgcatgctgtagatatcttcatgcttaaactgtggtggcagtgggaaggtaattctgaacattgcacagaatgtcacggttcaacgcaaagtccaagttgaacgcaatatcaaagtagacatacctggaggtattgatgatggctccaccattcaagttagagggaggaggggtgcaagtggtgacctgtatgtttacattcgcgttcatagaaaaaacaggcatccacagagatggtcttaattgta

SEQ ID NO: 34767 - DNA, 1433 bp, Setaria italica
  misc_feature (1393)..(1433): n is a, c, g, or t
  Peptide Sequence Number=SeqID_100741
cattctttggtggttctgataaactttttggagatagcatgggtcctggggattccattacagtgcgaaagtaaacgacaacaggggacttgatattagctatgatctccccatttcttttgaagaatcaatgcttggaggcaagcgtgaaatcaatattttctgccatgaaacgtgtggcacttgtcatgggactggagctaaatctagcaatggcatcatagaatgcactcgatgcagaggtcaaggcaggttgatgaaaactcaaaggacacattttggtattgtttctcagatatcttcatgcttaaactgtggtggcagtgggaaggtaatttctgaacattgcacagaatgtcacggttcacgcaaagtccaagttgaacgcaatatcaaagtagacatacctggaggtattgatgatggctccaccattcaagttagaggaggaggtagtgttgataagcaaaggggtgcaagtggtgacctgtatgttttcattcgcgttcatgaaaaacaaggcatccacagagatggtcttaatttgtactcggacgtctcagttgattatactgatgcaattttaggaactacagtgaaggttgagacaatagaaggattgaaggatcttcatattccttctggcactcagccaggagataacttaaaattttctcaactgggagttccggacattaaaagacctaatgtcagaggagatcactacttcgtgataaaggtgaagattccgaagaatatcagtgaccaggagcgtttgctcgttgaagagcttgctgcactaaataaagctcagaataaacccatttcaggaactacaaacataggaaatttcaagacagaaaccatcatccatctgcaaggaggaaaagatcattctgggtgggcatctggaatctgttcagggaagataaaggggatcagagattcgcttccatcagtgcacaacctattattccaggatggacttcttgccgaggggctgatcctgctgttccgttgctgttaaaaggattccttatgataacagcattcttaattgtgatcagcagaaccagtaaactcaggtttattcgaaaccgtgatgattgtctgattcaagccaaagtaactgcagagccagagtgaattgcagtctggttatcgtaattttgtcgagcaaagctgcgggggaaagatccatcccggctttgtttctagtggtttgtgtcccagagtttacagtaataggctaacaggagtggcatagaatgatataaactgcttgtcattagtcattttagtgattattatattatgccataacatgtagaagaaacatgtggcagtttgacgaaagcaaagaggaaaggtatggagaaacatgactgggacnnnnnnnnnnnnnnnnnnnnnnnnnnnnnnnnnnnnnnnnn

SEQ ID NO: 34768 - DNA, 268 bp, Setaria italica
  Peptide Sequence Number=SeqID_100742
cgacgcgttgacgtcggcgcggcactgcgcgaggccgtacgcctgctggccgggcgcggcgccggtggcgttctcggcgaacccggaggtcgaggccgcggcggcggggagggaggagaggagcgcgtcgaggttggcctggaacgcactgccgcgcgtgtagttcgcgtcgctcgggcagcccttgtattgcggctcattgtcggcgttggtcgttgcgacgaggagagacgagcagaggagaaggatggggagaaggcggtggtgc

SEQ ID NO: 34769 - DNA, 412 bp, Setaria italica
  Peptide Sequence Number=SeqID_100743
acgtcgaaggcgccgcagtgctggggccgtcagcgccgacgagccccgcccggtcgagcgcgaaccgcaccggcagcctctgaaggtccacgtcgtggaccacctggtcgtacccccgctggaggaaggaggagtagatggcgcaaaaaggcttgagcccctcggcggcgagcccagcggcgaacgtcacggcgtgctgctcggcgatgccgacgtcgaagcaccgctccgggaaccgcttctggaagtggttgagccccgtgccgccgcccatggcggcgtggatcgccaccaccttgtcgtcggcctctgcctcccggatcagcgactcggcgaagtactgcgtgtaaggcagcgttggggacttagatttgaactgcctccctgtcgccggatcgaacttgacgacacc

SEQ ID NO: 34770 - DNA, 303 bp, Setaria italica
  Peptide Sequence Number=SeqID_100744
tgtcgacggcggcagctccggaagccgccgccgcgagcgacgacggcgacggcgaacgcgacggcacgagcgagcccatcgctgcgtcgtgctcccaccccgaccgcgctccagcgccggcgcccatcagctcgtgctgcacgtgcacctgcagggcgacgaacggcgcgccgccgccaccggcgttggcgacggcagcgtgatgagcgaccggccacgccaggtcgtggaatctccccaggaagccgtcgtgcgccatcaccgctgctcggtgccacgacacgacacgagaaagagaggagc

SEQ ID NO: 34771 - DNA, 479 bp, Setaria italica
  Peptide Sequence Number=SeqID_100745
agacctacgaatgacgaggagcgcctcgttggtggacttgttgcagaggccgtactggcggatgaggccgctgaggttgtcgagcctgccgaggaagacgcagtagatgtcgtcgaggccgcagaacatccgctggtagccgccggaggcggggcaggagccgccgacgcaggcgagcgcggccccgcccccgaaggaggtggagaaggcgttggcggggtgcgtggcgtggaagtccctgaggatctcgtcggggttccttggcttgcactcgccgccgctccgggggctgttgagctcctgcggcgcgtgcgccacctgtttctggaagatggccagcatcttcaaccaaccaagcttaccacgagagccctgcagctgcggcggctgtaggctggagcctgtagcctgtaggtagaagaggagagaagagaagagggagggacggatctgaatggggaatattgcgagaagagaaa

SEQ ID NO: 34772 - DNA, 397 bp, Setaria italica
  Peptide Sequence Number=SeqID_100746
ccagcaggcagcagcaaacgatggaaccgccgcccgccgagggcgacgtgcatgaccggcagcgacggggaggtgatccaacagaccccacggcgctggcgagggcgccggtggtgtcgctgcggccgctgggcctggcggacgcggacgccttcatggcgtgggcgtcggacgaccgcgtgatgcggttcctgaagcggccgctctgcgccacccgggagcaggccgtggcgcagatcgagggacaccgtgctgggccacccgtggttccgcgccgtctgcgtcggcgacggcggcggccgccccgtgcccgtggggcaggtctccgtgtggccgtacgccgacgagggcggccgccgggccaacctcggctacgccctggcgcgggaccactggg

SEQ ID NO: 34773 - DNA, 257 bp, Setaria italica
  Peptide Sequence Number=SeqID_100747
agatgacactgaggttgctgtcaagatgcgttctgaatcatcatcgcatgggcttgatgaatttttatctgaggttcagagtttgacaaaggtgcatcacaggaacctagtgtctctgattggttactgctgggagaaagatcatttggcactggtttatgagtacatgtctcatggcagttctttttgatcatctgagtaggtttgtctattgcaagcctattgagtactgtatttaaggaataatcagcgtgggt

SEQ ID NO: 34774 - DNA, 226 bp, Setaria italica
  Peptide Sequence Number=SeqID_100748
ttgcgcgaacctcactcatcgcgtctgctacacagcattttatcatatcctcatataaatcagccgaacgttgtatctctggggcatcagcccaatactcaagtagatctacggagaggcttcaagaaggagcccgcatggatgagagttatgatattcgttcaactaggcgaatccctcaaatggacatggttattatgtgaatctctgtggacggcatccctat

SEQ ID NO: 34775 - DNA, 241 bp, Setaria italica
  Peptide Sequence Number=SeqID_100749
cgagtggagaagagggagaggaggggaatggaaggggaaagaggcagaggaggagaggaggggcagttgcagggggatatcgacgcccaggggggaccaccagagcagcagcgacatgagctcactggaggccgagatgaagtcggcctcgtccttcaacggcggcaggatgccatgaccgacccatcgagctttcacaaggcataagctcgcacagtaagcagccggaaacttgatcaag

SEQ ID NO: 34776 - DNA, 392 bp, Setaria italica
  Peptide Sequence Number=SeqID_100750
gtttctgccattgaaagtttgttgaaggtgccaatatatcagggcaaaatttctctgctgcacgctcaacaagcttggatcttggagttgatcctccatcatctcgtgatcctcctgtgccacttgcagcgccagcatcaaatgttttgtcattgcagaactcagcactgctggattcatcccttccttccatcacagctgctagttcacgaaatggaggttcccgcttattggatacaatgacaacacagttcgcccccaaagagcgatcaagatcaccatatttgagtaatatgtcgtctgagtccatgtctggcttgtcaatgccttactcagaagatctacggagaggcttcagaagagccgcatggatgagagttatgatattcgtt

SEQ ID NO: 34777 - DNA, 1096 bp, Setaria italica
  misc_feature (1046)..(1096): n is a, c, g, or t
  Peptide Sequence Number=SeqID_100751
aactttgttggcggtggagaccatgttccaacgccgggctctacggcgatcagtccaccatgctgccgcagatgtcggcgaccgctctgctccagaaggcggcgcagatgggcgccacctcgagcgccaacggcgcggcgtccatgttccgaggcttcgtcgggtcttcccctcacggccggccggcgacgccgcacatggagcagagcgaggcgaacctgaacgacctgatgaactcgctcgctggaggcggcgtcggcgccgcgggaattttcggaggcagcaacggcggcggcggcggcggcggcggcgcggggatgtttgatccgaggcagctgtgcgacatggagcatcacgaggtgaagttcggccagggcggcggcgacatgacgcgggacttcctcggcgtgggcggaggcggcatcgtgcgcgggatatcgacgcccaggggggaccaccagagcagcagcgacatgagctcactggaggccgagatgaagtcggcctcgtccttcaacggcggcaggatgccatgaccgacccatcgagctttcacaaggcataagctcgcacagtaagcagccggaaacttgatcaagcagatgcaaggagaggagtaaggatatatagcgtagtggcaagttagcagctgaatcgcatgggtgagttcatgcgcatgggatatctgaaggcggggaccttggctgagagagaaagatgcgtcttctctgactaatggagtaagctagtgcgagctgggcgcatgtgatgacccctttgctcgtggtggggggttggtgttcatgctggtctcttgttcttgttggttttcccttccttgtagttggataatctttgttggattaagtatagcttctggtgatagaaccaataaggatgtttgtcgctagcttaatgggggtgatgtgaagcttaatttgcttcattttcccaaccttctgttgtttttattcccttttctcttgtagcaaaacatattccccttacaatgccatattgccattaatcatgctagctcaaattcnnnnnnnnnnnnnnnnnnnnnnnnnnnnnnnnnnnnnnnnnnnnnnnnnnn

SEQ ID NO: 34778 - DNA, 435 bp, Setaria italica
  Peptide Sequence Number=SeqID_100752
cggcggcgcggcattggtggtgcggacactggagtcggggctcgccgacgcgtcggacgacggcggcgagtagtggtcgtcggaatggtggtggtggtggggccgcctcttggccttcatggtaatgctcttgcgcttcttctggtagaacagagcaatggcggacgccagctccttggcgccgccgacactgccgccccgcttcttcttgctgcgcgaccccgtcgacggaagcggtggaggtggcggcgggggcggcgttccaggcgggaacatggccggcgttggcggcggcatcgggttcctgacctcttccactgctatctcttgctccagttcctctggcctcggcagcttctcgacgctgcgccgtcgccgtcgggtaggcgccggcggcggtggcggaggtggtggagcagcaggggccatcgcccg

SEQ ID NO: 34779 - DNA, 437 bp, Setaria italica
  Peptide Sequence Number=SeqID_100753
acacaagttcactggtacataataagtacctgtatctgcatactgcaagcaacataatccagatagttgcattacacataattttcataaatcaactcaagaagttcaatctacaatgtctgcatccagattctttgtaccatgtttcaacaacaggttgacgcttctttgtcctagccagttcttcgcatgcacctcagatggtttaccctgtttagtttgtttgatagctacttttcagctcacttcagtgcttcgcttctatctgcatcaaagagaatagctcatgttttgaatgagaaaaaaattctctacagcaagaattattatttttatccaacaagaacaagtcttatgtttatcagtaactagcacaaaaaatagaaagaaacataaaaaaagaacaaattatgcaatgtttagttttaggtacaaaa

SEQ ID NO: 34780 - DNA, 402 bp, Setaria italica
  Peptide Sequence Number=SeqID_100754
aggaaccatcaaaatggctgacgaactgaagcagctagcagccgtcatgcaggtagggcggcggtgcttgctatgaaccgcagcgtcatatattataacagcttttgttttgaactgtatctgcatactgcaagcaacataatccagatagttgcattacacaaattatgtgtaatgcaactcaagaagttcaatctccaatgtctgcatccagattctttgtaccatgtttcaacaaacaggttgacgcttctttgtcctagccagttcttcgcatgcacctcagatggtttaccctgtttagtttgtttgatagctacttttcagggtaaaccatctgaggtgcatgcgaagaactggctaggacaaagaagttcaatctccaatgtctgcatccagatt

SEQ ID NO: 34781 - DNA, 791 bp, Setaria italica
  Peptide Sequence Number=SeqID_100755
tttttttttttttaaatcaataaaccattagatagacattacgtgggatgctaggaacaaaagagaaaatgtgcatacagaaaaatttaaaaccaaatcataacacatacaaacatggttcaaccaaaacatttagcccacacaagttcactggtacataataaagtacctgtatctgcatactgcaagcaacataatccagatagttgcattacacataattttcataaatcaactcaagaagttcaatctccaatgtctgcatccagattctttgtaccatgtttcaacaaacaggttgacgcttctttgtcctagccagttcttcgcatgcacctcagatggtttaccctgtttagtttgtttgatagctacttttcagctcacttcagtgcttcgcttctatcttaatactgctcaggtacccctgcagatctcacttgtgcagaagttcgggaagaaaatggtgctcttctggacatcaagctcagccaatccttgcaatgttgccttcctcacatcaatagcaaatatcactgccaacttgtccatgtacctgggtctggtttgagaaagcaagtaaacgacatcatcatccatgcttaggatggggcatgccactggaagttccttccatgttcgtgtggtcttgctgctcagcatagccatgagatcagaaagacatgggtcactagcctccaagttgacgtctttaacgtcaattacacagtcacggtgccagccctcccccaaaccaaccggtattgccatgttccatgttgtggacttcc

SEQ ID NO: 34782 - DNA, 2108 bp, Setaria italica
  Peptide Sequence Number=SeqID_100756
ctgtttgtttttgaattttgtacatttttttccaataaaccattagatagacattacgtgggatgctaggaacaaaagagaaaatgtgcatacagaaaaatttaaaaccaaatcataacacatacaaacatggttcaaccaaaacatttagcccacacaagttcactggtacataataaagtacctgtatctgcatactgcaagcaacataatccagatagttgcattacacataattttcataaatcaactcaagaagttcaatctccaatgtctgcatccagattctttgtaccatgtttcaacaaacaggttgacgcttctttgtcctagccagttcttcgcatgcacctcagatggtttaccctgtttagtttgtttgatagctacttttcagctcacttcagtgcttcgcttctatcagcatacagaagttaccttaatactgctcaggtacccctgcagatctcacttgtgcagaagttcgggaagaaaatggtgctcttctggacatcaagctcagccaatccttgcaatgttgccttcctcacatcaatagcaaatatcactgccaacttgtccatgtacctgggtctggtttgagaaagcaagtaaacgacatcatcatccatgcttaggatggggcatgacactggaagttccttccatgttcgtgtggtcttgctgctcagcatagccatgagatcagaaagacatgggtcactagcctccaagttgacgtctttaacgtcaattacacagtcacggtgccagccctcccccaaaccaaccggtattgccatgttccatgttgtggacttccagccatcacggatgacctgggatttccttgagttattgcacacccagtcagtgtgggaaacaggggtggcattcagctcttctcggtacaagaattccaactctacatacttgatcgagtctttgtttcggctgatagttacgtcccgcaaatagctggggttacaatgtctgaggcggcaatcccagtcaccccttgccggcactggcagtgggacatcctggagcagtgggcattccttgagcacgtcgcaaaagaagatgccacgccagaggtccaccaggcgaccgtgccattgacttttgaatgagaaaaaaattctctacagcaagaattattatttttatccaacaagaacaagtcttatgtttatcagtaactagcacaaaaaatagaaagaaacataaaaaagaacaaattatgcatgtttgttttggtcaaatataatattcttgaagtgaaaacccagaggaacttagtttctgtcataaacacaactcaataccatgtccaataagaatgcatttggttccctgcagatgccccagccaggctctgtgggtgcagcttttgggcgtttggttgcctgggggaaggtctaagcctgtcccatggcatgcaaaagtagccagcgagcctggctcccaggaaacgagattgaaatccgtttctcccaagccaggctcgtgagatgcagggtattaacatgccaatgatggtattagcaaataattatcatgttttaaggcatattagtatatttcaaagtagattaagaattaatgacacaaataagtattgtacggacgattcaagcaaaataaaaataatcttaatatttctttttatttcaatataagctgtttagtattgattgacagaactccaccacagttaaagaaaactgagctgtggtcttgtttacttccataacagttttgctaacatttcacaggaaggatcgcacacaaacaacaaaaattcagcttaacacaaacttatttttattggattgccaggatttgtttgatcaactgatatacaacatcaacaacactgtacagaacaagtcatatcaataaccctccattgaatcacactgtcatcaagccatagctcctgaattagatgcactaacttgctaagctctagaccctactgaaaccagaatggtaccaacacagtgattcactagttctcatggcaagcatggcattcatacatatagtcgcacataaaaaacataaagggaacttaccagcatacagaagttaccttaatactg

SEQ ID NO: 34783 - DNA, 1166 bp, Setaria italica
  Peptide Sequence Number=SeqID_100757
tcgtacttctagttcgtctacttagttttactaattgttcttgtaggtcggtctatgttccatgttgtggacttccagccatcacggatgacctgggatttccttgagttattgcacacccagtcagtgtgggaaacaggggtggcattcagctcttctcggtacaagaattccaactctacatacttgatcgagtctttgtttcggctgatagttacgtcccgcaaatagctggggttacaatgtctgaggcggcaatcccagtcaccccttgccggcactggcagtgggacatcctggagcagtgggcattccttgagcacgtcgcaaaagaagatgccacgccagaggtccacccaggcgaccgtgccatgctcaccaccaattgtgatggtcttctccgtctcgtggtacagcctgtcgactgctcgaggtaaagggataagcttgtccctctcgaactcattcactgacaaccgcttggagatccaccctttggaatctgaggatctgtacaggtggaggtcgaagtcccacctaatgagcgcgcggccatcgtacagggggagcctaacaccgagagcagcaacgacataccaagcgccgtcttcgcggctaatgagggcagttgcggagtcgtcgagcaccctggggtgcgggttcggtagcagatttagccactgggcgcgcggcctgtagacgaagtagtcccagtccaatcctctgttggtgctgttggggtcgatgggaacgcggaggaggacgagatctgcgtcggtggcgacaatcttgggccctattttgcggaagtccaggccagggcagtggacacaaaagtgggagagaagtggcgggcgggcggcgcggaaggtcaccttgataggcaagccgctgctcgtggtgctctcggcggtggtgttgttggggaggtcggcgatgtagcaccacctgtcgaggagaaccaagcctgaggcggcggcggactcgggaagagaaggtggaacgcaggaggagacggtggaggcagccatgtccgtgaagggcgaggaagcagaggaggtgaacagatccaatccaagtagaggcaaggggatcggatgcgatggcagcaggcggcgagatttgggaacgaaatttggggctagggacctagggttcacctttgg

SEQ ID NO: 34784 - DNA, 702 bp, Setaria italica
  Peptide Sequence Number=SeqID_100758
ccatggcgtcgcggtggtggcggcggccgggctggcagcgaagggggctttggcgggacgttgcgcgctgggagggctccaccgccctgtactgggtcgtggtgctgacgctggtgctgacgtggcaggcgtgcttcatgggcacggcgggcgtgatctacctgacgtcgtcgctccacagcggcgtctgcatgacagccgtgctcgtcgccaacgtgctgggcggcgtggtagtcttcggcgacgcgttcggcgctgagaagggcatcgccaccgcgctatgcgcctggggcctcgcctcctacctctacggcgagtacaccaagaagaaggaggaggacgccgccgccgacctcgacggcgtccaaaagagcctcacaggttgcggtgccgccggaggcggcgaactagaagccgtctgaaacaaactaagggccactggggcacggattccatgtgatcctgggagaagcaagaatttgcaacagaaaagggtgcagtgccccaagaaacaacgtggcattaggtgcagtggttgagtcccatgttacatcgatggattacgcaaagttgctcgctagggacaagaagggtgaagtaacccgacttgtaactgatgaacagtgtgctggtggctgctagctggctagtgaggtttcattactgtctgatcatcaaggttagtgtagcatggatgggtgg

SEQ ID NO: 34785 - DNA, 273 bp, Setaria italica
  Peptide Sequence Number=SeqID_100759
ttgcgcacggctgccccggcgcggcggccgcggggcgggtacgggaagagcggcgccgagttgggcggcaccgcgacggccgcctccggcgtcacggggaccacgacggcctgcttcgtcatcgtcggggggcacgggtgggagagcgctatcgtggaagcgagagctgctgctccgatgacccgatggaaggaaggctctggtgcggaaccgagccggccaactgctagcgcgacgcagctgctactggagtctggagcagatgaggaggag

SEQ ID NO: 34786 - DNA, 298 bp, Setaria italica
  Peptide Sequence Number=SeqID_100760
gttgcggttcagcatcagaaactgaattaacgcctgataaccagatgccttctcaaaggtagcaatcttgtgaacaaacccaaaggcaaacacacacatgtgttccagatgctgcctgccatgatactccgtgacaactgcttgctaatccattcagatcaggcaaaagaatgtgctagaagttactaagacagtcctggcacatcaaaatattcctgcagacaaaatcagttgacctaaataacataattctcgatgctactgttaacatccttactagtgctgacagaatcggaga

SEQ ID NO: 34787 - DNA, 337 bp, Setaria italica
  Peptide Sequence Number=SeqID_100761
catcctacaagtgagccacactcgtaggatgggaaggtagagcagatgcttctcctggcattgctggagtaggcacccctggtggcattactgaactggtggctgcagaaggaacactagtgtgtggtggtggtggaatgacagcaccaacatttggtattggctgaggaccaagaatggaaggttgatcgctgcttgtagtaacatttcctttggtataatctctacctcgctcattgttaaccttaacattaagcgaggtagagattataccaaaggaaatgttactacaagcagcgatcaacatttggtattggctgaggaccaagaatggaag

SEQ ID NO: 34788 - DNA, 386 bp, Setaria italica
  Peptide Sequence Number=SeqID_100762
acattgagaacactgtgtgctgaatagcttattctcaaagtgcaggccccatccagttctggtagcaaatagctaggaatgcatctaccatcgagcgcagcttttgcggatgttgcggtttcagcatcagaaaactgaattaacgcctgataaccagatgccttctcaaaggtagcaatcttgtgaacaaacccaaaggcagaaaataccacatgtagaacatcgatgctgacagaatctggcgcgacaccctccattcccacaagcaaaacgttgcctgaaccttccccagtagtcttcgtgttgacaatctcctgtctattggagtactgaaggtacacattttttccctcttacctgcgctggctctgctgacgatgcataat

SEQ ID NO: 34789 - DNA, 451 bp, Setaria italica
  Peptide Sequence Number=SeqID_100763
tttttttttgagaaaaggattcatacaaatacaatgcccattatgaaacgtttaccacgattaacaagtaccctactacggagtaacttggagcagcaatggtattttagcctcagagagaaaacgacaacagagaaggattgacatacatccatctatgattctagcatagttcgattagctaacgactatagggaccccgtggagcaaatggaagctgccggcctccctgctcagagaatggcatcatctggggctccatacccggagggaactgctggttgccgtacatcgggaactgcggcattggttgccgtggaccttgtgaaaacggtaggcctccataacctggagcttgcatcatctggggacctggaggtagctgctgcgcactgaggccagggaacggcactgctctttgtccatgtgtgtttggaaccagatggtttcc

SEQ ID NO: 34790 - DNA, 2235 bp, Setaria italica
  misc_feature (1699)..(1699): n is a, c, g, or t
  Peptide Sequence Number=SeqID_100764
aaaaataaaggaaaaagaaactaagaaccggaacctaccctagactacaagaagatacatccatctatgattctagcatagttcgattagctaacgactatagggaccccgtggagcaaatggaagctgccggcctccctgctcagagaatggcatcatctggggctccatacccggagggaactgctggttgccgtacatcgggaactgcggcattggttgccgtggaccttgtgaaaacggtaggcctccataacctggagcttgcatcatctggggacctggaggtagctgctgcgcactgaggccagggaacggcactgcttgtgggccatgtgtgtttggaaccagatggtttccattgccaagatactgcatgaactgggctgaacctggaggcagctgatagttcacatggttggacatctgttgacttccctgacctgaaggctgcagcattggagcttgagccgagccataacctgggaactgttgaggaacaccaggagggcctgggaggattgcctggccagggtactgtgaaggtccacccaagggaacgacagcagtttgcgagtgtggctcacttgtaggatgggaaggtagagcagatgcttctcctggcattgctggagtaggcacccctggtggcattactgaactggtggctgcagaaggaacactagtgtgtggtggtggtggaatgacagcaccaacatttggtattggctgaggaccaagaatggaaggttgatcgctgcttgtagtaacatttcctttggtataatctctacctcgctcattgttaaccttaacattaagctcagtatgtcgtgaaaatgcaaggtgaagcttgcagtatccaccttcatagatgctgtgcccttctaatgcttcttttgctgcaactgcagtttgaatgtctggatactggatcaatgcttgaaagccattcttctcaaaaattgcaatcttttgtacaaatccaaaagcagaaaagacctcatgaagcacatcaattgtaacaacatactgcatgttctcaatggatgcaagaagtatattgctatctggttcctgctttctcccatccgctccagagccatctttagcagaatccagaaaaggaaggtaagggttagtgaagtccctactcctgtggctctgatacttgacattgagaacactgtgtgctgaatagcttattctcaaagtgcaggccccatccagttctggtagcaaatagctaggaatgcatctaccatcgagcgcagcttttgcggatgttgcggtttcagcatcagaaaactgaattaacgcctgataaccagatgccttctcaaaggtagcaatcttgtgaacaaacccaaaggcagaaaatacatgtgttccagatgctgcctgccataagaccacaggcaaaataaaatcaaatgcatggaatataactggaaagtgaaatgagcttaaatgagaagtgccaaacaaaggctgactgatatctcaatgccaggcacagtaaaattttgtataaacatatagagaagtgtaaacctaaaagatcaattttccaataatagtaatcaacaacaatgagtaagggtactagctagcagataactgcacaaggtagaaacattttaacctgctagtaaagacaatacaaataaatttatcatccatcttaggtttcatgacngaaaataccacatgtagaacatcgatgctgacagaatctggcgcgacacctccattcccacaagcaaaacgttgcctgaaccttccccagtagtcttcgtgttgacaatctcctgtctattggagtactgaaggtacacatttttcccctcttacctgcgctggctctgctgacgatgcataatatgatatcatggcaatcgcttgattttggtcagcgaattcgatgaatgcctggttgcggttggcgccaacaccgcacttggtgttgacgaccttgccgaagggggttcccagctcgaccaactcctccggggtgcagtcccacggcaggttccgcaggtggagcaccttcgacggcggctgcgtgtaccggaactgcggctgcccaccggaagccatccctcccgaatcttatcctccaaaccttgcaagtgccgccgaacggcggcggcgacggcgacggcggggagacgagaggccggagcggaggaagacgggttggattcgggaacgtatcggtgcggccaatcgtcg

SEQ ID NO: 34791 - DNA, 440 bp, Setaria italica
  Peptide Sequence Number=SeqID_100765
cttagtgcactcatgcttctctgacagtgtcaagaagcaggagaacctcaagtggtaactgacaacagtcttgaccatcttaaagttcctacaacagcagaaaaaatctagccaccttcttccaacaccggcataccatttgatgatatctgaatcatccaaacagagaagtagcttgattggccgtggccggcccatggagcttgtgaacccagctagcttcactgtgggccttacaagctctattggcgcattggccctcatcttcaactctgtcaggtcctcaacagtcctcttctcatattcttcctcttcttcctcttctgctagcctctcttcttcttctgccatgtcacggtccctcataggcataaaaaacctgtccagtgtctcttgaaaatttgtcaataatgaagtaccaaccaaaagacaaggtagga

SEQ ID NO: 34792 - DNA, 949 bp, Setaria italica
  Peptide Sequence Number=SeqID_100766
tccggctcgaacccggcggcccgggtgcggctctgccacgccttggcgatcagcacctcgaacgccgagcaccagccgccgcccgcgctgtactgggccttgaagtggttgatgtagtcggcggagatgtcgatggcgaggtactcgagccgcttggcgccgtcgggggtcgggaggccacctaccatggcgcccgcggggtcagggatcgcgtcgcggccccactgcggctcgacggacacgacctccccgccccgcgccagctcgccgacggcgttcatgaactgcgcggcgccgggaccgtcggcgaccgcgtggctgaaccggaacccgacgacgaagccgccgcacgcgaaggaggtgacctggacgagcaggacgagcgcgcgctcgtcctcctcgccggcggcgggggtgggcgggaggacctcgtccttgggaatcatcagcggggcctccaggtagtccacgtcctcgaggctgcacgccgccgcggcctccgtgaaccacacgccggcgttgctgcagtccaccgcctgctgcgcaccgtcctccgagaggaccagccggccggccagcgggtagtagtgcaccaatgcgcgagccagggcgcgctcgatcgtcctggccgggctcgcggaggcgtcggcgacggcccggtcgggggccggcttgaacacgtggagcgactcgatcagcgccatctgcgtcgggtaccggtccagccacgagaggcggagcgggccggccggcgtgggctcggccgggaccacgcggcgcgccgcgagccgctcgatggacttcgccgccgccatgaatcccggaatggagttggttcgagttgctggatggaaggtcggaggagggggcgggtgggatgaccaggtagctggagctggtggctgctggtgctctgctccccctttgcttggctttgatttgatttggt

SEQ ID NO: 34793 - DNA, 248 bp, Setaria italica
  Peptide Sequence Number=SeqID_100767
atcaggtgtagcggcccgaccgcgaagaccgggagagagagctcacgccggatcttggcgagctccggcgcctcgatcccctcgaacgtgttgacgacgacgccggacgccgaggaacggacggcgccggcgacgcgggcgatgaagccgcacagcgcgtcggcgtcgctgccgtcgacgcggatcaggtcccgcacgcggagcggctcgagatccggcaccagctcatcgagcatctcctctttgat

SEQ ID NO: 34794 - DNA, 495 bp, Setaria italica
  Peptide Sequence Number=SeqID_100768
gttttgtacggtgcgaggcggcgccatggtttccctccgtctcgcacccttcaccctcctcgtggagctcccggcgagccggaggaggctcaagctcgcgcggtgcaccgtccgcagggctcggagcgagtcggcgtccgcggcggccaaggcggtggcggacgccgactcgctccgagccctggccgaggagcggcggcccgtcgacgcccaccccgggcggcagagcgcgccggagaaggtgcccgcggacgaccgcctggtgggctacgagactctcctcgtcgcgcggttcctggacatcctccagggcctgcacggcggcgacttcagacaagtggtcgaggagtgcctgaggctctccggcgagtaccacgtcggcggcgacccggcgcggcttgacgagctgggcgcgctcctgacgagcctggacgtgggcgacgccatcatggtggcgagctcattctcgcacatgctcaacctggccaacatcgc

SEQ ID NO: 34795 - DNA, 302 bp, Setaria italica
  Peptide Sequence Number=SeqID_100769
ttccaaacataggtgagcagatcttcagagggtccagacgcatgcgtgtaagtgttgcgccggccggtgacgatctcgaggacgaggacgccgtagctgaaaacgtctgatttcgccgagaagatgccgtgcagggcgtactccggcgacatgtatccgtaggttccagcaatgtggctggtgtttccgacgcttgactcgatgttgaacagcttggccaagccgaagtcggagatcttggggttcatgtccccatcaagcaagatgttgctcgccttgagatcgcggtggatgatggtcag

SEQ ID NO: 34796 - DNA, 476 bp, Setaria italica
  Peptide Sequence Number=SeqID_100770
gtacatcaaatcggtgaagtttgaagaaggaataatgcccaaacttgagctgctgcagatcataggggaagcaaataatgaaattggattttctgggctagaatttctccaaagcatcaacgaggtccagctcagtaataacaatggatggctgaagaagaaaatccaggaactgcttgctggtaatagaaacgaaccaattgtgacggtgtactgagtctcgtacaggtttgcacttttgccatttcgggcgactctgatctgtaacctctttatatactttgcggttgcggcaggttcgagcacacctaccaggctgaagatcacgcggggctgccttgcagcagctgcaagccgcaaggggtaccttgtgggtggttaaaaatgaaccgttcaacctgtttctacttactttcttctgttattaggaagattgtttgtacttgacgagaattccatgatattatttgttgggc

SEQ ID NO: 34797 - DNA, 401 bp, Setaria italica
  Peptide Sequence Number=SeqID_100771
aggaataatgcccaaacttagaagacggactagacaatttacaacaagggggaagacaaaataaatgtgattggattttctgggctagaatttctccaaagcatcaacgaagctcgacgatgtttactttccctgggatttcgaaaggataagtgctgctccagattctgagaccagggacaagatacgggtacatgacgagaattccatgatattatttgtaggcccatccaaacacttgtttataaatgagtggccaaagttcatttccttttgttgttagcgtacaattgcacattatcatggtttgcattttttgggttaatgatggaaagattagactactaaattttcgacatgagcgttagctaaagtttatgaagtgtgagctaatttatgaa

SEQ ID NO: 34798 - DNA, 618 bp, Setaria italica
  misc_feature (470)..(470): n is a, c, g, or t
  Peptide Sequence Number=SeqID_100772
tacggtaaagtttgaagaaggaataatgcccaaacttgagctgctgcaggtcataagggaagcaaataatgatctgctgcaggtcataggggaagcaaataatgaaattggattttctgggctagaatttctccaaagcatcaacgaggtccagctcagtaataacaatggatggctgaagaagaaaatccaggaactgcttgctggtaatagaaacgaaccaattgtgacggtgtactgagtctcgtacaggatcgatcattcgtgcaaggctgaagatcagcggcccaggtgcccaggagggttcaatttggtcaacacacgaacgcacacgatcgtgcagctcgtggaaggggctcgctgcagcacctcggtgcaggccgatctgaccggttacagggaccggtctgaccggttgtcgggaagaccgacggtagaccgacgaacgctcgcccgggagggaccccgtnagggcaggcgcatgtaaggttgttataggggccggcaggccacgtcgagacgaaggaagacagcaggttggattggaaaagctagggcaaaagataaaagaaagatgacaaaatattagattggtttttgactaaaaacttttaaaaa

SEQ ID NO: 34799 - DNA, 1904 bp, Setaria italica
  misc_feature (1894)..(1894): n is a, c, g, or t
  Peptide Sequence Number=SeqID_100773
cgtgccgctgtttccaatctcagcaggctggaatcgctgtcggtgcgttcagcagggaagcgaggtttgcgtggctgcttggatggaatatcctcccctccggaaaacttgcagagcctcgagctctacggcaatctggaaacgttgccggaatggatcaaggagctcccgcatctcgtgaagttgaaactagtgagcaccaggctattggagcacgatgctgctatggaattccttgggaaactgtcaaagctgaaaattctaagcttgtcttgggaatcgtttcagggtgaagaacttcgcttccgatctgagcagactggaagagctttcggaagcctcagcgtgctcatgcttgcaaacatagggtacatcaaatcggtgaagtttgaagaaggaataatgcccaaacttgagctgctgcagatcataggggaagcaaataatgaaattggattttctgggctagaatttctccaaagcatcaacgaggtccagctcagtaataacaatggatggctgaagaagaaaatccaggaactgcttgctggtaatagaaacgtaactaaagtaacttaacgttaaggtaaaaggggtacttacgtacttagttcttagttcgtactttggttttttagtattgcgagatccagggagggcttgggccagtgacggtggcggcatgtggccggcagtggcggcggcggcggcggtggtcggcagtggcggcggcgaccagcgactggtttttttattttttctgaaattgttgccgagtgttttttgggcactcggcaaaagctttaccgggtgcccagcaaaaaacactcggcaaagtttgtttaccggcaggttttttgccgtgtgcccactgccgagtgttacactcggcaaagggttcgccgagtgtttttggggctttgccgagtgccccaggcactcggcaatgttcctgtgtcccgtagtgcaacccattgtgagggtggtggactgagtctcgtgcaggtttgtatttctgccattttgagcaactctgatctgtaacctctttatatagaatatagatacacaagaacacaaggacatcctttgtggcaggatcgatcattcgtgcaaggctgaagatcagcggcccaggtgcccaggagggttcaatttggtacgtgcgtaccagtgtccatgccgcccttccctggtgctcctactactcccgcaaggggtgcctgcggatggttacgaatgaaccctccaacctgtttctactttactttctggtgttatatgaagatgtttttacgtgacaagaatccattgatattaattatttttacggcccatccaaacacttgtttataaatgagtggccaaagttcatttccttctgttgttagcatacaattgcacattatcatagtttgtgttgatgcttttttaggtcaacacacgaacgcacacgatcgtgcagctcgtggaaggggctcgctgcagcacctcggtgcaggccgatctgaccggttacagggaccggtctgaccggttgtcgggaagaccgacggtagaccgacgaacgctcgcccgggagggaccccgtcagggcaggcgcatgtaaggttgttatagggccggcaggccacgtcgagacgaaggaagaacagcaggttgggattggaaaagctagggcaaaagaataaaagaaaagatgcaaaatattagattggtttttgtcaaaactttaaaaattaggatgcagaatcacttcagagaatcaggagaagctactttttctttcgtacgttgaggacggcaattcgttcccctcgggaagcatgttctttataattttcattaactcatcaaaaaacttgtcagaaaactcccaaaaaaaaaaaaaaanaaaaaaaaaa

SEQ ID NO: 34800 - DNA, 965 bp, Setaria italica
  Peptide Sequence Number=SeqID_100774
gggagtattacaatcagaagctgattttttttctggttcaacaattcatttgcctcttattacattacaaaccggagcatagagtgcacgcatttggatgaaaaaggagagaaaaggaaggtggactaatttttttctggttcaacaattcatttgcctcttattacattacaaacggagcatagagtgcacgcatttggatgaaaaaggagagaaaaggaaggtggactaatttcattcaaacagaacaacagaattggctggccacctaggcaacatggacaactccacctgcaggaactgaaagcgttaagcactttgatttcaaaatattaaaccagaatataacatcaactgcaaaacgacacattggagatccttgcaggtttaacagtttaaaagagaaagaccaagatccatggagatttggattactatgaaactacatgacaaacatattccatccaaaacagctttgttcatttgccctcaatggactaaacaatcaattatcctttcatcaaatgcattcataatatgatagcataaaaattgtatgaataatacccacaagctaatagctgaaacccaacaaactaatgatttattgtcagatacggatgttttatttcaaggccaagatcttccttttcaccaccagaaggttgatagtcaatttcttttctaacatgtcaagataacagaaggttattcagagaaaaatgacaaccacaccaaagaaactatgccctaggaattgatcaggggcaccggtatgcaaaatatactcaagcgataacattatcaagggatggattcattgtaagtttgtaaccaccaaaagggtatactaagaaaaggtcttgtacagagacggctagactttcctacaagtacataaacatctttacagcctactttacgagcaaagatcaataccttatcatgctaatactgtgagaaag

SEQ ID NO: 34801 - DNA, 691 bp, Setaria italica
  misc_feature (1)..(109): n is a, c, g, or t
  Peptide Sequence Number=SeqID_100775
nnnnnnnnnnnnnnnnnnnnnnnnnnnnnnnnnnnnnnnnnnnnnnnnnnnnnnnnnnnnnnnnnnnnnnnnnnnnnnnnnnnnnnnnnnnnnnnnnnnnnnnnnnnnntctcagtttgactagatcttcaatagttttctaattaagtagtcaaaaggatatagagtgagtgcatgcgcacatgtcccagatataagtcaggaaacctcatcaaacttgggagtattacaatcagaagctgatttttttctggttcaacaattcatttgcctcttattacattacaaacggagcatagagtgcacgcatttggatgaaaaaggagagaaaaggaaggtggactaatttcattcaaacagaacaacagaattggctggccacctaggcaacatggacaactccacctggtcccatcagtgcttcttgtgctcctggacgaacttggagttcttgaggtcctcctcggtgaagttggccgtcatcttggtgatgaggaaaccggtgatggcgaagccggtgaggaagggccagttgcggcgccactcccggcggaagaacaccggccacgggtcgaaagtcttcatctccggctgcgtcgcctccgctcgatctccttcctcctccgcctccggcttgacggattctggtggggaatggattgggggggaaaaggagtgcgactgagtcgga

SEQ ID NO: 34802 - DNA, 485 bp, Setaria italica
  Peptide Sequence Number=SeqID_100776
aacaaattaacaattgacgcgcagtgagaagacggccacccaatccgcaaggaagcgaagctcctctgctccggtcgggtcaggtcccttttctggttgggttctccggtcggttgcttccgatggacggcgccgccgctgctgcaggaggtagtggggagccggcggccaacgggtccaaatctgaggggcagcagttcgatcccagccggatgattgggataatcaaaaggaaggccttgattaaagatttggctgctgcgtaccatgctgagtgtatagcatcctgtaaagaactcttgcagcttcagagaaagtgggaggaggaacagtatgtggaagtcaaaatgcctgaagaaccaagactgatgacaatgaagacctcaaagcgtaggaagaagtagatttaggagattaagagcactttcagctctgtcaactgctgtggtagttagcttgacagtgaactaaatacaaggaacatt

SEQ ID NO: 34803 - DNA, 2815 bp, Setaria italica
  Peptide Sequence Number=SeqID_100777
aagacaaagtaagaacagccggtgcaacgaaggggggttgttcttcagggtgctcggagatagtcgaactggtggatgaacccaaagatgcccgtccgggcggggtcacccacctgagggtgagggtcaagccggtggggcaggagcatggggcaaggtcgtgctcggtggaggatgatctcgaccggctcatcagatcgatcaacgtgcgcacgtcggcgagggcctctgggcagacgagcacggataggcggcttattgcgctcgggaagtcgcctgtgtcgagctcggagattgtggagtcggtgagcctgaagcaggctctgaggaagatgtgcatctcccaggcgtcggagatggctgccatgaagaggttgtccaagccgtcaggggtgtcgacacccccagattccggggcgatcaggaaactatatggctctgttgcagttcagaccaatgaggagaaagatgacaagagtaaggttgagaaagtttctgtcttgcctgagaaggcagcagggagtttgttgggtaagccagttgaaaccagtaagggacagagcaagagctcgaccaagaagaattcgcgatcagcatctccaaccgcagccaagatccataaaaccaggatccaagatgtgatcagtaataaatcatcagaggcagttgacgatcctcctgcaggaacaacactggcaaaacagagaaagggtaaacctgcgaaagcatctagtccccgggctgttccagtaggtggttcacggctggtgaagccaatgtttcggaataaaacctcaacgaaaaagaaggttaaacctgaaccagcttctgtggctgcatcacagaagcattgtgaggcaaaaggttctaattctcacactggtaaccaggaggcccttcaggaggaacccagaaccccagcaccaactaacaagaaggctactatcagctctacatgtgttgaaggagctgattttggcaccaaaggatgtggtgttggtgcaatccatggctcaaaggttggtgagttgtcaagatcgaaggaaaagggtgaatgctcccaaagctcgaagagcagcattggtgattatagcactagcactagcatcagtgaggatagttatggcagtttcagtgctaatggaaccaggcctcacatgtcaaaggatgtgagatggggtgccatcaggcgtttggctatccagcaagggtgcttgggtttgaagaacttcaagcttctcaaacaacttggttgtggggacattggcactgtttatttggctgagttggtgggctctgactgcctgtttgctttgaaggttatggacattgagtacctgataagcagaaagaagatgctcagagcacaaactgagcgggagatactgcaaatgcttgaccacccattccttccaactctgtattctcatttcacgacagacaacctatcttgcctggtaatggagttttgcccaggcggtgacctgcatgttcttaggcagaaacaacctaccagaaccttctcagaagcagctgcaaggttctatgttgccgaagtcctcctagccttggagtatctccatatgttgggggtcatatatcgtgatctgaagccagagaacatacttgttcgtgaagatgggcacatcatgctctcagactttgatctgtctcttagatgctcagtaagtccaatgcttgtgagaacatcatcagtaggcagagatgagcccagtaggccttctggtccgtgtgcgcaaagctgtatagatccattgtgtatccagccatcctggagcaattcatcctgctttacacctcggctggtttcgtctacaccatcgaggacacggaggcctagagctgaacccctgaagaagccatcacttccacagctcgttgtcgagcccaccgatgcaagatcaaattcatttgttgggacccacgaataccttgccccagagatcattcgaggagatggccatggtagctcggttgattggtggactcttggcatcttcctttatgaattactctatggcaagacaccattcaggggacctggcaatgaggagacactttcaaatgtgatctcgcagggcctgaagttccctgataacccagctgtcagcttccatgcacgagatctgatcagaggcctgcttgtgaaggagccagagtatcggcttggttcatcaagaggagctgctgagatcaagcggcaccccttctttgaaggcctgaactgggccttgatccgttggactgctccgccagagaccccgaaaagcttcgatgctgctgcagcaaccctcgcgacgacacgcaagaaaaaggaaggcaagtgtctggagttccggctgaacggcgatgacatcgagtttgagctcttttagctttagcagtagtagtgttactgttgttgtcccaaggatatatcaagatcaagataagctagctagtagtagtctgtagtctcccttcgctgcagttttctgttgaaaatgagtcatccttcgccatttgggacgttgggaagtacgtaaggttggctgtgagcctgtattttatgccttgttaataccatgaaatattagaagacacggttgggaaattcctgggcatgagcttagatgcaactggtagaagtgtagaatgcgtttctggatgtaatagtctgttcctggctcctggattgagctgttacttgctaatgcagaggcactccaagtcaggcctgtaactttatacgaccatgttaataacgtactagtacaaaggagcacggattcggcagtaaaatgacaaaaaaaaa

SEQ ID NO: 34804 - DNA, 497 bp, Setaria italica
  Peptide Sequence Number=SeqID_100778
gggaggatgaacttttgtatcttagattgcagtttaagctgcttgaacctagagatggatttgtatcacttgacaactttcgaacggctctgacaagatatttaactgatgctatgagggaatcaagggttcttgagtttttgcatgcgttggaaccacttgcgtacagaaggatggactttgaagaattctgtgctgcagcaatcagcccttaccagcttgaggctttggaaaggtgggaagaaattgcaggaacagcttttcagcactttgaacaagagggcaaccgagttatatcggtcgaggatttggcacaggaactaaatctcgcaccgactcattattctatcgtgcaagactggatcagaaagtcagacggcaagctaaactttcttgggtttaccaaatttttgcatggtgtcacgatacggggctcaaatacaagacgacactaaatggatgcaaattgtattcgcttctaattttaaagcctctca

SEQ ID NO: 34805 - DNA, 263 bp, Setaria italica
  Peptide Sequence Number=SeqID_100779
cgatcccaccacacgagcagagcggagcaaccatggcggcgcctccgccgcacccgttcgtgtacatcgacgcggcggcgctccactcgcttctcccgttcccgtccctgatcccgcacctccgcgcgggcctcgcccaccccgagctctccgccggcatccagtgcccgcagcgcgtctcgttcccggtccccaccgcgccgtccgccgcgctcctcctcatgccctcctggtgcgcgcacccctcgctcccgtacctcgcg

SEQ ID NO: 34806 - DNA, 628 bp, Setaria italica
  misc_feature (625)..(628): n is a, c, g, or t
  Peptide Sequence Number=SeqID_100780
aaccaacggcggccacaccgtgccgccggcgataggcctcgcgtcgtcccgcggcatgagcggcccgatgagcaccgtcgcgggcgcgaccaccgccaacgcctcgtcgtctcccccgtcgctccagatgcagcacttcatggcgcaggactacgggctcctgcaggacatgctgccgccgccacccttcgtccacagcaacggcggcaacattcagccctgaatgaattgatggtcaccaccgccacaggcaagctaatggagaaggaagctagataagagatagtagtacttaatttggttcttgttaatgcttaacctctttaatctcctcttttttcaccgatttaatcctctagatatgatcgatggatcggttcttgatttgtttttttccttccctcctgtgctgcgagacacatggcgctacagaggttttctggcgcctggtctcgtaccatttctatgatcatcatctagctagtccttgctgatagtactagcggttcttgtacatgtacctaatcaaccaacagctcatgcattgcactctagctatgctgctgcagtactggccatgggctatgataattttatgctagctcctctttgcattcctccaaannnn

SEQ ID NO: 34807 - DNA, 1804 bp, Setaria italica
  Peptide Sequence Number=SeqID_100781
ttttttttttttgaacaaatgtggattgaagtgaaaaaagagcccaactttcctgtcaatttcacccaatggttgggaggggattatcacttcatcgcacccccctgcgagtgaaggacgattccatttacccaaactacagcatcgattgttctttgcacaccacaaatgtactaccacctcaacctactcaagtgcaatcatacacgaaagaaggagctcgtggtttctgacatattttacaacatacagatcactaataaataatatcacaacagcgccatccttgccgggcggcacaaggaccttagaacctgaatcactaaactacctgatggtctatattgttccataccgtccctgcacagcagccccaacttcatgttggacttggagcaaagccaaactttacacaaaacatatcgcggcacatgagacacgtcctgtactttccagcctgcaaaaaaaaaagtctagtcctggagagctttcacgcgggaggtcagctctcggacttgattcttgaggcgctcggggttgcagaagaaatcaacgaatatttgcctctccctccccacctcatgagcacgattctcgaagatctttatcttctgggtgcgagcctttgttacttcttccacagaaacttcaacttgagcgtttgcattttccatatcatcaagcgcccgcatcagtggccaaggtgtcaatatcggttctgcagttgttgatgatgcaaacaaaagctgttccacagtttgaatcagagtgcatagctcattgataaatcttttccggtcagctggaagggtattctccagctcagactgaagagaaagcaagtcagattgaagagctgatatctgctgaaccaatgcatgtgctgacatgtatgttggcactgttgcttggacatttgagtgaatacataggagatctcgcactgcatggaggaaagtgtcacgatcatcaattgctccttgttctcttacatcagatgcagcttgaattaatgaattataatggcccaaacgggtattgactgctgagaggtagctctggagctcagattctattactcgaagcaatgagtaagcactagctatattcttcctttcaagttggcaagcaatcttcagaaactggtgtctggcgagctgattaaccaagtgattgatgaacgtcttttgcctgttaatgtagtactcctggcgcatgacctttaaatcataatccccttgcaaaatatatgtgccttgaagttgagcaagttctgaacagaggcatggtatcgtctcagatacaaaagcttgcaccttttgagaaagtgttgagagctctccagcaagctcagaaccttttctcctgagagaatggatgtccctatgtatatgagcctcgtcggatgacacttgagctttcaatatagagagtatggcttgctgtttagcattctcaacttgtgcttcaatccactgcctttcacttgtagcaaatatggaacgaagccgttgcaactcagctacacgctggtgatgatgagatttttcagaatctcctcttatcaagcaattagtgatgtcatcaagactaacccaggaacatttggatttcccctcctctgcaacaagtcgaaatggccccttctcaaattgctttgagaaccacttatttagctgtttcgtacaagccaagtcgccaacaacataggggtggaagtccgaatatgccaagtaagttattacctcatcgcctgaatgataatgggccagttcctgggtatagccgcaattctccaagaact

SEQ ID NO: 34808 - DNA, 249 bp, Setaria italica
  Peptide Sequence Number=SeqID_100782
ggatccacagccggatgcatcgccatcttccaatcctagacgccgcacacctatcaccacaaaggtgccggtcgggcagggatgcggcggccggacggagcgagtcgccgagctagggttcgagggcacgcgcgtcctcggcgagcccgtccatctccgacatggctggtgcggcagctgtaatcgcccgcggaggacgaggcggatacagcatatggagcccgatttctggcccctgccctgcggctg

SEQ ID NO: 34809 - DNA, 300 bp, Setaria italica
  Peptide Sequence Number=SeqID_100783
tcgccagccaccggattacatgacattctcgctggtgttctaaattatactagttcaaatcaattagtgtaaaagcagcataggatttgcaggcaacaggtcataaattgctcaatcattcaccgttggcatcagtggtccgtccgaagcactaacagaggtccaatttttcggagcgccaaaggccatttgagttgcaagttgccgctgcctatctctgaactttacccaaaaaggttgtcatttcacgcaaaaagcacgctgtaatcacacacacacaccgttagccacttagtcctt

SEQ ID NO: 34810 - DNA, 325 bp, Setaria italica
  Peptide Sequence Number=SeqID_100784
caatctcagtattcctagagatgaaagctaataatatcagacctgatgaggtcacacttgttggtatcttgtcggcttgcagtcgtgctggatttattgatgaaggattgaagtatttcaactcaatggaaaaggagtactcactaaagcctgtggctgagcactatgcttgcatggcggacatgcttggaagagctgggagactgaacgaggcatttgaacttgtgcaaggaatgcagatccaaccaaatgcaggcgtgtggggtgcactgcttggagcatgccggctgcacaaaaacgattgagcttagtctacgtatttggt

SEQ ID NO: 34811 - DNA, 468 bp, Setaria italica
  Peptide Sequence Number=SeqID_100785
tacgctgcagttcggttacgccggcatgaacgtcatcaccaaggtgtcgctcaaccacggcatgagccactacgtgctcgtcgtctaccgccacgccttcgccacgctctccatcgcgcccttcgcgctcgtgctcgagcgcaaggtccggcccaggatgacgccatgggtcttcctccagatcttcgtcctcgcgctgctcgggccggtgatcgaccaaaaacttctactacgcggggctcaagttcacctcgccgaccttctcctgcgccatgagcaacatgctccccgccatgaccttcatcatggccgtgctcttcaggatggagaaggtgaacctgaagaaggcgaggtgcgtggccaaggttgtgggcacgctcgtgacggtagccggcgccatgctcatgacgctctacaagggccgcgtcgtcgagatggtctggaccagggccacatccacctccacgg

SEQ ID NO: 34812 - DNA, 213 bp, Setaria italica
  Peptide Sequence Number=SeqID_100786
tcaggaggagacgtcatcaatatcttgtttgctataatgactggggcaatgtcgttaggtaatgcaacaccctgcatggcagcctttgcagaaggacgatctgcagcatacagattgttcgcaacaatcaagaggaaaccagaaattgaccctgacgacccaagcggcaagcagttagaagacatcaagggtgatgttgacctaaaggatgtg

SEQ ID NO: 34813 - DNA, 1444 bp, Setaria italica
  Peptide Sequence Number=SeqID_100787
cggcgacttcccccccgacggccgcgaggactggtcccccgaggagttccagaagggcgtcatgaaggagcgcgagggcaagcgcccgctcctcaccggcgaggtcgccctcaccatgcgcgacgggcgcgccacggtgtccgagctccagttcacggacaactcgtcctgggtgcgctgccgcaagttccgcatcggcgtccgcgtcgcgccggggagctacgacggctccaggatccaggaggccatgacggatgccttcgtcgttagggaccaccgcggcgagctctaccggaagcactaccctccccacctcgttgacgacgtctggaggctcgagaagatcgggaaggaaggcgcgttccaccggaagctccggcaaaacaacgtcgtctccgtccaggagttcgtcaggatgctcatggtgaagcccgacgagctgcgcgcgattctgggcgagggcatgaccgaccgcatgtgggaggtgacgacgaaccacgccaagacctgcgtcgaccgcgacgataaggtgtacgtgtacggcacgccgcacggcaccatctacgtggactccgtcttcaagctcgtgagggtcgagatcggcggcgtggagtggccgctgcagcagctgaggggccaagcgcaggtgatcgtgcagcagctgatgctggaggcgtacgagaatcgccacagcctgcaggaggccgaagccttcatgcttcctggccatggccacgccgccaacaacgttccgctgctgcagaatgcagcacatgtcgcgctgccggcgcctggggaggcacagctctggtacccaaacgccccggagatcgagttcccggtcgacgacgtggttcctcccatcccccaacccaacaacttcggctaccagtggcctggccaagtgttccatatgacaggttaagaattgcactgggaaatgcccccaactcaagtgaagatcacttgcaacgcaaggttccaaggcttccagctataggatgtacattaaccaaatacagctacgtggtgtctgtctgtccacgaaagtgtgtggtcggtctgtgtgttgtcaagtaacggcagggtttaagggtaggtgaaacttgagcggcccttccactgcgtcgctgagcatgcgcaggccgagcgtccgccgcgagcagcgagaagaggcgtgcaagtgcaaaaattctttggtttaattcgtatcctttgttgtaatgtattttctcagtttttcgttcagcctggtcctagtagcgcctcggctctgcgatgttttgctccaaaagagctgcatgtaaatgtaaaatggcagggcagcggttctgggcaggcgaacgagtgtggcatgcctgcaagggctgtagaacttgttgtaaacagacagttctactttttttttcttaaaattttctagtaagtttttgtgtcctgtaaa

SEQ ID NO: 34814 - DNA, 253 bp, Setaria italica
  Peptide Sequence Number=SeqID_100788
ctaagagagctgcaactgagcgagctgagcaacctgacatctgtggagaacttcccttctgttgtggaacttgacgtgttcgactgccccaagctcaagaggattagcagcctctccaggttgcacaagattaggatcgtccgttgcccgaagctggaggtgttgcaaggtgtccctgtactcgacagcatgtggctgcgtgacgccaccatggagacacttcctggatatctgcaagctgtacacccaaggt

SEQ ID NO: 34815 - DNA, 324 bp, Setaria italica
  Peptide Sequence Number=SeqID_100789
cggttccaacccggagccgaggatgctaactagtgctgaaaggtctatacagaagatgacgtccgagtttgatgagtcggccattgttggggagaagatcgagcaggatacaagagagcttgcacagttacttatcaccggtggcctccacgatatcaaggtggtgtccatcgtgggcacaggtggcatgggaaagaccacccttacccagaagatcttcaacgaggtaaccatccaagagaacttcaaagtgaaggtatggctcagcatcacccagcacttcgacgagattgagctgctcaagacagcaatcgagcatgctgg

SEQ ID NO: 34816 - DNA, 312 bp, Setaria italica
  Peptide Sequence Number=SeqID_100790
cgtgaaacggccaggattagcagcaaggagcaccttgagtacatggaattacgatggacttgtagtggattcatggaattgagggatgagagcaagaagcaacagcagcaggaagtagtggaagaggtattggagaagctctgcccaccaccccgcattcacgatttacatattcaaggatactttggtcgcacgctaccaaattggatgatggtagtggaagcatgtgcctttaagagcttgagcattttgaggctgcaggacctgccttgctgcaccaaactccctgacggcttgtgtcggctccctagt

SEQ ID NO: 34817 - DNA, 414 bp, Setaria italica
  Peptide Sequence Number=SeqID_100791
ccagtggtagtaatgatagtcttgttcgtcgcttgtccataggaccaaccagtttggtatctggattggctgctctacaaaaacagtcagtaagaacattatttataaattccaagatcgactttgagctgagtgattcgctgaatagtttctctatgctaagggtattgtctattatacatggtggagattgtgataggttgcttgattccctgtctcagttgaggcacctaagatacttgggattagagggaacaaatatatctaggctgccagacaatatcaacaatatgaagttcctacaacatattgtgcttccagactctgtacatttggagaatcttcctagaaccattatacaaatggtgcatctcagaactcttaacatgtatcattccaatgccaatatggtaa

SEQ ID NO: 34818 - DNA, 389 bp, Setaria italica
  Peptide Sequence Number=SeqID_100792
cggtgaggggttgggcgtgtctgaccccttgcgcccgggatcgggcgaggcggagacccgccgcgaggggtcgagcgtgtccgacccctctcgcccgagggtcgggcgaggcggaactctcttggatgggatgaggagtggccttggggggtcgggcgcgtcctaccccttgactcggggtcgggccaagttggcggaggttactgttgctggaggtggacccaggcccttatgatcgtcatttacggagtgtaaggaagtcgttactatttcctcctaacaccatccaagagcacttcaaagtgaaggtatggctcagcatcacccagcacttcgacgagattaagctgctcaagacagcaatcgagcacttcaaagtgaaggtatgg

SEQ ID NO: 34819 - DNA, 657 bp, Setaria italica
  misc_feature (455)..(455): n is a, c, g, or t
  misc_feature (462)..(462): n is a, c, g, or t
  Peptide Sequence Number=SeqID_100793
gtgaacttagcgaagtagtgtttttaggagttgcatatcaccattttacaattgaaatatggctagaactcccataaaaatttcaaaggtttcacctaacttgttaatagttaggtatgttcattttatgaggcaaggtaccactatgcgtgttgtatcatcaatagcagccaggagaaagaaaggctcacggttattgagtaagaaaatatgaggctggacctctcgtttgtgttggtgtaaaatatctatgaaattagtaggtgctaatcctcgggaacaaagtgttcattcgtattttctccagtctagagtgtcggaggcttggtataatttttaatctgtatttctctgcaaaggaagcgtgctcagtagatgcctcccatgttcttaacgactgcatgcatccgaagaaagtcacttaacgacttgcactgtcgtcctaaccatatagngaaaaanagggccaaggcaccagaggaaaagagcccaagcaacaaaggcaaagagcacaagcagttgcgccccgggaattcagattgtactccagagccatggcggccgtcatggatgccatggcaccctacgtcaagaagctgatcacggacctggcacaagaggaggtgttcaatgactacctaaggaagtactaccgga

SEQ ID NO: 34820 - DNA, 642 bp, Setaria italica
  Peptide Sequence Number=SeqID_100794
gtgcagcttggaagagataggtcctctttctaagcttcagaggcttatgttacatggtctcgaggatgtatctgccagctcgttggctgaaacggccaagattagcagcaaggagcaccttgagtacattgaattacaatggacttgtagtggattcatggaattgagggatgagatcaagaagcaacagcagcaggaagtagcggaagaggtattggagaagctctgcccaccaccccgcattcacgatttacatattcgacgatactttggtcgcacgctaccaaattggatgatggtagtgcaagcatgtgcctttaaaagccttagcattttgtccctggtgtacttgccttgctgcaccaaactccctgacggtttgcgtcggctccctagtctggaaaggttagccattatagatgcaccagccatcaagagcatcgggtccgaattccaggcatcatcctcttcctcaactgtgggtggaggcgtcactgaatctacatcgtcagcagcttttcctaatctgacacatctttctctgcttggcttgtgcgaatgggaggagtgggagtgggaggagcagactgtggatgtgactgcaggcgccatggccatgcacgctctcgagcgtctggagat

SEQ ID NO: 34821 - DNA, 810 bp, Setaria italica
  Peptide Sequence Number=SeqID_100795
ttgggagtacgaacaaggaagggagagctgccgaatatgaagcccagaatgggcgaaaaaacaaaaagaaaaaaacaacaacaaccaccatcaggtagctcctccgagtgggagaagataagccatatcaccaaggttgtcatctactacatcgaagattcagatgaagattgaagactgaatattcccagtgtgcagcgtcagatgacctccgaatgtgcagcgtcgcatgaatattcagatgaagattgaagactgcacgtcttgatggaaagatagcctatgcgttcagggaggaaagctatcgtttgaccaggcacagatgcagacgggcatcgtattgtgaaacagagtgttgtcagttgtgttacagccggatcgtctgacgagcagacaggcacaactgcaaacattgttacgcactggctatccctgctttcggctttgggcccctcggagccttaaagcatctacatgtgtcataatctcttatcgttttctatattttttagagcccctcggagccttaagtttgatttattcatgataattagtttgttaatctacaagagtcaattaagtatagcaaagtactgaatgttttgaagtgacattatcttgggagagttgttttggagttgcatatcaccattttacaattgaaatatggctagaactcctgtacaaatttcaaagattttcacctaacttgttgatagttagatatgttcattttatcgggcaaggtaccactatgcgtgttgtatcatcgatagcaagaagggcgcgtttggaggagctttggccggc

SEQ ID NO: 34822 - DNA, 843 bp, Setaria italica
  Peptide Sequence Number=SeqID_100796
catatcaccaagcatgacatcaactacgtcaaagtttcagatgcagcatcgcatgaatattcagatgaagattgaagactgcacatcttgatggaaagatataacgcccattcaggtaactggcattaattattctttctctatgccgaaagttgattctagattcccaactgttgtttgtactcctatattccttatctgtatccacagtaatctccatgcatcgttgcatcaattactgctatgccaaatatttgtgccgtcaacagggaggaaagctttggtttgaccagggacagacgcagacgggcatcgtattgtgaaacagagtgtagtcggttgtgttacagccggatggtctgacgagcgcagacaggcacaactgcaaacattgttattgtgagccttgaagcatctacatgtgtcataatctcttatcgttttctatatttttagagctaatccatttcattcgagaagttttgatttattcttgataattagtttgttaatctacaagagtcaatcaagtatagcaaagtactgaatgttttgaagtgacattatcttgggagtgttttttggagttgcatatcaccattttacaattgaaatatggctagaactcccataaaaatttcaaaggtttcacctaacttgttaatagttaggtatgttcattttatgaggcaaggtaccactatgcgtgttgtatcatcaatagcagccaggattagcagcaaggagcaccttgagtacttggaattacatttggagtagcagtggatgcgtggaattgagggatgggatcgaacagcagcagcaagtagtggaagaggtatt

SEQ ID NO: 34823 - DNA, 1112 bp, Setaria italica
  Peptide Sequence Number=SeqID_100797
cttccttcatagtgaactcgccctccatcgtggacacatttctcgccactgcattcttccactgactacgttgaggcactacgctccagccatggcggccgtcctggatgccatggcaccctatgtgctgaagctcatcacggacatggctaaagaggaggtctccatgctacgaggagtctccggcgagatcaccaggctggaggacaacatgaaaggcatcaaagccttcctcgaggatgcagagaggaggcgccttaccgaccagagtgtgcagagatgggtgaggaagctcaaggacgccatgtacgacgccaccgacatcatagacgagtgccaactcgaggctgacaagcggcgggggtcgtacagaagacggcagcagtgtgaagaagaaggtgtcagagggttgcttccagtcgttgcttttctgcatgcggaatcccgtgttggcccacaagataggcagccgcatcagggatctcaacaagcggctggatggcatccacaaggaggcagacaggttcaagttcagtatcaacctcggtccaacccggagccgaggaagctaactgatgctgaaaggtctatgcagaagatgacgtccgagtttgatgagtcggccattgttggggagaagatcgagcaggatacaagagagcttgcacagctacttatcaccggtggcctccacgatatcaaggtggtgtccatcgtgggcacaggtggcatgggaaagaccacccttgcccagaagatcttcaacgaggtaaccatccaagagcacttcaaagtgaaggtatggctcagcatcacccagaacttcgacgagattgagctgctcaggacagcaatcgagcatgctggtggagtccatggagggacgcaagacaagacgctcctcacgcggaccctcaccaacaccttgtccacgggcaggtttctcctcgtcatggacgatgtgtggagtgaccaagcatggagtcatgttcttagtgtcccaatcagaaatgcaagccagaaacaacaggggaactgggtcctaatctctacaagattagaagacctggcccaacggatgggagcctccttctaccaacaccatgtcagcc

SEQ ID NO: 34824 - DNA, 1120 bp, Setaria italica
  misc_feature (1096)..(1120): n is a, c, g, or t
  Peptide Sequence Number=SeqID_100798
agctgcatgattccattatttcaggtagctcctccgagtgtgagaagatcagccatatcaccaagcatgacatcaactacgtcaaagttttcagatgcagcatcgcatgaatattcagatgaagattgaagactgcacatcttgatggaaagatagcctacgcattcagagaaaaagagggccaaggcaccagaggaaaagagcccaagcaacaaaggcaaagagcacaagcagttgcgccccgggaattcagattgtactccagagccatggcggccgtcatggatgccatggcaccctacgtcaagaagctgatcacggacctggcacaagaggaggtgttcatgctcctaggagtctccggcgagatcaccaggctggaggacaacatgtgaggcatcaaagctttcctcgcggatgcagagaggaggcgcatcactgaccagagtgtgcagagatgggtgaagaagctcaaggacgccatgtacgatgccacagacatcctagacctgtgcctactaaaggctgatgagtgcaggttcaagttcagtatcaacctcggttccaacccggagctgaggatgctaactgatgctgaaaggtctagacagaagatgatgtccgagtttgatgagtcggccattgttggggagaagatcgcccaattgctaatcactagtggcaaacacaacatcaaggaggtgtccaccgtggacacgggcagcatcggaaagaccaccctatgtggtccttaccgctgttgcatcttcatcaccatcgactctatcctcgatcacatcagtactagaaaaatgacgtctagtacgatactagtaaccccctctagtactggatgtgcaactggtattgaaaaattggtactagagaggggcctttagtaccggttcaaataaccggtactaaatgatacccttagcaccggttggggataccaactggtactaaagggcttcccacgctgcgcgggaggtgccctcattagtccccaaccggtactaagttttttctccctttcttttcttatctctgttcctttagtctatattcgtatttcgtatttgtttcctttaacgtnnnnnnnnnnnnnnnnnnnnnnnnn

SEQ ID NO: 34825 - DNA, 1214 bp, Setaria italica
  Peptide Sequence Number=SeqID_100799
aacaaacctaaaacaaccacttactctgtcgtcctaaccatatagagaacaaagaggccaaggaaccagaggcaaagagcacaagcaacaaaggcaaagagcacaagcagctagttgcaacgcgggaattcagatcgtactccggagccatggcggcggtcctagatgccatggcagcctacgtgaagaagctcatcacagacatggctgaagaagaggtgtccatgctgctgggcgtctccggcgagatcgagaagctggagggcaacatggaaggcatcagagctttcctcgcggacgccgagaggaggcgcatccctgaccagagtgtgcagagatgggtgagtaagctcaaggacgccatgtacgacgccaccgacatcatagacgagtgccaactcgaggctgacaagcggagggggtctactgaagacggcagcagtgtgaagaagaaggtgtcagcgggttgcttccagccgttgctcttttgcctgcggaatcccgtgttcgcccacaagataggcagctgcatcaaggagctgaatcagcggctggatggcatccacaacgaggcagacaagttcaagttcagtatcaacctcggttccaacccggagccgaggaagctaactgatgctgaaaggtctatgcagaagatgacgtccgaatttgatgagtcggccattgttgggagaagatcgagcaggatacaagagagcttgcatagttacttatcaccggtggcctccatgatatcaaggtggtgtccatcgtgggcacaggtggcatgggaaagaccacccttgcccagaagatcgtcaaggaggtaaccatccaagagcacttcaaagtgaaggtttctcctcgtcatggacgaaacttcgacgagattgagctgctggtggagtccatggagggacgcaagacaagatgctcctcacgcggatcctcaccaacaccttgtccacgggcaggtttctcctcgtcatggacgatgtgtggagtgaccaagcatggagtcatgttcttagtgtcccaataagaaatgcaagccagaaacaacaggggaactgggtcctaatctctacgagattagaagacctggcccaacggatgggagcctccttctaccaacaccatgtcagaccactgaatgaagaggacgcttggtccctgctcaccaaacagctgccgccagctcctaatcagattag

SEQ ID NO: 34826 - DNA, 960 bp, Setaria italica
  Peptide Sequence Number=SeqID_100800
tagttagtacttagtaaaggttacttaattactagtaagtattgtacgttccgtagttttgtattgtagttcggtcctatttgtttggggagaagatcgagcaggatacaagagagcttgcacagttacttaacaccggtggcctccacgatatcaaggtggtgtccatcgtgggcacaggtggcatgggaaagaccacccttacccagaagatcttcaacgaggtaaccatccaagagaacttcaaagtgaaggtatggctcagcatcacccagcacttcgacgagattgagctgctcaagacagcaatcgagcatgctggtggagtccatggagggacgcaagacaagacgctcctcacgcggaagctcaccaacaccttgtccacgggaaggttcctcctggtcttggatgatgtatggagtgaccaagtatggagtcatgttcttagtgtcccagtaaaaaatgcaagcaagaaacaacaggggaactgggtcctaatcactacaagattagaaaacctggcccaacggatggtagcctccttctaccaacaccgtgtcagcccactgaatgaagaggacgcttggtccctgctcaccaaacagctgccgccatctcctaatcaggtagattacctaagagatgtcgggatgaaaattgtcagaaagtgtgatggcttaccgcttgctgtcaaagttatgggaggattgctaagcacaaggtccagaagtgagcgtgaatgggaggctgttttgaaccatcatgcctggtcagtagctggattgcccaaggagctggacagccgaatctatttgagttacgaggatttgtcttcccagctgaagcagtgcttcctttactgttcacttttcccaaaaggtacaattatttcatggattaatgttattcccatgtggattagtgaggtttcgtccaacctcacgcggacagaagtag

SEQ ID NO: 34827 - DNA, 1221 bp, Setaria italica
  Peptide Sequence Number=SeqID_100801
cccacaagataggcatccgcatcaaggagctgaaccagcggctggatgacatccacaaggaggcagacaggttcaagttcagtatcaacctcggttccaacctggagccgaggaagctaactgatgctgaaaggtctatgcagaagacgacatccgagttcaatgagtcagccattgttggggagaagatcgagcaggatacaagagagcttgcacagttacttatcactggtggcctccacgatatcaaggtggtgtccatcgtgggcacaggtggcatgggaaagaccacccttgcccagaagatcttcaacgaggtaaccatccaagagcacttcaaagtgaaggtgtggctcagcatcacccagcacttcgacgagattgagctgctcaagacagcaatcgagcatgctggtggagtccatggagggacgcaagacaagacgctcctcacgcggacgctcaccaacaccttgtccacgggcaggtttctcctggtcttggatgatctatggtgtaaccaagcatggagtcatgttcttagtgtcccagtaaaaaatgcaagccagaagcaacaggggaactgggtcctaatcactacaagattagaagacctggcccaacggatgggagcctccttctaccaacaccgtgtcagcccactgaatgaagaggacgcttggtccctgctcaccaaacagctgccgccatctcctaatcaggtagttggacctgattacctaagagatgttgggatgaaaattctcagaaagtgtgatggcttaccacttgctgtcaaagtgatgggaggattgctaagcacgaggtccagaagtgagcgtgagtgggaggctgttttgaaccatcatgcatggtcagtagctggattgcccaaggagctggacagccgcgtatatttgagttatgaggatctgtcttcccagcagaagcagtgcttcctttattgttcacttttcccaaaaggtacacttattttgttgcgtcatgttattcccatgtggattagtgagggattcatccaacctcacgcggacagaagtagttcagatgatgaccaactagaagaaatagcaaccgagtactaccaggagttaatcaccaggaatcttatagaacgggatcctccttcccatctatacacatgcaaaatgcatgatgtggtgcgctcctttgctgaattttattgcaagagaagagtcg

SEQ ID NO: 34828 - DNA, 1616 bp, Setaria italica
  Peptide Sequence Number=SeqID_100802
tattaacattatttataaattccaagatcgaatttgagctgattgatttgtggaatagtttctctatgctaagggtattgtctattcatggtggagattgccgtaggttggttggttccctatgtcagttgaggcacctaagatacttgggattagaggaaacaaatatatctagactgccagatgacatcgacaatatgaagttcctacaacatattgtgcttgaaggctctgtacatttggagaatcttcctagaaccattatacaactgttgcatctcagaactcttgatatgtatcgttcgaatgccaatgtgataatacccaaggagtttggtgggttaagaaatctaaggatgcttgctggcttccgggtacacatggacatggatgggagctggtgcagcttggaagagatagggcctctttctaagcttaggaagcttagtttacatggtctcgagaatgtatctgccagctcgttggctgaaacggccaggattagcagcaaggagcaccttgagtacttggaattacattggagtagcagtggatgcgtggaattgagggatgggatcgaacagcagcagcaagtagtggaagaggtattggagaagctctgcccaccaccccgcattcacaatttatatattaaaggatactttggtcacacgctaccaaattggatgatggtagtggaagcatgtgcctttaagagcttgagcattttgattctacaggacctgccttgctgcaccaaactccctgacggtttgtgtcagctccctagtctgaaagcgttgtccattgtagatgcaccagccatcaagagcgtcgggtccgaattccaagcatcatcctcttcctcgactgtgggtggaggcgtcactgcatctacatcagcagcttttcctaatctgacacatcttgctctaaaaggcttgtgcgaatgggaggagtgggactgggaggagcagactgcaggcaccatggccatgcacgctctcgagtttctggagatcataaaatgcaagctgagctgttttccactggggcttgccaacaacaagaggcatgctctaagagagctggcactgagcgagctgaacaacctggcatctgtggagaacttcccttctgttgtgaaacttgacgtgttcgactgccccgagctcaagaggattagcggcctctccaggttgcacaaaattaggatcttccattgcccgaatgtggaggtgttgcaaggtctcccatcacttgatagcatcgaggtgaacgacggcaccttagagagacttccaggatacctaccatgtgtgaatccaaggtttctcaagttgacttgcagcaaggagctgcatgattccattatttcaggtagctcctccgagtgtgagaagatcagccatatcaccaagcatgacatcaactacgtcaaagtttcagatgcagcatcgcatgaatattcagatgaagattgaagactgcacatcttgatggaaagatagcctacgcattcagggaggaaagctttggtttgaccagggacagacgcagacgggcatcgtattgtgaaacagagtgtagtcggttgtgttacagccggatggtct

SEQ ID NO: 34829 - DNA, 182 bp, Setaria italica
  Peptide Sequence Number=SeqID_100803
accccataaccttgggagccaagcgtagcagcggctcgagcgtgtccggcgcgaacttgcgcgcgaacagatagcagacgccgctggccccgtcacggtagccggtgcagtgctcgccggcgccgcggcctcctcgtcgtcccctgatctccccgatcagctcctccgtcacgtcccgcgcg

SEQ ID NO: 34830 - DNA, 506 bp, Setaria italica
  Peptide Sequence Number=SeqID_100804
atacaattaaagtccaatgcagcatttataaaattgatacgtctcttggaaatttcatatggaatactgatattagtctcttgttggaaaattaaacagttattctgtttggtctcatcttcaagtttttactcatttctccctttgcatcaatcttatagtaccagttaaacttcaagtctttgtctcattgtgcttttcaaattaatcatttttgcttaagtatctgtcagttcaatatgtctgcgatgcacaatctattccgttgtgtcagatctgtatttctatggggtgttgctagatagataccgtcaaattgtacctttagtatgcatatctttttataaagaaacattgaagctacttagaaatctgttgtggttgaaaataatgggaattgttatatagaacaaccaccatacatgggatctggtactggctttggccttgaaacaaatgattaagcaagctgcttgtacatgtaaatgcaagacactgacgtttct

SEQ ID NO: 34831 - DNA, 257 bp, Setaria italica
  Peptide Sequence Number=SeqID_100805
ggaaagggcgatggcatatgctttgacacatcaggtaatttcaaatagtattgttctgtctgaaatttgtgactgattagctttgcattgatgcttgaaagactaaagatatatctagggtaaagctctggagagtttttattttgcttattttcttttctgttgtttaaagtgtattgttacaaacttgcaatcagaaaggatatttgaggctttttgtcttgtgggtgtgtatggatctcattacatgccttggg

SEQ ID NO: 34832 - DNA, 473 bp, Setaria italica
  Peptide Sequence Number=SeqID_100806
tcctaattgtctttaagtctttttgtctagtccctaattctagtcccttgctcattgaagcaacagctcggagagcaggaccgatgccaagaattcttgcccaaaatttctgcataactgactggccagccttcagagattcttgtacctgcttagctttagctttagcttttgcagtgcttaagccttccacagcctgatcgcattcttctggggatgcctccttttctttttattctgcttctggtcctcactctgttcatcatccatatccatcttaggttgccctgcagtagcggttgatgctgtgcgcactgactgcaacaaagatctagctcccatgggcagcccaaactcattccttccgattccatgatgagaaagagaaatcacatgagctggacgtcgcagaaacccattaccaagacctagcagatccttcttgatcaaattcacgctgcattgctccttct

SEQ ID NO: 34833 - DNA, 290 bp, Setaria italica
  Peptide Sequence Number=SeqID_100807
atcctagtattgactactgaccagcagagaaagtggcactaaccagaatattgctttagttgttgtacatattggaggatcacgattgacgaaaggccggccctttcaacatggtcatcgtttggtcgctttggcccggtgggttagtgaaaagcgagttcgttttgtcatgtgatgatggagccaaacccttttgactccgcatggcactgaatgcactatatctgtataatcatacagtgatgcagtactatactactggtggtattcagtgatggctgatggaaatt

SEQ ID NO: 34834 - DNA, 751 bp, Setaria italica
  Peptide Sequence Number=SeqID_100808
ccgtccagcttcgacttcctcgcgctgaagcgggagcttgagctggaggaggaggagggggcggtggtggctgtcgaggcggatgaggaacggggagctgtcagcgagggcgatggggagagggaggcggagaggagtgcgggaggtacgaggcagcggcggcggcggaggcagatggcgaggcgatcggctctgctagcgaagcaggtgatcagcgtgagctcggcccggagccttgggttcgtatcgcagctctgggtcgacgccgcctcgtggattgttgcactggttgaagtgaggccaagcttgctttcaggggaagcagagaaattcctttttgaggacatatgtcaggttggagatgtggtgcttgttgaggatgaatctgtgatcgagaatgaatataatctggttggattgcacagcttggtgggctacaatgttgtaacttccaggcggcgcaatgttggcaaggtgagtccatgtggtctttaaagagaggtgcgtggcttcacattcgacatcaattcaggtgctatggagtctcttgagcttgactcgtttgggttttctatcatcccttctagtctggtaagtacatactgtttgtttgtggaagatgtgctggatatactctttgatacaatcgtggtgcacgaagatgcagtctcccgggttcaacggttaacacagggcattttgggcactcaaaacatccgtggacctggcggtggtgagatggatgggtacc

SEQ ID NO: 34835 - DNA, 1225 bp, Setaria italica
  misc_feature (1224)..(1225): n is a, c, g, or t
  Peptide Sequence Number=SeqID_100809
tttgaagacaaccatttctgtgtggcaactatattctactctgctgtttcttccttatctcccattgcaaactttcctaatcccttctatgccatccgttgcacatgacatgtgggccagaagcccaggacccacattgtcagtgagacaagctggatcttttcaagtttacagtggcgtgaaaggaattattcctaaaagataaacctgcttctacattgaattaggcgttaccataaatgacaacaggtagtagtcaattcttaaagtgatatcatcttttctttatacaatcccattctattttttttcagtcgtggattgttgcactggttgaagtgaggccaagcttgctttcaggggaagcagagaaattcctttttgaggacatatgtcaggttggagatgtggtgcttgttgaggatgaatctgtgatcgagaatgaatataatctggttggattgcacagcttggtgggctacaatgttgtaacttccaggcggcgcaatgttggcaaggtgcgtggcttcacattcgacatcaattcaggtgctatggagtctcttgagcttgactcgtttgggttttctatcatcccttctagtctggtaagtacatactgtttgtttgtggaagatgtgctggatatactctttgatacaatcgtggtgcacgaagatgcagtctcccgggttcaacggttaacacagggcattttgggcactcaaaacatccgtggacctggcggtggtgagatggatgggtaccgtaggtctgggagaagaacgaatagtcagggaggccgaaaaatccataggaaagcgaaggatcccgaggatgaatttgagcttccaatggactattgatacatcgtactggttgcattcttgcatgacgaggaaactctccctgccagtattgagtattctggttagtgccactttctctgctggtcagtagtcaatactaggatattgctttagttgttgtacatattggaggatcacgattgacgaaaggccggccctttcaacatggtcatcgtttggtcgctttggcccggtgggttagtgaaaagcgagttcgttttgtcatgtgatgatggagccaaacccttttgactccgcatggcactgaatgcactatatctgtataatcatacagtgatgcagtactatactactggtggtattcagtgaaagaaaaaaaaaaaaaaaaaaaacnn

SEQ ID NO: 34836 - DNA, 316 bp, Setaria italica
  Peptide Sequence Number=SeqID_100810
cctatcccctcgtgtgccttgcctttcccctcgttgcgtgtctcaggcgatgtagaggtcgccggtcttggcgtggaactgcagccccagcgggcggccgcacatgctctccgtctcctccgacggtaccacgcccgccgtgcacagcgggatcttacggtagttggcactatgcgcgaacgtggtccagccggcggcgctgccgccccacttgaggacgcggccgtccgagacgccggcgtagggcccctcgcccttgccgtcgaacgcgaggctctcggcgccggtcacgccgctgggaagcgggaggtggaag

SEQ ID NO: 34837 - DNA, 299 bp, Setaria italica
  Peptide Sequence Number=SeqID_100811
gttccacttttcttttgaggctaacacacttccaacaggattataatgtgtcgatccatctgtattttgcaacctaagggttcctttgacttcaacttggccttggacattcccatcaactctaacgacggcagaaactacataagcagtgcctgtagacactctatttgtaatatcttgttcaagaccctgccagtgttctgtcctcttcgaaacaacagcatagttctctcctgagttccctctaataccatcaaggaaaccagaccattgtgatgccacatacgcatggcagcaga

SEQ ID NO: 34838 - DNA, 355 bp, Setaria italica
  Peptide Sequence Number=SeqID_100812
atgcataacacaaaactagaactaagacatccgctgcctcctgttacatatcttcaccatttgagataaataagatcgaaatatatacgctatagacttttaagtggggcccatcaggtggacctgtcaactcatcctagatattctgcttaatcaaccatgtgtactacatagtgaaccacaaattcggtggaatgtgcccacttgcatatcacaaaaggaataaaggttaaattttggaaacatgtcaatgacatattgataggaaattagcacgaatgatcccttagaatacaagttaacatggaggtttttgttcccaaatcctatctgatgacaaccagggccttttgct

SEQ ID NO: 34839 - DNA, 331 bp, Setaria italica
  Peptide Sequence Number=SeqID_100813
gaaacagtgcaaaagagtccaagcccaatgaagggaaagaaggtggggttgaaggtggaagcagggaagcaaaggtcaccctctgtgctgaaggaggtgaaggcaacaccaccgactccacagcggtttccatccccatcgccgaaccgtattaagaatgttaaatctggagggatggcagcagcaggcttaccactcaagaaaccgctgaaggataaggggacacttactaaggatctggagagcaaaaaagatgctgtgaggcaaccctttggggttaaggatatgaacaatactagagcttgtgatgcaggaagggagctccggtagc

SEQ ID NO: 34840 - DNA, 852 bp, Setaria italica
  Peptide Sequence Number=SeqID_100814
ggttgaagcaccagtatccagtgagtgccttacctctcaaatacctactcctgttcttatggaccgttgtgtgctaacagtggcaatttcaaccatgggaatggtgatggaaatggactagttaaggtcactgcaacttcagcttctgtttccatatcttctacagctacatccagtgcgccactgaccatactcctagaaattctactgtggaaaaaaaggtatgcattttggtgattatcatgatggttcaacaagatcacgtggtaaaacgatagtgatggattcagccagcacattgagttgttatcgccacagcacagttgaagcttgcactaatatcgctagctcttatatcaaggagtcattagaaggttcatatgctttgcctaatgtcaaaaccatcagcaagaacaatgctgtgatagtccaaccagtgtctagtgctgctccacaaaatcaagagaccaaccaaggagatggtagcacatcaaataacgatgaagttgtggcttctgaccatcagagcatcttagtctcattgtccacacgatgtgtatggaaagggactatttgtgagcgttcccagctgttacgcatcaagtattatggtaattttgacaagcctcttggaaggtttttgcgggactacttgttcgatcagggataccagtgccgttcctgtgacaagccacctgaagcccatgtccattgttatactcatcgccagggaagtctaacgatatcagttagaaaacttacagaaattgttttgtcgggtgaaagggatgggaagatttggatgtggcacagatgtctgaagtgtccttggagtaatggatttcctccagc

SEQ ID NO: 34841 - DNA, 299 bp, Setaria italica
  Peptide Sequence Number=SeqID_100815
ctcgcgcttgctaacgacgatcttgacgcgcaccgcgccgccgacgtcctcccgggacaggaggcggccgccgtggttcagctgctcgagcgcggccgccgccgccttcgactggtgccgggcgtccgcggccgcgtccctggggaagaagcacctggacgccatccccgtggccgcggcctcgtctcgtcctccgtgggacggcgggcgagctctgtcctgcttatgtacaccctcctcctcgacgtcccttgcaagttacagcacagaggtctaaagcgaaggcaaagtgaatgtgt

SEQ ID NO: 34842 - DNA, 418 bp, Setaria italica
  Peptide Sequence Number=SeqID_100816
ttagggaagatctttgcggatacaagagaatttctcaggggttgtgaaagcaccagactgaaagtatgtctctggctgagagcctgagactaggtggagatgcttgatgggccagtggtgcgcataactgcaaggatacagaatgggaagtttgatatgaggtatttttctgattctgttcttcaattgcaaattattgatttcattgcatagcctgtacaaacttcttttttgttgactctgtaaattctgcatgttgtctgatttgtctatcttcggcaatatatatgctagtttttttaacaaccgttagagtttcaagcccttctatgctatgaaaaggtgtcatattgaaatttttgagtcttccaatgtggtacttcagagactagtttatgatgcattcttcacttgccag

SEQ ID NO: 34843 - DNA, 282 bp, Setaria italica
  Peptide Sequence Number=SeqID_100817
cccctgaccgcctgatgacgatgctgccgcccctcaccttgtcgtagaacgcgtctggcagcatgccgatgttgcacgacgagatggacccggcgaacccgagctccggctccatgccgtgctcccgcatcggtatcgccttcttgtagtatgcctccgtcaccttcgatatcagccacgcctgcagagaatgtcgagtgcaaggagcaagcaagtctctgaatacattttcctttttgtggttcatgcgtttgcgtaccaaaggcgtgagcaacgtggcga

SEQ ID NO: 34844 - DNA, 1686 bp, Setaria italica
  Peptide Sequence Number=SeqID_100818
agtctgccaggaaccgcttgatccacctgtgctcaaccccccacatgtctccgcaccgctgaagccgcggaaaaaagcgtcactggatatcggcgtagtcgacggcgccgtagggctggaaccactcggcgaggagccccttcttcctccttgggtcgtagcccatgtcgcggcacagctcgtcgttgtaccagatgttcacggcgccgaggcacgaccgccggaacctctccccgttgctccgtcgcatgtacccgccccactccgccacgctctgctccatccgcgccacgcccggcagccggaacgcgccgtccaggaaccgcgccacccacttggccatcatctcgatcgagaagatgttggtcaggctctccgagtacccgatcaccgccatctgcgggatccgtgggtgcacgcactccctgtaaagagggacggtggtgtccgacgagccggcgacgatgtccttcacccggggcgacacgaacatgtccctgagcttctgatcgccgcagaaccctgtggcgagtatcaccaggtcggcggggacgacgcgccggtcggcgccgtccagcaccaggccgtcctcgcagaagctgaacgcccctgaccgcctgatgacgatgctgccgcccctcaccttgtcgtagaacgcgtctggcagcatgccgatgttgcacgacgagatggacccggcgaacccgagctccggctccatgccgtgctcccgcatcggtatcgccttcttgtagtatgcctccgtcaccttcgatatcagccgtaccaaaggcgtgagcaacgtggcgaggagggtcgacgccaggccggcgccgggcttgcgcaccatcagctgcgcgaaccggttcatgtagaggtaccccaggttgagcttgccccagacgttgacgtcgtgcagcagccattgtgggctcctgcagaccatcgtgcacggccgctcggcgccgttggcgtcggcgcactcggccgcgatgtcgaaggcggacttgcccgagccgacgacggcgacgcgcttgcccctgaccagcgcggcggcgtccgcgtcgttcatgtcggagaaatccatggagtggagcacccgcccgcggaacgcgtcggggccgacgccgggcgggaactccgggatgttgggcacgccgctgaatctcccgatgcacaggatcaggaagtcgaactcgtacgtctgcgtggcgtcggagtcgccgtgacgcacggtgaggcgccaccggccagcgccatcaccgccgaacgcctcgccgttgcccgcccacagctccgcgttagcgccgtcgtcggtgccgacgaactccgcggcgacgaccttgctccggaacctgacgcagtcttcgacgccgaagcggcgcgcgtaggcggcgaggtacgccacgacctggtcgtggcgcgggaacgcgtcggcgtcttccggccacgggaagtcggagaagcggtagccctggttgggcgactgcagcctggtggtggcgagcgtgcgcgtccacaggccgccgacggcggcgcccgcctcgaacaccaccgggcggaagccccgcgccaggaggtgcttggacgcggcgagcccgctcgtgccggcgccgacgatggccacacgcttcgccgccttgtgatccattgacgccgccgctgtgtctggtggtccttgccggc

SEQ ID NO: 34845 - DNA, 807 bp, Setaria italica
  Peptide Sequence Number=SeqID_100819
gggaaacaggactctccgtctccgcctctcgcccaccgacccgggggagaaggagcgggacgcgacgcgacacgggcgcatctcgtatctcgccggcggcgcgcgccgcctccacttgtcgtccccacccgagcaggttcggtacggttcggctgcgtccccgtgcgctggtgctgcatcgtggcgcgggggccggaccgtgctggggttttggtgggggacaggggaggggaggggaggggtggtattgctctgcgggctgcgggggcttgatcctgtgaaggcagaagaagcaggcgtccccgatgcaacggctggtgggggtcggcgagaggctattggcgatcggaacaaatagacgggcggccagttattcccatccgagcaacaggagtgggtattatacagctgtgagggacaatggcttgtcaacgaggcgaaagattccagctgtcttctcaagaatgttctcacattacaaggtcattattagaaagaacagaggtgaggatcacaagtgcagaaccaggatgtccagaggctaccgcacactctctgtggcagtggccaattcatcagcaacccagcaagcgcaattggcatggaagcggctcagtcatatgtactcgtatcgtggtccccggttcccgctgatgagccgagcagcctgcgctgttagcctatcctttacgaggttccatatcatccctggggttatggctctagcttttggcaagatggcacttgcaccacctgtcctggcagactcacgatccttcatgccgagaatggatggatcatcacaaa

SEQ ID NO: 34846 - DNA, 627 bp, Setaria italica
  Peptide Sequence Number=SeqID_100820
cggtttctttcctgattgcatcagctattctacaataataaatgagctctgtaagatgggtgacacaaataaagcatttgagctttggaacgaaatgttatacaagggactgaagcctgatattgtggcatacaatattttgatacgctggtgcagtatccatggtgaattttgtaagggtttaggaatttacagtggtatgcttaagaatggggtgcaaccaaactgggatacatatggagctcttttcataggagcttctttgataaccaggaagggaaaaactttactgttgacgacctgatgtgagcaattttttttcatgttctcatatactggaatcggctgattcaagaaggggtgccagatggcaaaatcaatcagtcactgaactgttgcttcatatacaagtgcccaaaccatacatgtgcatactgactcttttctatgttttaaccatacatagcggcagtgatctggtttgcttgaggccccgagcatatcagagggaaacctggtgcttggaatcttagtgattgcagaacttttgatgcttcagcaagatatttccataagataatatatccgagcatatgctgtttctcatctaagctcaacagccacaaa

SEQ ID NO: 34847 - DNA, 248 bp, Setaria italica
  Peptide Sequence Number=SeqID_100821
cggtagatttgggaggaggacggaggaggggatggggggcaagtactgcggcgcgaggaagaagaggggatggagggggctggtggcggcggcgtgggtgttgctggcggtggcgtgctcggcggcgatgcactggcacctgcgccgggagagcttggaccgcgccgaggagcggctcgtcagcatgtgcgaggagagggccaggatgctgcaggagcagttcggggtcaccgtcaatcacgtccacg

SEQ ID NO: 34848 - DNA, 382 bp, Setaria italica
  Peptide Sequence Number=SeqID_100822
cggcagctgcctcgcgcaggcgttccgcgacgtgcagaacgactgcccctacagcaaggacgccaccatctactacgacccctgcacgctccactactccgacgtgcacaccctcgccggcgatgacgacaccggcccgaccaccgacgattacggcatcaccaaccacggcaacgtcacctccgacccgccccggttcaacgccctcctggtggcgctcctcaacgccaccgccgactacgccgcgttcaactccacgcggcggttcgccaccgggcaggccgacttcttcgacaagaacttccccaaggtgtacagcctggcgcagtgcccgccggaccagccgccggcgcgctgccggaagtgcctcgccgggattata

SEQ ID NO: 34849 - DNA, 311 bp, Setaria italica
  Peptide Sequence Number=SeqID_100823
tttaagtttctggcacttgctctctttccttggggggtcatttcgatgtattttcggtcatagatagctgaactgtaccatagtactggatacctgaaagccactagcccactaggtggttctggacttgtgtggttggggtatacgaataaggatccttctcattcatgcttttattctcctatgcttaatcaaggatcagagatttacttgtatccttgttatcagaaagagttgaacctacattgagctttctattggattatctaatttgatgaaccctggttgtgtaggggaattaaagggggtaa

SEQ ID NO: 34850 - DNA, 484 bp, Setaria italica
  Peptide Sequence Number=SeqID_100824
ccaacaacagaaggtgaaggtgcagatgtagaaggggcgcaactgagagaattatttgatgtcacatcaccattggcagaggcagaaggctgcacaccagtcataggagcagaattttggccactctgatttgaactctgaggaatagcctgctggtcctcaggctgttgctgctgtggttgaagagggttgacccctgaagcagtcctccttggaaagttatgcaagctatctgaacaagcaacaacagtagatgttaaagaaaggcaggaaagaaaagaatagcatacaacatttcaacaactaaaaatattaacgctgctggttctttacttgggaggggattcagaccaccaagctttacaaaaacattatctgattcaaactcaaacttttatttctatggaaaaagttgggaaaaaattgggtgcttgaaatcccaggccacaacatctctgtctgtctggaggcttacaacgagacg

SEQ ID NO: 34851 - DNA, 483 bp, Setaria italica
  Peptide Sequence Number=SeqID_100825
catccaattctgagatgagggtttatggacagcgaggaatgagttaacctgataatttagctctcgtgatttagctctcgtgcacaagctcttgtcattggtccttgctgcatagtaggtatggttgtatcattggaagggatgtcctcatcacttatgaggagctatttcatcctggaacagggaaagatgctttcagccttcaggctatactttcagatctagacatgcgagagcattgatgccttgttttgagcttcgagtacaatatgatgagacggtatcttctcaaaaaaaattgttcaccgaccgttagatgtatgtgattaagtgaaccgtgcgttcagacaaatcccaaagaacaataaaggtaaaagcgcccactatagtagtatagtattccgtccagtcacatggaagctgctcctgtgtacagtgtactagaagtacgcatgtactaagcagttagcacaatactctctg

SEQ ID NO: 34852 - DNA, 2949 bp, Setaria italica
  misc_feature (2913)..(2913): n is a, c, g, or t
  Peptide Sequence Number=SeqID_100826
ccgggggacagaaataaaattaggaagttactttacttctaaaaatacatgttagcaacctacaacatggcgatcgtggcgccacttcgacagccctaccaagagttcctttggcactctgcaaatcaactcagaaactgcgctgtgccaatatgcaggtgtgtatgccacatattcaaatacagttttaactgttgcaggtgtgtatggcacatattcaaatacaattaaggaaaaagacagggaaaacttcttttcccagtaaaaaaaaataccaccaagcactgtcaatctatcagacagcacaagatgccgacttttcacaaaatacctgaagcaggcagcaccaggaacccaacttgggcgtgttccaattcccattcctgcaggtcttgtccctccgttccgcgatatttatccatgaatattcacccatgtatgcatagaccgaggaacactcaatctaagcgttaataaggaatgcccacagccctattatatgattctacagctacttagcttttttacaacatcaatgaaggggtaaacagtggacaagcaatgtgacacattgtgaaactgcaactcccagtaaaattgacaaatgttatagaactgagggagtaacacacgcagaggtagctagacggatagttacagacttacatttaccagccggaatgcttgctatcgcttatggtacccttttttgtcagcattagcgcgaagcacaaatgctactggccccggggaggtcatggcaccataactgatgctgcataggcaatctgcccagggagggcaaatgcatcatcacattggaactttatcgttcctggttactctattgtgagggtttccagtcatactgaatgttattgaagctgtttgcctgtctaagaccacccaatagctggtttcctatgtcatgctgctgttgctgctgttgttgctgctgatgtagttgacccaattgtgataggtcatgtgcactgtgattcattcccatccttgcacccattgccattgggttgttcgtcattgccgttctcatcccatgaccaaacccacccatggcaccaaaccccattcctcccattcctgggttatttgtgacagcattgccaactaagcaattaaccccattaacaccagggtttagtccatttggtctcttcatatcattccctgactggccaactccgttcatctgtgatgacagcaaatcttgcaagattttctgaaccgagctttgggactcacttggctcagcctcctgaggtcgagtagcaggtggttgcatcggaggtatgcttgatgacgtagtcggggaggttagttggtttgtattttgaggagcaggcatcatattgttattggatgctgtgggtaccggggaagggaaagaggtagatggatttgactgcaatgagcttgttgagttcaccttgggaattgccgcattgccaccgccattgtagggaccaccattagtgctgctcatcggatgatcttgtctagaattcattgaactttgcaagagcccaacaacagaaggtgaaggtgcagatgtagaaggggcgcaactgagagaattatttgatgtcacatcaccattggcagaggcagaaggctgcacaccagtcataggagcagaattttggccactctgatttgaactctgaggaatagcctgctggtcctcaggctgttgctgctgtggttgaagagggttgacccctgaagcagtcctccttggaaagttatgcaagctatcaatgggtccagatcctgtattcctgctgtgatcaatcaaatccttcatacagtttacaacctcagcaatctgaaggcagcgaacatagcgttttgtgtatcctaaatcatttaccaatggcacctccagggctttagccaactgacgggcacatgcaacaaacgagttgcaattattctgcatgtcctgagccgacaaactcgttgaattttgggctgcagcctggtacttctgtacaaccgcaccaagattactaacctgtggtattatagatctccgtggaataagttcctcatggcgcctagcacagaactcccaagatgcaatcttgaggtctgaattaaaaactatccttagatgcccctcacgaaccacacgcaattgctcaaagacgctttcctggattgctttcgtgtagtccaaaataatctgaccggatgcattctgggattcacgtggcatgtcgatgtacagaagttcttccagagtaccacttgcatacttgatttgacataatcgtggtagtacctcaactgttgtttcaaaaccacggccaggtttccgattgcaaatctcacagtgccatacatcctgtgggaaaactccagttgtctgacgaccacttccatacagcgagacacaccacctctttttagcatttggagcaaaatactcattgacaaagtttctccagtactcaatgttgttatcttgtggtctgttctgttgatgatacatgtaatgggtcaatctctttgcacaggttcctggttcatagggaggtgactttccttgagttctcatgtttagactctgttgacgaagtaactgctgatgttgctgctgttgttgctgctgctgctgttgctgcaattgatttctctgcaaaggcaagttttttagaatctggtgttgttgttgctgctgctgcatatgcaggagccgttgttgttgcaagaggctcagttgagcagcagcggcagcttgagagtttgcgattgcattggtccattgatacaaggtctcaaattaaatttgagttcagtcaagatggagcaacagagttcagactcatcagctttctgcagcagcagcagcagcaacacagcaacagcagcagcagcaacacagcaacngctaacatttgtgacagctgacaagctagattagaa

SEQ ID NO: 34853 - DNA, 482 bp, Setaria italica
  Peptide Sequence Number=SeqID_100827
cctcacctcgcaggcgatctattatctgacagccttgagagcgccagcttctgtacttgaggaacttgacgggaagcgcaaacgtttttctgtggaccggcactgatgctattgcgagaggtaaatgcaaagtgaagtggacaaaaggtatgcgttcctaaaagtcttttttgttcactgtcgtttctccgcacgcatctgggatgcaatctttgactggctctcttcagatcttccaccgcgaggtaactggcacaacttgtaaacggtattcgagtgcaacaacacaaaatacccctcttaatcaagggccttggctcgatcctgattctagataaatacacgtgagtcggtgctttactcccagccgcttcaaaaaaaagaaactttccatttgttcgatcgttttgtttcacgtgtgcatctttgatcctcttctatgtcaatacacgccagtcgctgctttactggcagccgcttca

SEQ ID NO: 34854 - DNA, 249 bp, Setaria italica
  Peptide Sequence Number=SeqID_100828
cgcacgccctcctgggctttgccgcggtcacacgaacagagcgagaaaatatcgcacccgtctggataaggcgctgctctcgcgtgaaccagacgcgacgccgcgcgcgagcccggccgtttctttcccccatggcctcatcggtgttctccccgctcttcgcctcgctccggctgcccgcgcccaccagctcgcgctgcactcctcctccgcagaccgccgtggcaccgtcggcagacaaagcagtca

SEQ ID NO: 34855 - DNA, 285 bp, Setaria italica
  Peptide Sequence Number=SeqID_100829
cttatgatagaagctcctgcaggaatgcaacaagtacttttgatgagactgacagcagaccaagaagaaaagaaaatgccggacgtgatctactagcccgattaaaagaaagggtcaattcatcaaggaagcactcattgagtggaggtagtagtccttgcctatcatcacaacatacatccaactctggctccacaagcagtagccgatcaatttcaagatcgatatgtcggcaagcttcgagaatgagaaaggatgaagggaggattacagaagctgttagga

SEQ ID NO: 34856 - DNA, 433 bp, Setaria italica
  Peptide Sequence Number=SeqID_100830
gtttaaatattttttaagagttgtaaactatccaaccaaaggtgaagtgcagaccaaaaatccaggaacattaatagatcaaataaggccaccaataagttaaaaaaaagaaatgtatttcatgcagcatgcctagaatgatctaacagcaagcagaagattctgataaaaagattaataaattggagagagaaaaagacaattgcagtatctactatttgacagtagaaaactaatttcaatgtggaatactatggcagtgtcacaatgggaaccaatgttgtgcacatttttagaagaatgaccaagaggcaagattgcaacacaatgcatgattgtaacatattcttaaagcttaaaactcaaagctaccgaaaataatcagaatttgaatccaatctggtttgaggacaactttaatgttttatatgta

SEQ ID NO: 34857 - DNA, 315 bp, Setaria italica
  Peptide Sequence Number=SeqID_100831
tcctttcttattgtcctattttaatttttgtaaaattaattttctttaaaatttactataatatgatgtattaagaatagtgcaatgtcactgaataccttgaaatctgaatgaaaagatatggatgtagaatcgaaattcagatgatatggctactacaagaaatcccaattcgtgacggctaaatagatcaatggaaaatgctaaaaggaatagacgtacagtgaggaaacaaaatcatgatctagagggaatcagctcctaatctaaacgaatgtcttgaggcctaatgagtatgggggatttaatttgccg

SEQ ID NO: 34858 - DNA, 331 bp, Setaria italica
  Peptide Sequence Number=SeqID_100832
tattgtaatttgactaagaaatactaggtcacttgaaagcttctaaagaagaccaataaccatcgttatttgcaacaaaaaaactaggaaaatgttgaaaacctactagtgagtagtaagtggtgaccatatccatcgacttactattatgtggcaatagccagcagttgagatgagaacagatggatgaagcaaaaggaagaagggttttggtagggtgatatggtgtttctagagaagggaagtctttcattatgtcagtttttgaaatggggacactgagtagtcagtatgaggtcagtcttagtgcacagttttatgcactgttata

SEQ ID NO: 34859 - DNA, 231 bp, Setaria italica
  Peptide Sequence Number=SeqID_100833
gggtgggtcctcggcagcctggcacacggccacgacaacatacagcgcatgctagatttttagtctgcacgcgagctgccatgcccttatgctgttcgacgatatgcccaaccaggacatacctgctgcctgctcaaacaagctgctccgcggcagcacaaacgaccatggatgcgactcagcggcaatgacttcgtgttaaagcaccaccacctcctccttgactaggcg

SEQ ID NO: 34860 - DNA, 626 bp, Setaria italica
  Peptide Sequence Number=SeqID_100834
cacttaccaaaggtaaagaagaagcaattggttgaagatcaagttctcggctgctgccaaatttacttctgtattactgagatggaagaggaggttaagacggtgccccatgattccaatattgagaccttgcctagtttggcaccgtatgttggcatggagtttagaaattcagatgaggcttgggcattttggcttagttatggtgggcagaaaggctttgaggtgagaaaaaggtatacaaacaaaaggccatctgatggcacggtcacatcatgtagatttgtttgtgcaaaggagggtcatcgattgcaagacaaaagggatcatttaatcaagcgacatcgaattgaaactagaactgattgtgaagtccacatgagtcttaaaatggaccggaacaagggcaattataaagtgactgagctggttttggagcataatcacatactacacctgccagaaatcttacgcttgatgatgtcacaaaagaaaacttcagatttacaggtggcaggtgatgctagaattgagccgaaagcggtagatgatgctgaaattgggccgaaagtggcacatgagttggctagttgccaagttggtggatcactcagtcttagctccct

SEQ ID NO: 34861 - DNA, 584 bp, Setaria italica
  Peptide Sequence Number=SeqID_100835
gggtggcagctgataagcaagaacctgtaagtgatccaactattctcctatatcttctcatctcatttaacttacaaagtaagtcctcccaatattccaagctcataaaatcaagttgagcatcagcattcattctttcagatgttgcactggattccattctcttctcgatcatatttttgacttcttggccttctgaactgaccttcaaataaaatgattgggcgtcatctggcaaactagtagattcatgtttgcatgccttggcaatctcagaaaccgccttcagaaatggaacagttagatgtgggtggtcatgcctgccaagtacctccagctcagaagaaactgctcgcatcggttcttccaagaatggtaaaatatcatgagaagcaccaatgtaacacagcatggaagcaagaacatcagggacatggggattcatgtccaagtgacgtagctgtctacaaagagagtcaacaatgtaatctgcattcgcgacaacaaattggccaaccgaacaatgaccgccagcagcagcaagcgctcttaagacagcatctgatgcaattcttatctgagca

SEQ ID NO: 34862 - DNA, 256 bp, Setaria italica
  Peptide Sequence Number=SeqID_100836
tgcgccgccctggcccccgggaaataaatgttccctctccagtcagtcattcacgccctgattgattattattattaggcgcaccagaaaaataagttaatgctgatgaactaatagtactccgtgtttggtaagtttctattcacaccccagcgatagatatgattgcagtggatggtgttcttgtggtagatggaatatccaactgctctgtagttgctcaagcttgcagcgtacagatattccaacgaacaca

SEQ ID NO: 34863 - DNA, 391 bp, Setaria italica
  Peptide Sequence Number=SeqID_100837
cagagcagagtgggcagtggcagtggcggtggcagatggaggagcagaagaggacgatctcttctcgtcgccaccgtcttcgccgatcttgtccatggcgaggcactttctgctggcactcgagctccggacggtcttgccgccgccgtcgtcctgcctcggatccaacgtgccgggcgcgaacgacacggacttggacacgccaccgccgatgcctctccgccgcacgactgacctgttctgggctatctcctgcaggaccggcggcgcgtcctcgggctgctcgtcgctcgccacggcagcggccatcgaggtggccgcctggatcgcctcaatgtcggtgactgcctgcacggcctcctggtggaagctgagaagctgtcgaagcagg

SEQ ID NO: 34864 - DNA, 840 bp, Setaria italica
  Peptide Sequence Number=SeqID_100838
acagtccattgatcttactccttaggctctccacatggccttcttcttcatccgcgtggtgctcctcttcttgctgagcacaacatgcgcctctgcactcaccccaacatcgaataccacagaccttgctgcgctgctcgccttcaaagcacagctcaaggacccctttggcgtccttgccagcaactggactgccactgcgtccttctgctcgtgggctggcgtctcatgtgaccgcagtcagcgtgtcaccggcctggagttcagcgacgtgccgctccagggcagcatcgcaccacagcttggtaatctctctttcctctcgaccattgtcctcagcaacaccagcatcatgggcaccgtgccaaacgagcttggcagtctgccctggcttcaaactcttaatctttcatacaatagtttgtcaggtaccatcccacacatccttggaaaccttactaggcttgacacgcttgatcttgctcgaaataacttccttgggggaattccacatgagttgcaaaaattgcacagccttatttctttaatattgcaattcaatgaactgagtggaccaataccacagggcctattcaacaactcaaccaatttgagtgaaataaatcttgggtcgaattggctgacaggagcaattcctgatagtttcagctcactgctaaagttggagatgctagtcctacaaaaaatcttctctcaggccccattccaccttctctcttcaatatgtcccagctgcaagcactggctgtcggatggaacaatctctcaggtccaattcctggaaatgagagctttcacctccctatgctgcaagtctta

SEQ ID NO: 34865 - DNA, 372 bp, Setaria italica
  Peptide Sequence Number=SeqID_100839
aatgcggattgttaaagattataatgagtatgttatgcggaatctggccaggggctacactagaaaggatcttggtgtcagctatgtaaaggaaaaacgactgcgagttaacatgggactgaaaaacctgcgtgacaaagtgaagcaacaccaagaaaaagtgggcgagaagtggagcacagttgcaaaactccaggaagagtgggtggaaaatgcagaccgctgggttgctggtttcctagagaagtttgaggaaggttgccactcaatgggaactgccatcaaggagaggatccaggagaggctcaaggcaatctagggactttggtagccttgacatcttcgaagtgttcgtcctcgtcgtcttcttcc

SEQ ID NO: 34866 - DNA, 1337 bp, Setaria italica
  Peptide Sequence Number=SeqID_100840
tcggcccacttttccctttccgaagcttctcgaccgcctccacctcctcctcctcctcccccctcccccctccacatggccgacgacgcgaaggccgaggcggcgcggccgaggccggagtcctcgcaggaggaggaggaggactggaaggaggccgagggggacgtcgccgaggtcgaccgcgccgcccccaatggcgccggcgaggcgcaggtgcccacggaccgcccgatccgggtctacgccgacggcatctacgacctcttccacttcggccacgccaggtcgctcgagcaggccaagaagctgtttccaaatacatatcttcttgtcggatgctgcaatgatgagttgacacataaatacaaaggaagaactgtaatgactgaggatgagcgatatgagtcacttcgtcattgcaagtgggttgatgaagtcatccctgatgctccatgggtggtgtcagaagaattcttggataagcataacattgattttgttgctcatgattctctgccgtatgctgatgctagtggagctggtaaagatgtttatgaacatgtaaagaaacttggtaagtttaaggagacccagcgcactgatggaatatcaacctcggatattataatgcggattgttaaagattataatgagtatgttatgcggaatctggccaggggctacactagaaaggatcttggtgtcagctatgtaaaggaaaaacgactgcgagttaacatgggactgaaaaacctgcgtgacaaagtgaagcaacaccaagaaaaagtgggcgagaagtggagcacagttgcaaaactccaggaagagtgggtggaaaatgcagaccgctgggttgctggtttcctagagaagtttgaggaaggttgccactcaatgggaactgccatcaaggagaggatccaggagaggctcaaggcgcaatctagggactttggtagccttttacagtatgagagtgacgattatgaggaagaagacgacgaggacgaacacttcgaagatgtcaaggaatagtgcctctgtaaatatgctcaaggttttagtatctgatggaaatcgtctgttggtcctacaccgtttcatgtgcccccattggttggtgatcttttatacggtcaaaggtaggtgaggtcagcttgccgtgcttgtaggtgctcctgatgtttgttcaggcaatgttcggttgtaaaagttgtagaactcttcccatacatgtatggagaatacatgttacattttactttctccagaacataagactataagtttcaagtgaagctggttataaattggttatcctctgaaaaaaaaaaaaa

SEQ ID NO: 34867 - DNA, 779 bp, Setaria italica
  Peptide Sequence Number=SeqID_100841
tgtaataaagctgacataaacttcatttgccaatccaaattccttcatgtttgaaatgtagaggtgaacatataaaacattcacccaacctaacccttcttccttgagctgattatcaattctgttcaagactgctatgaggtctgccttcaggcctattgatgcaacagaacattaaatgaatgtttatcaaagaaaacaatagaatgtaatgaggtattcctgtcaggtgagtaaagaacagatcaatgtcaacggaataacctaggatgagactatgcaccttccgaagctctagagcgatcctgaatccaacagccaatggaacgcaaattcttccctgtctttgagatgcacaggtctatatcggtgtaagcatcaacacctggacttaaggtctgtttttctccatatcagtgtgcgtgataacttcatcaacctcataaacacaactagaaatctcttgagtaacagaaccatccccaattctatcagatgaatctggcttgtgctgaagatggaacactcgtggatgaagaattccaacagaagcaatggagtcagcagagtgaagtatcacctcatagtcgtcgagaataattcttgcattctaagtgagaagaaggtttcagccccagtgcagcaacctttacagttattgccacgatgcccttcttatcatttcctcttaggagcaaagtctgatcctgcttccataaatacgccagagacaccaggcccaacctcgagcaaacaacttcttctaacccggtagtcta

SEQ ID NO: 34868 - DNA, 791 bp, Setaria italica
  Peptide Sequence Number=SeqID_100842
tagacaacaagttgacatctgatgagaaggaagaagtcgaacagacattgcagagcagtacaccagaaagtgtattgctgaggaatagatagagcaactaaaggcattagccacagcttcactattttgtagtgctaattcaagttcagctgttggaccatcaggacagagcttcatcgtaggagggtcaagccccagctgaccagccatatacagaatctctccataaagcgttgcctggctataaggtccaatgcaactaggagcccagcatgagatgctttgcacatgtaggaatctaaatgcttacaacttttgaaactagaacttccacgtatgctttacctaacccaacctgaaccaatggcaattcaattgtactgcgtgaaggaacaccaaggtagcatttcttttctgtaataaagctgacataaacttcatttgccaatccaaattccttcatgtttgaaatgtagaggtgaacatataaaacattcacccaacctaacccttcttccttgagctgattatcaattctgttcaagactgctatgaggtctgccttcaggccttccgaagctctagagcgatcctgaatccaacagccaatggaacgcaaattcttccctgtctttgagatgcacaggtctatatcggtgtaagcatcaacacctggacttaaggtctgtttttcttccatatcagtgtgcgtgataacttcatcaacctcataaacacaactagaaatctcttgagtaacagaaccatccccaattctatcagatgaatct

SEQ ID NO: 34869 - DNA, 2220 bp, Setaria italica
  Peptide Sequence Number=SeqID_100843
tttttttttttttaaggtacaagaaacaacaagaagacaacgttactgactgaaactccgtagacagaccaatgtgattacaagcttcactacgggctaatcaggccgaatatataggttacagaaacagaaacaaagatacagtatagtatcgtatgataatcatggtatatttttcaacgatcaccagcacagaaagctactgctccaaccctaaagcagctgattaactgtcacccatctggcaattgataggccgccggctcttttggcagtttggcagaaattctaacatgtacacacctccaaaggaaagctgcattccatcaagcatcacggcgaacaattcagatgcgtgtgcaggctaggtttggaagccaacagctcgcatgttattatatcgttcgtacaagcagagcaaccagatcctgatactggcacaatgttgtagaaaggagattcatcagttcttgaggaactgttgtcttctgcaagctctgcgaaggcctctgaaaatgcacgggacattgcatctgctgccactgagttatctaccgaatagtagaaccgcaacatcgttgtgctgtcccaggaaaaattgttgtctgccaggatctttgtgatctggaaagcacaaaatctagccatagctttcaaattttcctcagtgtagtatagctgtccagctgtagaacatatctttgtcgcaatatcggttgtgactgagaccacagcagaacaaattctcccaccaattgtgtggatctggcaacacgagtcatgcaagtcagagtattgcgcactccatgcttggcttggtgctgactgcgtcattccagtctccgtctcttcggttgcaactccgtcgtcattggtggggacatataaaataggttttatctccacacgtgctcctttcggaagatctggtgcaaatacatatagaacagtgggatatgatccagtttttgagcaatccaaacgagtaatataagaactctgcaatgtctgttcgacttcttccttctcatcagatgtcaactgtgcagagcagtacaccagaaagtgtattgctgaggaatagatagagcaactaaaggcattagccacagcttcactattttgtagtgctaattcaagttcagctgttggaccatcaggacagagcttcatcgtaggagggtcaagccccagctgaccagccatatacagaatctctccataaagcgttgcctggctataaggtccaatgcaactaggagcccagcatgagatgctttgcacatgtaggactctctttttcagctcatttgaaactagaacttccacgtatgctttacctaacccaacctgaaccaatggcaattcaattgtactgcgtgaaggaacaccaaggtagcatttcttttctgtaataaagctgacataaacttcatttgccaatccaaattccttcatgtttgaaatgtagaggtgaacatataaaacattcacccaacctaacccttcttccttgagctgattatcaattctgttcaagactgctatgaggtctgccttcaggcctaggatgagactatgcaccttccgaagctctagagcgatcctgaatccaacagccaatggaacgcaaattcttccctgtctttgagatgcacaggtctatatcggtgtaagcatcaacacctggacttaaggtctgtttttcttccatatcagtgtgcgtgataacttcatcaacctcataaacacaactagaaatctcttgagtaacagaaccatccccaattctatcagatgaatctggcttgtgctgaagatggaacactcgtggatgaagaattccaacagaagcaatggagtcagcagagtgaagtatcacctcatagtcgtcgagaataattcttgcattacgaaagagagggcagtcaagagttagtgtttcatattcgccaccttcaccacagacattgattccgtaattctcattcattcgaagcagatgacacttaagttcagccagttctttacctaagtgagaagaaggtttcagccccagtgcagcaacctttacagttattgccacgatgccccttcttatcatttcctctaggagcaaagtctgatcctgcttccataaatacgccagagacaccaggcccaacctcgagcaaacactctcaacccggagcctctggtaatctgatgcaatggcacccg

SEQ ID NO: 34870 - DNA, 427 bp, Setaria italica
  Peptide Sequence Number=SeqID_100844
agttcaggaaagcctgcaggcctccaccactctttggtctttgaacagtagtagacataggtgaagctctttcctttgatgatccaaatggcaatcagctggaaggattgggtcatacgaccatcgaggctgttatcatcggcaacaatcaaggcatagtggtctggtggtttgtatggaaggtcaggcagatgaaacacttcaccagtgagaagattgcagacgcgtaccatatcggccctggaatgaccttctgtgtcttttgggtgacggcagaggaccaggagctgtcctgggatgcaacgggctcataaaaattgaggcttgaaccaataccctgaataaaagcgccaagggacagcggtctagctgaattgtaaccctctttgcggccagtgaatggtaccaattctgaggtgggtgtagg

SEQ ID NO: 34871 - DNA, 231 bp, Setaria italica
  Peptide Sequence Number=SeqID_100845
gcagcccctccacgcgccggcacgtccgcacggtggacacccaccggtccagcgagaagaagtcgcggagcagcgcccacgccgcgtcgggcgaaggccccgacgccacggcgcgcaccgagccgcgccacactgccggcgccgccgccccgtccgtgccgtgatccatggattgatggacgatggagctttgcggttccgtgggagttgtgcgtgtgatggcgaggggtg

SEQ ID NO: 34872 - DNA, 569 bp, Setaria italica
  misc_feature (1)..(23): n is a, c, g, or t
  Peptide Sequence Number=SeqID_100846
nnnnnnnnnnnnnnnnnnnnnnnaagtaaaacatgagtcgattgttatttctcagacttctctagaacaaatatataacagtactgaaaaatcagtttaacacatcacaagaagctacacgaccagatcagctcttaaacatgaatacacgtgtcccaaaaagggcttccatcagatatgcttccagtttaatgacagaactttccgaacactaacagtttgaagtgaccacactacttcctatgagaaaaggatgttgctctccagctttaaactcacgagatgtgatcacaatttcttgttaagtccatggaagaagcggtgttttcttcttctagagtgcttccgatgcactctggacatgatatgtggcgagaaacagaccttagagttattacggacatcgtgagaagaaagtgtagaactgtcatctatcatcttctcattatgatgtgtcaagcagtagttatcccatacatgcttccatgagatatgacgatgccccatctgctcttgttccatctcattgatcttcttcctgatagccaacttcagatccttgaccgtgg

SEQ ID NO: 34873 - DNA, 1180 bp, Setaria italica
  misc_feature (1)..(94): n is a, c, g, or t
  Peptide Sequence Number=SeqID_100847
nnnnnnnnnnnnnnnnnnnnnnnnnnnnnnnnnnnnnnnnnnnnnnnnnnnnnnnnnnnnnnnnnnnnnnnnnnnnnnnnnnnnnnnnnnnnnngttacctaaaagagttgcaggcttcgcagcccttcccactacccagttatcatcagttcaagcataaccagaaactcaaaagatccgtcagtccgacagcaggcatgtcagctcggcacgctccctaccacaacctacgtgatttacgcacagctcaaactatggcttcactcgctagttgctactactactactgctgctatccttctatcgtcatctttgtcatcactcatcagtcatcaccctaccggtcgtctccctccacgcttccccgttcccgacggcttctccgatcgggtgttcgtcttggcccgcttggagggcggcggcgtggctggagccgggccccgtttcagcggccgcccgacgcctctcttcgttccggtacccctgccgcccctcctggagccaccgcggccggtaccctccttccggccggcacctctcctccgggtggtggtggtgctctcctgctccgccgccgcggctgcagccgacgccgaccgcttccgggtcgtgttacccagcggggaaccccgcttccgggagggcgactggttcagccgcttcaggaagtccacggcgttccgcttcttggctggcccacctgccgccgctccgccggcgcccttcttgtcggccttctttgctccgcccgtcgtcgtcgtggccgcgtcgccgtccgcccccttcgtcggcctcggaccaagaccggctgggttccggacagcaccgccgcggcccttcttcgtcctcagcccccacgctttatccttggtcgccgtcacggcggccgcggccttcttctcactactcacactgagtccctcctccgcggcatcggcctcggccttcgtggagctctcctccttcctcgcggccgccgcagccttcgcgatggagctccgcttgcggcacacgatcagcggcttccccttctcgatcagcgacccgacgatgtcagtgcccgctggcgccggcgccggcgccggcacagccgcgcgctcctgcttcggctcgcggagcgccgccgacgcgtgcccggtgacgagtgcgcgggcctcgactgccgcactgtgctccggg

SEQ ID NO: 34874 - DNA, 419 bp, Setaria italica
  Peptide Sequence Number=SeqID_100848
gggggctatgggggtgagtaggggctctctcggcaccaagggagaagaagaagccgcacaggaggagagcacgactgtgggggtgaccgccgagcccggagtaggcgacagcgtggggctggtggaggggagggcgccggggaggggaaggggcagggaggggaaaggatgcaagccatagccaaaaacagtatgactaacacattgtgactgaatgcacttcacttttcctgcttagccaggacctcgaataaaaatggcatacctagtgttgaaagctcctacacaaggtggggtttgggaaagggaatttgtaggcagccttagagcaagaccagcatatattttcttagcataggctaacgctgtacacgttaggagggtgttaagtttgggcaaaagctccagcatctagctcc

SEQ ID NO: 34875 - DNA, 302 bp, Setaria italica
  misc_feature (301)..(301): n is a, c, g, or t
  Peptide Sequence Number=SeqID_100849
caggtagaaggccaggatgcagaaccgggtgacatgaagttagcagataaaatatcttcagatggttcttgcagcaagagtgcaagctcagaagttaaacaggcatcatatctttgcgaggtctgcaatttggatctcaaaagtgagagcaggcttgcagaccattgcaatggggaggaacacttggaaaagcagaagctactgaacttttgcgaggtctgcaatttgcagtgtaatagcagaaaaatgcttgatcaccaccgtactgggaagaagcaccggtcaaatgtagcatttttcng

SEQ ID NO: 34876 - DNA, 1276 bp, Setaria italica
  Peptide Sequence Number=SeqID_100850
tgctgctgctggggttgccgtggagcggcgggggttccatctccgcggcctgctcctcctcctcccgccgccgcgccgattccttcttcccccgcagggctcaagatgatcggttcaatcattaccggagctctaacacttgtccttggatatgcatacccagcctatgactgctacaagacggtggagctaaacaggcctgaggtcgagcagttgcgtttctggtgtcagtactggattttactttcagttctcactgtactggagagagttggggaaaatttcgtgtcatggttaccaatgtatagtgaagcaaagctggtatttattgtgtacttgtggtatccaaagacacgtgggactgcttatgtgtacgagtctttcttcaagccatacattgcaaaacatgaaactgagattgatcgaaatctgcttgagttgaggacaagagccggtgacatggcggttctttacttccagaaggttgcaaactatgtccagacaaggtcctatgaaatcttgcagtatattgcctcacagtcacagtctcaaagacctcgctctcagggacagcaacagcagcagcgcccacctccaccacggactcggcaggtgaaccctggacctccacccgttcccgcgccatcagcgcctccgatgccaccacagcctgcccaagcccaagttcctccagctccaccaagggccccagttccagttgcccctcctggtgcagtgcctcccgcccagccacagccaccacctgctcctggagctgccaccaccaatggtcctcagaacaccgaagccatgcaggtcgacccaccccgagcatccacgagcgccgcaccgccatcactaccatctgaggagactctcattgaggaggcgatccggctgacgcggggccggctcaggaggcgcatggctggaggatctggaccaccgccgagttagcattgaccaaggctcatctcacgcgtgtccaaggctcatctcacgcgtgtcgctctacagactacactgagctggttctgttgctcaactgaaaagagatggggggaacgctgagttggttaaacagatttcggtttcctagcattcgttcctactgtacaaactggaatcagtttggtgttgtttcacggctcaaattgtgaatagatcccaggaacaaaagtggatgctcatagattggtccacaggatagcactaggaagtgcgattgggcacatctgttgcagacatgtctgaactctgaagtgggcggatgctg

SEQ ID NO: 34877 - DNA, 453 bp, Setaria italica
  Peptide Sequence Number=SeqID_100851
tttttttgtaaccgttgaagttaattagcaaggaatcaatttgaattttgttacagagtcataacagggtacagtacaatcagttggggatcgtcaaagcttattgttaagttgctagtagctccagagcgcgacgtccgctccgccgtcgccgaagtcgccatgttcccaggcggccgccggcggcggcggctccatgagcagcccctccgcgaggctggcatagtacgtgtccaagtccatgtcgccgaaccagtcgggctcgaacgcttcgacgtccagtgccgccggctcgtcagccttcacaggtacttgctcaagcgacgtcgccgccgagccggaaacaatgtccggcaatggcggcggagccgacacgcgggatgtcacctcgtcgacggcggcgccgctggcggcggcctcgaatcggcgctggaagtccgcgacggcctcgag

SEQ ID NO: 34878 - DNA, 241 bp, Setaria italica
  Peptide Sequence Number=SeqID_100852
gttcgcgagcgagcaggcgatgcgcgacgccatcgaggggatgaacggcaaggagctcgacggccgcagcatcaccgtcaacgaggcctccaccgcgccgccttcgtcgcccctcgacgtcatcatttgaattcgatatcattaggagattgttagctgctcttcttaattcttagatggctggtgttctcgtgtgggttaatttagctcagtgtggtgtgtgcggtgtgagagaagaaca

SEQ ID NO: 34879 - DNA, 135 bp, Setaria italica
  Peptide Sequence Number=SeqID_100853
acgaggagagagccgacgaaggcatcaccggcgccggtgatgccttcgtcggctctctcctcgtcaacgtcgccaaggacgactccatcttccacaacgaggagaagctccgcgaggcgctcaagttctccaacg

SEQ ID NO: 34880 - DNA, 226 bp, Setaria italica
  Peptide Sequence Number=SeqID_100854
ggagagagaggagtggagtgggggagtacggtggtgatgtgactggaatgcatcggtttatataagcataatttcctgtcagtgtagtgcctcttgtctcacatgcccgctttgtttatatatatgtaatgtatcgacgagtgcgtgctgtagaacaaggaggtttggattatctgtggtatgaaatttcttgattccgtgaaagaaaaaaaaaaaaaaaaaaaaa

SEQ ID NO: 34881 - DNA, 468 bp, Setaria italica
  Peptide Sequence Number=SeqID_100855
tcgtcgttggcatcaccctgtgtgaggaaggcgacctcatcatcgctgacggcgacaaggggtgcagatacttcaccaaggacttcaagggcagcgttcccggctacaaggtgaacaccattgacaccaccggcgccggtgatgccttcgtcggctctctcctcgtcaacgtcgccaaggacgactccatcttccacaacgaggagaagctccgcgaggcgctcaagttctccaacgcctgcggcgccatctgcaccacccagaagggcgccatcccggcgctgcccaccgtcgcggccgcccatgagctcatcgccaagggcaactagacgccagcgccgccgcggcctccaccgcgccgccttcgtcgcccctcgacgtcatcatttgaattcgatatcattaggagattgttagctgctcttcttaattcttagatggctggtgttctctcacaccgcacacacc

SEQ ID NO: 34882 - DNA, 813 bp, Setaria italica
  Peptide Sequence Number=SeqID_100856
ttaaaagttaacttaaagttaaacggttacgtttacttaaactttacggttaagggttctttgtccttgtttcgtacctagtctacgtcgtcgtctacggtcgtcttggtcctttcgttaccctcaagaagaacggcgagcgcgagttcatgttctaccgacaaaccccaagacgaccgaacatgctgctcaccgaggccgagctcaacctggacctcatccgccgcgccaagatcttccactacggctccatctcgctcatctccgagccgtgccgctccgcgcacatggccgccatgcgcgccgccaaggccgccggcatcctctgctcctacgaccccaacgtccgcctcccgctctggccgtccgaggatgccgcaagagccggcatcctcagcatctggaaggaggctgatttcatcaaggtcagcgaatagaatagaaggtacgccttcctcacacagggtgatgccaacgacgagaagaacgtgctctcgctactaggttacgaatggcctcaagctcctcatcgtcaccgacggcgacaaggggtgcagatacttcaccaaggacttcaagggcagcgttcccggctacaaggtgaacaccattgacaccaccggcgccggtgatgccttcgtcggctctctcctcgtcaacgtcgccaaggacgactccatcttccacgtatgattcctcatcgattgatctgcgtaacaagattagtagcatctctctgtttaatcaagtgtctttactaatcatgtcgttggtgttaatccttcctttcagaacgaggagaagctccgcgag

SEQ ID NO: 34883 - DNA, 1153 bp, Setaria italica
  Peptide Sequence Number=SeqID_100857
gggcggcggaacggccgtgggggccccggcggcggcgggcggcgccggcgcgtcgcaggccgtcgcgtcgggggtcttccagatcaacaccgccgtcgccacgttccagcgcctcgtcaacacgctcggcacgcccaaggacacccccgacctccgcgacaggatacataagacacggcaacacataacacaactagtgaaggatacatcggacaagcttaaacaagctagtgaggcggatcatcgtgttgaagtcagcgctaccaagaagatcgctgatgcaaagctagctaaggatttccaagcagtcctaaaagaattccagaaagctcaacggttagcagtagagagagaagctgcatatgcacctttcatttctcaagcgggcctgccacagagctacaactcaagcgaggtgaataatggcgctgataaattggctgaacagcgcacgcagcttctagaatctagaaggcaagagcttgtcttcttggataatgaaattgtgttcaatgaggccatcatcgaggagagggatcagggaatacaagagattcagcaccaaattactgaagtaaacgaaatcttcaaagatcttgctgtgctagtccatgatcaaggagcaatgattgatgatattgactcacatatagagaatgctgttgtatcaacttcgcaggcaaaaggccagctttcgaaagctgctaaaactcagaagtcgaactcttcactgatatgcttgttgctggttattttcggagttgtcctgctcatagtgataatagtccttgcagcctaaaaaagcttggaaggcgcttgaggctccgaaatctggtcaagcttagcgcgaaggattccttcataaattatttttgctgtgcagtcaggaatgtatcctggttcccgcctggagggtgggtggggggttggcgttctggtcgtggcgtggtggtgtacggtggtgatgtgactggaatgcatcggtttatataagcataatttcctgtcagtgtagtgcctcttgtctcacatgcccgctttgtttatatatatgtaatgtatcgacgagtgcgtgctgtagaacaaggaggtttggattatctgtggtatgaaatttcttgattccgtgagaaatcatttgcaatgtattcaa

SEQ ID NO: 34884 - DNA, 1455 bp, Setaria italica
  Peptide Sequence Number=SeqID_100858
caacaagcaaacagcaagcctctcgctttctctccgtccagctcgtttcgtcgccttcgttcgtttcgttcgtgcagccatcaatggccccgctgggagatggagccgccgccgccgcgtcgtcggcgaaccttcgttggtgtccttcggcgagatgctcatcgacttcgtccccgacgtcgcggggctctcgctcgccgagtcgggagggttcgtcaaggctcccggcggcgcacccgccaacgtcgcttgcgccgtctccaagctcggcggcgcatccgctttccttggcaagttcggcgacgacgagttcgggcacatgctggtgaacatcctgaagcagaacggcgtcaactcggagggctgcctgttcgaccagcacgcgcgcacggcgctggccttcgttaccctcaagaagaacggcgagcgcgagttcatgttctaccgcaaccccagcgccgacatgctgctcaccgaggccgagctcaacctggacctcatccgccgcgccaagatcttccactacggctccatctcgctcatctccgagccgtgccgctccgcgcacatggccgccatgcgcgccgccaaggccgtccggtctattccttcttgctcctacgaccccaacgtccgcctcccgctctggcccgtccgaggaggccgcaagagccggcatcctcagcatctggaaggaggctgatttcatcaaggtcagcgatgatgaggtcgccttcctcacacagggtgatgccaacgacgagaagaacgtgctctcgctctggttcgatggcctcaagctcctcatcgtcaccgacggcgacaaggggtgcagatacttcaccaaggacttcaagggcagcgttcccggctacaaggtgaacaccattgacaccaccggcgccggtgatgccttcgtcggctctctcctcgtcaacgtcgccaaggacgactccatcttccacaacgaggagaagctccgcgaggcgctcaagttctccaacgcctgcggcgccatctgcaccacccagaaggggcgccatcccggcgctgcccaccgtcgcggccgcccatgagctcatcgccaagggcaactagacgccagcgccgccgcggcctccaccgcgccgccttcgtcgcccctcgaccgtcatcatttgaattcgatatcattaggagattgttagctgctcttcttaattcttagatggctggtgttctcgtgtgggttaatttagctcagtgtggtgtgtgcggtgtgagagaagaacatggttttcgcccgggggcattaataaaagttggcatgcgtggtggataattttttagcgtataatcatttgatctcaatggtgtcatgtgattgggaaggctgctgtgatgtgatggctttcgttgaaatttatctgagtttcaaggaacgtcttcagatggaaataattgtgttaatgtctt

SEQ ID NO: 34885 - DNA, 447 bp, Setaria italica
  Peptide Sequence Number=SeqID_100859
taacaagatatcagttagaagctaattacactatcacatagttttattgctgtgttatttgcttgatgtaaattcttcgtaacctaagacactctttaacattgctcttaagttttaactgctattactattagcatttccacaattgattagctgaaaaattgctaattttgtttctctttatgtaacagctctttggtgcttgagaaaggtgaattttctcttggaagtgtcatgaatgctgttgtcagccaagcaatgatattgttgagagagagggatatacagcttattcgggatatccctgatgaaatcaaggatgcatcagcatatggtgatcaatatagaattcaacaagttttgtctgaattcttgctaagcatggtgcagtttgctccagcggaaaatggctgggtagaaatacaagtcagaccaaatagtaaaaac

SEQ ID NO: 34886 - DNA, 617 bp, Setaria italica
  Peptide Sequence Number=SeqID_100860
gtgagaaaaactgagaaccgagaaccttagctattgaagttcaaaactgtcacatgaaattgtgccatgcatctggttttattagatgaattttagtgttctgactcaacttgggcaaaagtggttgccttttctttaactcatgttattttaacattctacatttgttagatgattcgcactgaaacactagcttccaaatggtaacaacaatggaaaactgaatgcctccaatgggacttgggagcactaataaatggaactaagtgattttctttttaactttgtatttctgtaggtttgcctgtcctggcgagggccttccccctgacatcgtacaggatatgttcagcaattctcgctggtcaacccatgaaggcattgggctaagcacatgcaggaagatcctcaaattaatgggtggtgaagtccaatacattagggagtccgagcggagtttcttcctcatcgtcctcgagctgccccaacctcggccagcagctaggagagaaatcagttgatacgttaagctcagcgctgactttacccaactgctcggtcaacgaggtgacctgagctcccctgactaagaaggacctaatctacgagaagcctgg

SEQ ID NO: 34887 - DNA, 562 bp, Setaria italica
  Peptide Sequence Number=SeqID_100861
cggagctctgtgtggccaacagattcactcaacaggtaaccctcctctatgtaagacgaattcacttctgtcagatcagttacatcaggttctgaactccggagcctgttcaaccttggtgattcggccctagaactgcgcctcggggaggggcttgcatttgaacggttcgaggaaatcacttcctcagttaccgaaacaaactcagaagccatgtccaactccgaatcttgaggtaccttctctctgagcatcatacattacaattgcggcaaacaccaccgacatcccaaatacagagtctgcaaaccccctttctagcccaagcgaagtagccactgccacaacactcgcggagtgggtggagggcatccctccggagcggaagacggtcttgaggtcaaggcctgagccggtgcccccattcttgcccgaggtgaagggcttggacagctgcccgatcgcgcttgccatcgtcgccgcaatcaagaccttgttgcgcgcgagctcggcgacctcccccgggccgaggtgaagggacgccgtggccgcgatggcccgg

SEQ ID NO: 34888 - DNA, 291 bp, Setaria italica
  Peptide Sequence Number=SeqID_100862
gctggccaaataggtggcttcctgaaacagaaactattgccatagcttagtagaatggctgattccggtgttaatggtgtaccaaacacggaaacaggtctgccagcacaagctgcatataaggctgatggttccacctccacagaattgagctttcttcagagtagttcttatcagaccctgagaagctggaccttgttctcaaatgcgatggccatccagtctgggtgggcggccgaccactgaagctggtttatctcggcgcctgcatcatacactagcacaggatca

SEQ ID NO: 34889 - DNA, 914 bp, Setaria italica
  Peptide Sequence Number=SeqID_100863
cataacataattggaaggtcttacatacctgaataataattaaaaataaagataactactagatagtatatacaacctgatctgtgtaatcatataacacaagggatttctttaaaggcaaatgattttctagtccattcaggaaccagtgctgcagtacgtcaaagctagaagctctatatttctacattaacaggtaagttcagagacagacaaatccagctctatatttctacattcacaggaagttcagagataaatgcagccctatatttctacttcacaggaaactcatgtagcttttgctgagatttaagacagcaggttcgttccttgctggccaaataggtggcttcctgaaacagaaactattgccatagcttagtagaatggctgattccggtgttaatggtgtaccaaacatgtcaacaggtctgccagcgcaagctgcatataaggctgatggttccacctccacagaattgagctttcttcagagtagttctgcattataagggggctttccatcaaatatatatgggatatcaattaacagaaacactactgttttagtggattgatatgaaattaaggcaaaggatagctcgagataagttctttagaaacatagttaaaacttaaaacacacgatcaactttcccaaatacgttctttagagcaatgttcaatctcttgaaagttgatcatattatatatgcagttattattgatactggtttacaacaaaaacaaattctaatattgctagcaacgcctgctactatgaaacagtacaataactgtaaatttggtggtgaatagcatgcaaatgcaatatacatgtcatattaaaaccgaaacatgatttccaccagtaattaaataggaagcaagccttgaagagaaaagggcaa

SEQ ID NO: 34890 - DNA, 356 bp, Setaria italica
  Peptide Sequence Number=SeqID_100864
tttttttttgctagatacagtagccacgatcgatccttcttacaaacttggtctatgtacattggctcggccattagcgatcgatcggtcggtcgatccatggcggcgccatggttgcttcctctataacttaattactcatcgaccttcctgggtgattaacgcagctagctagctactaacagctgatgacctccgccaggagcttgtaccggcgcaccttgaccctgctcgcccgcgtcttccccgcccgcatcacctccttcctcccgctggcgtcagcaacatctccttcccttccgccggcggggcgcggcggcggcggcatcgttctcctgatcggccttgtgcttctc

SEQ ID NO: 34891 - DNA, 253 bp, Setaria italica
  Peptide Sequence Number=SeqID_100865
tgcaaggcagtagctcggatctggcggtgctcatcagtatggccggcaaggcactctcctccgccatcctcctctccttcgtgatcttggccgccggatcaagatcgccggcgggcgtccggcaggtccaggcagtggcgccactgcagagctcatcagcgacgaccgccgacgactacgagtgcgtgtacacggtctacgttcagacggggtcgatctggctgagacacgtaacactcgatgaccaaggcaa

SEQ ID NO: 34892 - DNA, 564 bp, Setaria italica
  Peptide Sequence Number=SeqID_100866
ctgagaggagtgtagtcacttggaatgtgatgatcgttggactaggaactcatggttatggtctggatgccgtcacactgttccatcgaatggaggctgaaagagctccgatggatgatctaagtgtacttgctgtgctcactgcgtgcacacatgctggattggtatcagagggtttagggatatttcacagaatgaaaaaggatttcaggatagatcccaaggtagaacattatggagcattggttgatctacttggccgtgctggacgtttggatcaagctaggcatgctatagaaacaatgcccatggaaccaactccggagttgtggggatctcttcttgctgcctgccgaagccataggtgcattgagctgggctgaattatcagttgaacgccttgcaaatcttggagccgatgattcaggagtctatgttcttctgtcaaacatctatgctgatgaaggaatgtgggctgatgttttgaggattaggaaattgatgagtgatgaggggatgaaaaaagatattgggcggagtgtgattgatgtagatggagaaata

SEQ ID NO: 34893 - DNA, 236 bp, Setaria italica
  misc_feature (225)..(225): n is a, c, g, or t
  Peptide Sequence Number=SeqID_100867
aacttcagtgcttttaagactcacggcctcaagagctttgcagactttaccaacctcatttgcatagtttactttctttgatgtcattataagttcaacaacagcaatgcatgacttcgtggaaggatcaaacacaggtaaggcaacagtaccatgaacattgtaacttattgcatggttaagccgtgcatattcggtaatgctgtagtactgcacagttgggtntccattcaggt

SEQ ID NO: 34894 - DNA, 1562 bp, Setaria italica
  Peptide Sequence Number=SeqID_100868
tgagggttcaaaacaccgttagacacttagacaacacattaccgctcgaaggttattgttagatacaaaagtaatgaaatgtacacacgggggtttgaaaaagttaataaatagataatgttacaagctacaacaatactctcagcacaagattaaaacaagaatcatgtgctggttgtgttgtaagcgtggtctgcagaggaagtatccatgtcattcaagccaagttcctcattctgctcccaactcctctgatattcctcaatggtaagctgcttgtcatcttctaacgaatctgtagctggagctacaaatgaagctgccaatccatcatcaaggattaaagtccagggctcttgtaaactcagaagcttggatagtctatccttgaaatcatcccatttcttctttttccattccagtgtgctatcacccaggtggaatccatgtattctctccagagcctcgcatattttcacgatcaaaccttcaaccgttgtgaccataccacccaacgttccacttgtgagctccaactcaagttcaggtactttcacactagctgaatctgactttatgacatcacgagtgaggtcttttacattttgaacacgtagcgtagttttctttcctttagctggaatttcacccccaggcttcagctctgaattgcggtaaccacagatgtcacatgttgttgccataacaatcacctcccggaaatatgggatctttgtagcaaagaaacgtgtgacacattctgctccacaggccccacatgatgatggcaacacatcaacctcttctggtgctgcgtatctacacagtgctgcagcaacttcatcagggttgccctgtgctatagcacgacgacctgcaagggctccaactgcgccatggggctcggcttgcaacccaccagaattggatcccactgctgaaacaggcaaaaacagcctctccaggttgttctggttcagcaagaaaaccaagtgctgcttgctgttcacgtgtcctctcgtagaatctcacagatagcaaaggatctgatgatggagcatgcgggttctcaatatagctgtttcctgcaggatcatcaagaataaaggtaaatgcagcttctccagacccaagggatctcaacttcagtaaaaattgatcgatggcttcagccttttgaggatctactttctttctttcatcttgaagagcctgcagctcatccacagctcgcataataatcccttccacagtagaacacttcccacgttgagcttctggaggaatctcaaagtccaattctgggatcttgatagttgctgaatcagatttcacaacctgacggttcagtatctcgctctgcccagatggaacctccaagcgatagcagcaacccttcggctgaagctgtccagcaaactgaatctcattgttcctctcaccacaatgcgggcactcgaaggccatcagaaccacctcccggaagttcgggatcagcgttagaagcagcctcgtggtgccgttctcgccgcagcgcatgcatagggactcaatctcgtgga

SEQ ID NO: 34895 - DNA, 122 bp, Setaria italica
  Peptide Sequence Number=SeqID_100869
tgctccaggtcctggtacgtgttcatggcgacgccgaggcagctggacagccccgcccggccctggttgcgcttgtcgtcggactccggcggccgtctcaagaactccggcagctcggcaac

SEQ ID NO: 34896 - DNA, 404 bp, Setaria italica
  misc_feature (1)..(72): n is a, c, g, or t
  Peptide Sequence Number=SeqID_100870
nnnnnnnnnnnnnnnnnnnnnnnnnnnnnnnnnnnnnnnnnnnnnnnnnnnnnnnnnnnnnnnnnnnnnnnnaaattttgaaattttattcattaactgctttttcagagttcgaggccaaagatacatcgcaacaggaccaaagatacaacgtttttcaacatcacaattgtcacatcctcatggagctcacacgcttccagaaagctgagtctcaactctcaacaccaaaggaatccacccaacgcagttaggattaggattgacgtttcctctgcacgcacagggagtatcttaactcgcgcattattaggtagtacttcgcgagtagccattcatttttttacatatagtaatgcagacacatctgggaataatgtgtactccgatcaacctttgacgta

SEQ ID NO: 34897 - DNA, 740 bp, Setaria italica
  Peptide Sequence Number=SeqID_100871
caagccttcccggcgggcgtcatgcggcggtgaggcggaggaggaggcgccacgtgtcagccgcaagaagcggtcggcggcggcggtggcggagcccgcgtcgccgtccgggagcagcggcaaggcgatgatcggcgcggcctcgtcgccgctggagaccgaggaggaggaggcggcggcggcggtgtcggagttcgagcgcgagatcatgagctcccggttctacggcgccggcttctggcgcaccgtctcctccggctccagctcctccgcctccatgcgccaccagtagcagccaggcagcgcgcgcctcctctccctctcctcctcgcaattttgctgggtgttatagcgagtagacacaagcacgccaaatcgccaacaatcactcgatgagttcttgaggcttcgagcgttcttggtggggtgccagtcgatgcagcagcatcgtgcgtctggccgtgcacttgttcttgatcgacacgtgcgaatctgtcccgtgtggattggggactgttggattcgtacgccattgttttgggcttggacaccttggaccacaccggcagatgcagcagcatgggatacaggtcctggtcccccatgtaagccagcaaatgctggaactggaacggtggaatctgaaagttgtgttcgaacaatctgtcatttgtgattgttaagctaatcaataagttcataaatcataacagatcacagttcatcatcaaaaaaaaaaa

SEQ ID NO: 34898 - DNA, 1263 bp, Setaria italica
  Peptide Sequence Number=SeqID_100872
caggcgatattagcttgtaacattgcagaagaatatataaataccctcaagaaagcacataacttcataaaagcttcccagatcatggacaatccttctggtgacttcagcagaaagtaccgccacatatctaaaggagggtgggccttccaggttgcagatcaggggtggcaggtttcagattgcacagcggaagctcttaaggctttgttactgctgtcaaagttttcatcagacgttgcaggtgatcagatcgaaaccggtcgcctacatgatgcagtgaacatactattatccttacagaatccaaatggtggttatggaacttgggaactagctcggacatatccatggatggagattttcaacatgacagaaatatatgcagacatcatggtggagcatcagtacgtcgagtgtacctcatcagtcatccaagcgctcgcactgtttcgtgagaagtaccctgggcatcggaaagatgaaattgatcagtgtattaggaatgctacagaattcatcgagaagttacagaatgatgatggctcatggtttggatcttggggtatttgtttcacatatggtacatggtttgctatagagggtctatcagccgttggacagagttatggtaacagcaccggcattcggaaggcctgtaaattcctattgtcaaagcagctacataatggtggatggggtgagagtcatctttcatccagaaccaaggcatacacgaatctggatggggagaagtcacatatagtgaacactgcatgggcaatgttggcactcatgaaagctggacaggtggaaagagatcccactccactgcacaaagcagcaaaacttatcatgaatatgcagttgggcaatggtgactttccacaggaggaaatgattggaagtttcttgaaaaatggccccttgtgctacatggcttatcgcaacatatttcctatatgggctattggagagtaccagaaattagtcctcagtgtgacctccaatggccaaccttctagctgacagcaagcagagacagtcatacagttccatctgctggcaactctacttggcaaaattcggcaagcctggtgccatcatcatttcttgaacccaattgcaggtttcatgtgccttcaagtaaaaagaaaaggaaaatagcacaatgtaattacggtggcccgaatatatataaatatagatagatagaacaaaattctacatttataatttgattttggtaattgttagaggtcc

SEQ ID NO: 34899 - DNA, 237 bp, Setaria italica
  Peptide Sequence Number=SeqID_100873
ttttggtctgacaaaacttacagaagttggcaatacatcactgcccacacgtggaattgttggtacatttggttacatgcctccagagtgcgttccttcgatgtttcatatgccatcctgtatttgtgcaaattgcagagtaacactatctctgtgatgaatgttgacatctatgggacatgacatttgcagatatgctcgatacggcgaatgtttctaccaaaggttgatgtctat

SEQ ID NO: 34900 - DNA, 1040 bp, Setaria italica
  misc_feature (51)..(51): n is a, c, g, or t
  Peptide Sequence Number=SeqID_100874
cgccgcgttgtcgcgctcgtcgtcgccgcctgctctgctgcttgctcctgntcccccccaaaccccacctccccgccacgccccccgcccccgcctcctcctctgatggctcccagcttccgctgctagggtctcctcttcgccgtccccatggcgctccacgctctcctcacgcggctcctcctcctctccgcggcggcgtcggccgcggcggcggcgggggacgacaactgccgcctctccggctgcgacgcgctcgcatcctacctcatcgcccgggaccagaacctcacctacatcgccagcctcttcggcttcagcgactaccgcgcgctcaagacctacaacccgggcgtctccaacatggactacatccaagccggccagagcgtcaacatctccttccgctgcggctgccagacgctcgccaaatcgcccttctcctcctacctcgccggctccttcccctacaaggtcgcctccggcgagatctacagcagcatcgccggccacttcaacggcctcaccaccaccgactggctcgacaaggccaacagttaccccacgaacaatattcccgacaccggcacggtgaacgtcaccgtcaactgctcctgcgggaacccggggatttccaaggagtacgggctattcctcacctacccgctcaatggccagacgctcgcctccgtcgccgcgaactacagcttcaactcgcgggagcaattggacctgcttaagaagtataaccccgggatggacaccaatacaagcgggctcgttttcatccccgtcagagatgccaatggaagttaccatcctttaacatcaccagaaaagggaggttctgtgggagctatagcaggaggagttgtcggtggtgttgctgcactgctcctgggtgtcgttttatatatcatgttttatagacgaagaaaggcgaaaaaggctgccctgcttccatcttctgaagaatctacccaacttgctgctacatcatccatggataaaactgcactgtcaagcagtcaagctgatag

SEQ ID NO: 34901 - DNA, 432 bp, Setaria italica
  Peptide Sequence Number=SeqID_100875
tttttttttttttatttcttatctacagaggatcatttatttgcattcccgtgtaaaatcagaaatcttacaggtaactcatgtgctctggactcaactcacccggctctccaagagcaaaaacgaagaaaccaacacgagacataaacattctagaccgacagaagaaatcaaatgtgaatacctacagtggcgctggacatggtgtcctcctctctggcggcacaaatcagccctaaatgtacaattacaagggcaggcaggcaacctacaattacaagaggggtagtcatctcccggacatgaggttcacgagaccttggttatcctggagggcgttcatgtcccagaactcgctcgtagatgacaatgtcatcagtgccaccaccacggatctcatagtgggcctcgacttggggtcctcctgcgtgc

SEQ ID NO: 34902 - DNA, 430 bp, Setaria italica
  Peptide Sequence Number=SeqID_100876
aataaagaaactaaccgggcaaaggttgcagattttggtctgacaaaacttacagaagttggcaatacatcactgcccacacgtggaattgttggtacatttggttacatgcctccagaatatgctcgatacggcgatgtttctccaaaggttgatgtctatgcttttggtgttgttctttatgaacttatttcagccaaagaagctattgtgagatcaactgagtcttctagtgattcgaagggattggtttatctgtttgaggaggctctcaacgaaccggatccaaaggagggccttcagaggatgattgatccagccctaggagaggattaccccatcgactccatcctcaagatgaccagccttgccagggcgtgcacgcaggaggaccctaagtcgaggcccactatgagatccgtggtggtgg

SEQ ID NO: 34903 - DNA, 569 bp, Setaria italica
  Peptide Sequence Number=SeqID_100877
gtataaatttggattccatcgtctcattcttataatgaggctttatttgatcttccatttctcattgtggtcatgcgctcatggatgtttcggcaatatacagcagagcagatgctggattttgttgtagcaatcatatgtgtaacacttgcgctttcaaagctatagtacaaacattggatacttggattggagtagtacaagcgtttcctgcttgaagcaataacataggttttggctgactcaccgatcacctttctgaaaactacagtttgaggaggctctcaacgaaccggatccaaaggagggccttcagaggatgattgatccagccctaggagaggattaccccatcgactccatcctcaaggcaagaattccagccttgccagggcgtgcacgcaggaggaccccaagtcgaggcccactatgagatccgtggtggtggcactgatgacattgtcatctacgagcgagttctgggacatgaacgccctccaggataaccaaggtctcgtgaacctcatgtccgggagatgactacccctcttgtaattgtaggttgcctg

SEQ ID NO: 34904 - DNA, 1344 bp, Setaria italica
  Peptide Sequence Number=SeqID_100878
taagttttttttcttaagaaaaactgcatgtaagttattcttgtgagaaaaaaaaagtagtgatttcacttttttttactacatttgtcaatctcatccgctcggaccagaaaagggaggttctgtgggagctatagcaggaggagttgtcggtggtgttgctgcactgctcctgggtgtcgttttatatatcatgttttatagacgaagaaaggcgaaaaaggctgccctgcttccatcttctgaagaatctacccaacttgctgctacatcatccatggataaaactgcactgtcaagcagtcaagctgatagcgcttcagcagttccaggaattactgttgacaaatcagtagagttctcgtatcaggaactttttaatgcaacagagggatttagcatgattaataaaatcgggcaaggtggttttggtgctgtctattatgctgagctcagaggcgagaaagctgccataaagaaaatggatatgcaagctacaaatgaattccttgctgagttaaaggttttgacacatgtccatcatctaaatctggtgcgcttgattggttattgcattgagagctctttgttccttgtttacgagtttattgagaatgggaacttaagtcagcatttgcgtggaactggttaccagcctctgtcttgggctgccagggttcaaattgcactagattcagccagaggtcttgagtacattcacgaacatactgttccagtgtacatacatcgggatatcaaatcagcaaacatcctgatagataagaactaccgggcaaaggttgcagattttggtctgacaaaacttacagaagttggcaatacatcactgcccacacgtggaattgttggtacatttggttacatgcctccagaatatgctcgatacggcgatgtttctccaaaggttgatgtctatgcttttggtgttgttctttatgaacttatttcagccaaagaagctattgtgagatcaactgagtcttctagtgattcgaagggattggtttatctgtttgaggaggctctcaacgaaccggatccaaaggagggccgacagaagaaatcaaatgtgaatacctacagtggcgctggacatggtgtcctcctctctggcggcacaaatcagccctaaatgtacaattacaaggggcaggcaggcaacctacaattacaagaggggtagtcatctcccggacatgaggttcacgagaccttggttatcctggagggcgttcatgtcccagaactcgctcgtagatgacaatgtcatcagtgccaccaccacggatctcatagtgggcctcgacttggggtcctcctgcg

SEQ ID NO: 34905 - DNA, 452 bp, Setaria italica
  Peptide Sequence Number=SeqID_100879
aattgacactagtatatatatgtgcatcatatatccaataaattactatttaaccaaataaagtggcagtcctagtcttaggacatctctaatggtgcaaatcagttacctttatggatgcatatgtcaccactttgcttatgtggcaggaaaaaattaataagaaagataagagctaactacttagttaggggttcagtccttaaaggattccaatacatggcaacatttaaccccctgttacatgtagaccaaactagtttcaaaaaccgttgtatagctaaacatcagggacgatgttatctaatctattatgacgacatgatcaatcttacagctagtaaactatcattatattaccggagaatgatgcttagaacagcaggacacctatatatgttcagttgcagaaaatgcaagtctaaaaatattaacaacctcagtgccaaaac

SEQ ID NO: 34906 - DNA, 663 bp, Setaria italica
  Peptide Sequence Number=SeqID_100880
gaagcgcgggggcggccgacctgaacgccggcaccaacaaggtgagcttcgagccaggcccgggcatgttctatctggacgccatcaagccgtacctcgacgacgccgggcgcgaaggtggggggaaggcggcgccggggatggccgggcccaaggaggaggagccgaagtgcgatgacgaggaaggcggcggagcttgctccgacgatggtgccgggtcggtccactcctcgtgctgcttccattcgtcgcacttctcctactccgagctcaccaagagcggccaggcagacggcgtgtcgccgtcgccttccgtccggtcgaagcggtggggctctgccccggccgacgccattggataagagcaaggctgcgcgtccatattcgccgctgggcccgcgcacgccgagcagtgaggatcgggggcgccgcgcgcagtccccgagctcttcggcgtccgtgctgacatcgcagtcgctcaacgatcacgagctacgggggaactgctcagtccgtcaggtctctaagatttcagagcagcagcgcgtgccatgcaaaagaagcagaagcagtggcggacaccatgagctcggacgccgcaagtagcaaaaacagtgccgccgccgccaccaccacctccgcaccggtgatggtaaaacagca

SEQ ID NO: 34907 - DNA, 188 bp, Setaria italica
  Peptide Sequence Number=SeqID_100881
tggaattgatgatgtcttcagtgatatagccaaacgtgagttctgttttataaagtcttgcatataattggctttcagattttggctgttttaggcactgttcatgagttacaatatgacaacagtcaataacgagtagaatttatttagtcatttgaatttcttcatgtttcttatgctgtcacata

SEQ ID NO: 34908 - DNA, 1206 bp, Setaria italica
  Peptide Sequence Number=SeqID_100882
ctcccctcttcttcctcgccttatcccctctgctcctcgccgctcacctccccatcgccatggccttcgtctccgcgaccgcctccgccttctccaccttcctcatctccgtcccatccgccgcacgcgcaggcgcaggcgcaggctcctgcccgcagcccgggcgggccatcttggctccgctccacgcggcgaagggctccaactcggagccggtggtgctggagagcaaggtcaagggcaagaagaagaaggggtccggcgcaggggaaccctccccggagccctcgacgtcgagatcagagaggcgcaggagtacctcgacagcgacgagcaggaacctgttccagagaacttcccttttgaaatccttgacgaagagggtatgagcgtggttattttgaaaagggactacaaggatgagaagattgaggtcattgtcagcatgcctaatttagaagggggccctgagtttgatgacgaggaaggtgagggcaatggtgagagtgctggcaaggacgatgaggaagaacaagatgatgatgagagtgccggagatagcagcatttctctaaaggttgtagtctccaaagcctctgacccaaagcttgagttcacctgcacagccttccgtgaggagatcacaattgatgatatgctgatagtagagaagacagacgaggatggagagaagttcccgtacgaggggcctgaattcacggagctccctgtgaacgttcagaaaggcctgttcaagtacttggagcaacgggggatcacgctgtcagctaccaacttcatgcacgattacatggtgagcaaacaggcccaggagtacatccggtggatgaggaagctcaaggatttcgtcaaggaatgaggagcagcaacgtgaactggcaacatttttttggtagcctagcccttagtatgcgttacagaattattacaattacgcatagcttgtccctctctctaaaggacagagaaaggtgtatgggtctcaaatgaatctgtatcggctggcgaaacagcagcaggtagatctccagatgtgtttcaagaaaattaagaattacaggttactgctagctctaccagttatcagtttcgtgctgcttctctggatgtatgttgtggaattctgatggttgatgtgacctttttattgtgctgaaacgagcgcattctgcttgctgaagaaaa

SEQ ID NO: 34909 - DNA, 403 bp, Setaria italica
  misc_feature (18)..(18): n is a, c, g, or t
  Peptide Sequence Number=SeqID_100883
ttttttggggtttttttnttttttgttttttcttttatttcgggaagggctgcctgccatccagttcgtacttcagacgaaagtgtttccagtgatctacgttatccagcacaaattgcccatctggaaggaacaccggagtctaaacaaagaagtggtcacctggcgtgatgcaatgcagtgacccattataaaatgttatgtcatctgcttctacaaagatgggcaattgatagctgataatgggtcgacagcgatttcatccccaagcctaaacagtgcaatctgggtagctgtttcacggcctactttgccaaagtgagacgttaagatgggcttcactgatggatggacgtaacggactatcgctgccccaatgcaggctctgcagctatctggtgcg

SEQ ID NO: 34910 - DNA, 460 bp, Setaria italica
  Peptide Sequence Number=SeqID_100884
aagattgagaaacgaggggcacgcctcaagatcaaaatcaggtagcttaccgccaatgacgtttgccaaggaatttggagacacaaaatagcaaggacctacctgaagtgcctccaagacactttgaggtggtatagtttgttgatggttgaattcacacatagggatggggcggcgcgtatagatctagggtttcttattcacgaagaatctagaaactgtatcatagaaggacacaaattcgccatgggtaaacgagtatcggatccaaaccggatatctaaagcacacaaacacccaattccacgatatagccacaattgcacaaattccccaatctccactcctacatagtcctttcccaaatcctaaccaaatctacccaacatcttccaccatacccaaatctgtaggaccccaaccccactcaaacaacaagctaaccacctccaccaactag

SEQ ID NO: 34911 - DNA, 363 bp, Setaria italica
  Peptide Sequence Number=SeqID_100885
cagtgcagttggactgatacattatgcatttttctagtgcttgaggctttggtgatgtgcatgtggtaatagagggaagacatcctccatcaagtaaagagaaatgatatcaaattctgcagttactcattttacttcattttttattaggatgcctcattaaattttgaatttcaaacattgccttcagtccttttctagcataattttctacagctcaggttttgttttgagttctgaaaatgtattcgtggaactacctagttccgttagattattcccaaggtattttttcctagcacccatgttttagctgcacatgatgctgttcaacttcagaccctactggtcatttctaggttt

SEQ ID NO: 34912 - DNA, 338 bp, Setaria italica
  Peptide Sequence Number=SeqID_100886
ggaaagctttagtaaatcatcaatcaaggcaaggttttcgcgcaatcgatcagtttctacaccaaaactacggccacaagagaaggaactacctgctagagctcctgcatttcctggcactaattctgtctcaacatatccagccaaagaagctgttgacaatatagaagaagattcgcatgcagaaaattgttcccgggagatcaactcagaaaattgttcccgggagatcaatgagttgatcgcaaatggcaagttgcctaattccagatataatgagtatgcatttacaagcacagagtcgatacctacaggtgacatctttcttcttcccgtct

SEQ ID NO: 34913 - DNA, 1176 bp, Setaria italica
  misc_feature (1)..(41): n is a, c, g, or t
  Peptide Sequence Number=SeqID_100887
nnnnnnnnnnnnnnnnnnnnnnnnnnnnnnnnnnnnnnnnntttttttttttttttttactaacccaaaaaagaaagcactccaatgggtaacttttacatgctagagtacaaacggcgttcccgccagtatcccctccctccgtcaccgtggtcagtttatcaccgatcaagagtcaaaactgagaattacccgccccgtttctctcctcatctcctttgcatggttgcaaaaaaagaaaaaaaaccaccaagagcttaattaccactatgttacagcacttaattacactctcatcagaccacttgccgttgcagcacctcatctccggcggcttctcgccgggcggagctctgctccgttcgccgcctgcctcggcttttagcagggtccgtgcggcgctcccgccgccgcggcggcggccgccttggccctggccgcggcgacggtgccgccccagtcctggtccctgagaaagaggcagacggcggagcagtcgtcgacgcgcgacaacgggtacctggtccgccaccgttgcgccgccgcctccgcgacggccttggacgcgtgttgcttcctcggggtggcgcagacgatggacaccacctcctcgttgctcagcacgtcccacacgccgtcggtggcgaggacgatgaacaggtcgccgcgcccgacgcggcggtgtgccacctccggctccgacaccacgccgtgcggcttcagccggtggtcccccagcgaccgcgccatggcgagccccgggcagtcctcgccggggagccacacgcgctgcaccgacggctcgtccttgagcgcgaaaacgcggccgccgcagcgcttgatccgctccgcctcctgagccacgccgggcttgtggtcggcggtgagctggacggcgcggaggtagccggcgtccgacatggtggcgagcaccgccctggagtcgccgaggttggcgaggatgaggtccctgccctgcttgatggcgcatacggcggtggtgccgctgaagttgcagtccatgttgggctggagcttgagctccctgtccatggcctcgaacgcgttggcgcaggcctcccgccactcgtccagcagctgcgccggcgacggcgacgagccgccgccgctgccgtccgtcgacgacgacgccccaggaggagcgcgttccggtgg

SEQ ID NO: 34914 - DNA, 586 bp, Setaria italica
  Peptide Sequence Number=SeqID_100888
cgtgcggcggtcgttggcgaaatcgatgggcggggtagtcggagagctgctcaacgatgtggccgtacttggtcatccaccagtcgtggtactcgaccatgacgaagaccaccttcttcgtgtctcagcgcgtggtgatgtagagcgggatgataccgtcgttgaactcgtggtacacgttgccggtgtagccgccggttgagaagacgacggcggggacgtcgtggcagacgtcgcagtgggccggcgcggcggcgtccctgtcgggcgcggagcggaggcgaagctcgtcgatggtgctcatgatgctggactcccacttgcgcgtgtatggccggatgcgctcttcggcggcagcggcccgggacgagtttggccgcaggagcaggaagagcgagttggaggcggcctgggtgcggacgtccccgcgcatgacacagacgtcggtgcggagcgcggagcggtcgcagcagacggtgccattggcgacgtcagcgcacagcgccgccgcctcctcgtcgggccgcgtcctcctaccgagctgcagcagctcgtccatggcggcggatatggggctgcctgggag

SEQ ID NO: 34915 - DNA, 717 bp, Setaria italica
  Peptide Sequence Number=SeqID_100889
aaacacacatcagtactgggtgatatatccagcgcacaatcagcacattttctaagcatatttagctgaaaccttgagggttctatgaaaggttcccacataaccttgtcaatgttgttgtaatttactagaaggtcaacaaaagcagaaacttctgtctgatccttcatttgactaaattgcacagttaaattcttcaataaggtctctattacaggtccatgactgctccaccttccatcatttagaagaagagaccctttccttaatcctgccttgaatgtcacagaacaaaaggagggtgcagatgatgcagcaggaaatttgagttccatattgcgccaaaagctaaatatctggtgcgaaaaactagcatccatgtattcagcttgtagatcaacagaaacatgttcaaaccctttgctgactgatgaatataaccagaagatttgaccttagatatatgcagaaatggaacagaggtacccttgttctcttgaatcatttccagcattatcttcatcctctctaaatcacatttaaaattcatgcagctatcacctgacatcaccacaaaatgtttactctcaaaagttaaggtgacaaacttgcaaccttttcgttcacgatattgaatatcatctgcctcatgatgagtgctcatttgcactgtaaaagaagcgggagtcccggccatgtgatttcttgtgtgatttt

SEQ ID NO: 34916 - DNA, 1464 bp, Setaria italica
  misc_feature (1424)..(1464): n is a, c, g, or t
  Peptide Sequence Number=SeqID_100890
tcttgtacttaactagttctgcctctgcctcagcagcgccttcctcatcctgctgcacggctcctccgcgccgctggaggagaaggcggcggcgggagcgagagtggcggaggccacggcggaggtggaggaggcgccgctgccgccggggaacacgaaggtcgccttcctcttcatcgcgcgcaaccgcctcccgctcgagctcgtctgggacgccttcttccgcggtgacaaggagggcaagttctccatcttcgtccactcgcggccgggcttcgtgctcacccgcgccacctcccggtcccgattcttctacaaccgccaggtcaacaacagcatccaggtggactggggggaggcgagcatgatcacggccgagcgcatactgctcagccatgctctcaaggacccgctcaatgagcgctttgttttcgtctccgacagctgtgtaccattgtacaatttcagctacacttatgagtacataatgtcgtcatcaacaagctttgtagacagttttgctgatacaaaggcggggagatacaatccaagaatggacccaattatcccagtggagaattggagaaaaggctcacagtgggcggttctaattaaaaaacatgctgaagttgtggttgaagatgaagtggtgttgccagaattccagaagcattgcaggaggagacctttgccagagttctggcgggattgggatcgtcctattcctgcagaggcatggaaagcccataattgcataccagatgagcactatgttcagacgttgcttgcacaaactggtctagaagaagaacttacacggcgatcagttacacatagtgcatgggatctttcagcttctaaagatcgtgaaaggcgtggatggcatcctgtaacatataaagtctctgatgctactcccgcacttattaagtctataaagggcattgataatatatattacgagactgaaaatagaagggagtggtgtacaagtaatggaaaaccagcaccttgcttcctttttgcaaggaagtttacacgtggagctggtctgaagcttcttgattcatcattgatagcagcaaagtgatgagtatagtcacaggggcaactaccttttagtggtttcacccttacaagaatactgtcagctcgcacagatgtaaaggaaggtatgggactatgggggagacagaaaataacagtgacactctttttttgtgttcagtgtgttatcatattaatctgttgctccatagaaaggtacaatacatgttgtaaagcgataattttgttttttagtacctaggttggtatcactaacccacgatcagcattgtaacaacagtccgccagtggttctagaaccctgggaaaatttgtcggcaaaataatgaagaaattttctcccgtattgcatattnnnnnnnnnnnnnnnnnnnnnnnnnnnnnnnnnnnnnnnnn

SEQ ID NO: 34917 - DNA, 656 bp, Setaria italica
  Peptide Sequence Number=SeqID_100891
tagcttctatagggaacaacaccccggataggaaagctgatccggtggatgagcctcctccgagcaagcaggaagctgtttcggagagcaaaggaactgaggagacggtggagccgaggagctcacaggagttggaggaaaagcagtctacaccagagcgtcagcgtgatgagaaagagctgtctgctgcacttgaagctattaagaaagtcatgaagatggacgctgctgagccgttcaacattccagtggatcctgttgcactaggaatacctgattactttgatattattgatactcctatggattttggcacaatatgtaaaaatttggaacgtggtgacaagtatatgaattcagaggatgtatataaggacgtgcaattcatatgggataactgtaccaagtacaacagtaaaggtgattacataatcgagcttatgaaacgggtcaagaaaggcttcatgaaaaattggttggcagcaggcttgtattctgatgtgccagacagcggtggcaatgacaatactggagatgaggatgccaaaggccactcaaaaagcaagtctaagaacaaaaggagacggccagggaatgatcgccacaaaagtgactgcatatgtgcggtttgtcaagttacacggcgtaagaaggaa

SEQ ID NO: 34918 - DNA, 563 bp, Setaria italica
  Peptide Sequence Number=SeqID_100892
tttattgtcttgtacagttattgttccttggacagcctgtgcaaaaatgatccatcaacacttacgaattctattggttgtactgaacttcgttttcagcctcatttatgtgtgctgtatgatctactccctacaaatacaatatagttgcattgtctatagaaatgctttgctgaaccctcagcactagaatttagcacatattaaggcatctatgttgtgtttttgctaatgatttgttacaattgctttccagtggtgaaagcatggagaatgcactacgggcttgctgtaaaggtataaagattgggaagattcttattcatagggaaggagacaatgggcaacaggtctgtttattcgacttttgccgcatgtgttaggttgagtcaaattactaagatctaaatctctttgcagctcatctatcataatttaccgaaagatattgcaaataggcatgttctgcttttggaccccatactgggaacaggtttgttgtttattcctacatacctatgcactggactacactacttttcatgtggatgaaattacaaaaa

SEQ ID NO: 34919 - DNA, 1019 bp, Setaria italica
  Peptide Sequence Number=SeqID_100893
taacgggtactttagtacttagttaaaggttattaaagtatttgggtaagtatttctttatttctattagggtaaggtagtactaattgggtctaactagtcttcatctatcataatttaccgaaagataattgcaaataggcatgttctgcttttggaccccatactgggaacaggaaattcagcagttcaagccatctcgcttctattgaagaagggtgtccaggaagcaaatattatattcctcaatcttatttcagccccccaaggagtgcatgtggtgagcaagagattccctagagtgaagatcgtgacatcagagattgagtttggtctaaatgatgatttccgtgtgatccctggaatgggtgagtttggagacagatattttggaacagacgactatcagtcatcaactcctttattctgcgaggataaaaatcgtgtcaggcttttgtgagagttttgcccagacacaaagcaagccccagctgcggcataatctccaattttgggaaacttatatccgcatttcaaaactctggaatgcccatattataatcgatgtattcgttaccgggaaaactgtgtaccatggaacatcacagactgatctcgcctcttaatataattggagcaattccattttccggtgccatgagacgtctcgtctcttaagcagccttgtctccagcccattttggaactacagagggtcgtgttctgcagcctctacaggggatggaatatatgttggttttgctttcatttcatgtaaactaggaaaaggtgtcccggttcatcggaacttccagcgctagcgctgaaccaaaggatttgatctttcaccaacaaattcgtcttgtcttgaaaggccctcaaaggcaattcccagcttagtgtagttcgttggtcggtcttagaggaactcgtctgttggctgggttacccatccgtgtcttgtatatttaccacctctttattcacaaaccccggaggtcaatataaatcctgtaaaa

SEQ ID NO: 34920 - DNA, 1771 bp, Setaria italica
  Peptide Sequence Number=SeqID_100894
cggcgctgcgcaggtccctccctccgtaggtatatgggttcgaaatcggtggaccaagtgcttgatgccgccgccgcgggggtccattactccgcgctccgtttggacgacctgagcctccaaggttccatgtctgccgaggaacaaccgacgacgtcaggcctggaaaatggccaccaggagccctttgttataggtgttgctgggggtgcatcttcaggcaaaagtactgtttgcaaaatgatcattgatcagctgcgtgatcagcgcgtggtggttgttacacaggagtccttttactatggactgactgatgaggaattaatccatgttcatgattataactttgatcatccagatgcatttgatacagagttacttctgtcctgtatgaaaaacttgaaacatggcaaggctgttgacattcctaactacaacttcaagacatacaagagtgtcccaaacgcaaggaaggttaatccttcggatgtgattattttggaaggcattctagtttttcatgattcccgtctccgggatttgatgaatatgaagatcttcgttgatacagatgctgatgtgcggttaacaaggaggatccgtcgtgataccattgagaagggtagagatatcaaaactgtgttagatcagtattcaaagtttgttaagcctgcttttgaagatttcatcctgccaacgaagaaatatgctgatattataatcccacgaggtggagataatgatgtggcgattgacctaattgttcagcatatccggactaaacttggacaacatgatctatgtaaaatacaccccaatttgtatgtaattcagactacttatcagataagaggcatgcacacaattatacgggatgctgccacagcaacacatgatttcatattttatgctgatcggttgattcgattggttgtcgagcatggtcttggtcatcttccgttccaggaaaagcaggtcattactcctactggatctgtttacactggtgtggagttctccaaaagattgtgtggtatctcagtgattaggagtggtgaaagcatggagaatgcactacgggcttgctgtaaaggtataaagattgggaagattcttattcatagggaaggagacaatgggcaacagctcatctatcataatttaccgaaagatattgcaaataggcatgttctgcttttggaccccatactgggaacaggaaattcagcagttcaagccatctcgcttctattgaagaagggtgtccaggaagcaaatattatattcctcaatcttatttcagccccccaaggagtgcatgtggtgagcaagagattccctagagtgaagatcgtgacatcagagattgagtttggtctaaatgatgatttccgtgtgatccctggaatgggtgagtttggagacagatattttggaacagacgactatcagtcatcaactcctttattctgcgaggataaaaatcgtgtcaggcttttgtgagagttttgcccagacacaaagcaagccccagctgcggcataatctccaattttgggaaacttatatccgcatttcaaaactctggaatgcccatattataatcgatgtattcgttaccgggaaaactgtgtaccatggaacatcacagactgatctcgcctcttaatataattggagcaattccattttccgaagaaaaaaaaaaaaaaaaaaaaaaaaaaaactaaaacgtaaagaacgtacgtaccgaacgaacgacacacggagg

SEQ ID NO: 34921 - DNA, 1173 bp, Setaria italica
  Peptide Sequence Number=SeqID_100895
ttttttaccttgcagaatcccggcaacaaaattaagattccaacttattagcaaaatgggcagcgacgcaattcttttttacgagtctctaagaacgacatacacttgaatgaccatctcacgatcgatctttttgctgatagatagacacatttgtcacacaagcagtttgatatgtcgtgtcgcgaagggactcaacaagacaagtgttcctcttaaactaaaaaaaagacaagtgttcctcttaaactactcctctgcggagacttcacttcttttgcttgccgctcacactcagctgttggagtccaagcaaaaggtcattggagtcaaggaacaccctgttgtttgagctcgccatggtgtgtgaaatctccctcgcagcttcaatctgtctcagagccaggaaagcggggttgttggcaatggcctgaccaatcagctctgcactcttagcctcaccctgagccctgatgatcgcactttgcttgtcttgctcagccttctcaacaatgaacttggcacgctctgcttcttgggcagcaacctgttttgcttcaatggcatgtgtaaactctttcccaaagctgaggcttgtgatggacacatcatccagtgcaatattgaagttattggccctctcagtcagaatcttcctaatctccctgcttacagcctctctttgggtgatcagctgactggcattgtattgcgcaaccacagccttgagcgtttcatgaatgattgaaggcaggactctctcattgaagttctcccccaggttcctgtagattttaggtagctgatccggcattggtcgcgtaagaacacgaagaccaatcctcaccatctggagatcccggcttccggaggtgctctcgacgaggttgggtcgggcgcggacgtcgtagatgatgggcctctcgatccacgggatcatcaggtgggttccttcggggtacaccttgtccttgatgccctcgatgcggttgaagacgatggcgcggtggccgccctccacgttgtagaagctgttgaggacggcgtagagccccgcgccgccaacgagcgccaccttcacgagcgcgctcccgcccgccggtgcgctgggcatcttcgctcccttgaagctcatctcgccggcggaggaggtcgccggcggcggaggccggg

SEQ ID NO: 34922 - DNA, 250 bp, Setaria italica
  Peptide Sequence Number=SeqID_100896
tttttgaagctgatggtattgagaagattcagtaagctgaatagtcaaggacgtatcaaggtctgatctctactcacaaacacaagcgtacaagatttaagaacaacccatgagactccattaatttgtcaagtattactagctacctccatcttatttttgaaatggataatgaagaactgagctgattaaaaaccggtttgttcaatgatatccaagcggcgcaggcacctccttgagctccatcccc

SEQ ID NO: 34923 - DNA, 480 bp, Setaria italica
  Peptide Sequence Number=SeqID_100897
taaatagatgatggaagaataaagcctacatacttcaaatgaatcaataccaacatttataattcataggagattgttgatgtcatattcctctgttcttgctctcttcaatatttctgtctgcatggtgagagttagtcaagagtgcacaataagaagatttcatgaatcataaatttagtgcacatgttggaaatagattgtcagaaacaatgttcccatacaaccctcattacatatcctcttgtgttattcaaatagcatctcaatataacttggatagaaaactgctggacacattatacagcctgagaagaatgaggcagctatccatagttaaaaatttacaatcataagacatactaacctgaatccgggtgctggtgcctccaccacccggattctgtttcaccgcccaagatacatcgctccaggtttttgattgtatgtcctcccacaataaaggtacttgaactgact

SEQ ID NO: 34924 - DNA, 708 bp, Setaria italica
  Peptide Sequence Number=SeqID_100898
aataatgacaaattgacaattaagtcctgaaatcctgggttgggttatcagctgcccccattgattacacaaaccggaaaacaatgaatgtagatccacataggacttgagctcttttttctttccaaactattccactccatgtcctacttccttgatgtgaggccttttgtgaataaatgatgatgggaagaaataaagcctacatacttcaaatgaatcaataccaacatttataattcataggagattgttgatgtcatattcctctgttcttgctctcttcaatatttctgtctgaatccgggtggtaatgcatccagcaccctgaaattgtttcaccgcccaagatacatcgctccaggtttttgattgtatgtcctcccacaataaaggtacttgaactgactccacatgttggacaagccttaagccacttgtaacaaaggcttcttgccagagttcatgcttggaccatgatggagagatctctcgtactgggattccaatatcattgcacacctctatcactatctgacgaatgattccagggagaattccatcacttattggagctgtttgcacttcaaacttgttttccaatgtttgaacagtaaaaggttctttcctctgatgttcctccttttggcagacaacaaagaaagttacgtgaacaagaagaccttacaaagaaatagtagaatacca

SEQ ID NO: 34925 - DNA, 966 bp, Setaria italica
  Peptide Sequence Number=SeqID_100899
cttttacgagaacagactacaaatatacagccttaacaacatatgtacatacaatgttgatacacagaatgaaggtgaaccaacaccagggcagaacaatggggagaaaagaatgcacagctactttcttctcctgtctcaacagggtgacgcattttgacagcaccctacactgtttatgtggtacacaactatctagaagaaaatgaaatcaccgaaggaaaagctgactagttacaaggagggatgatctaatcagttggcatcaaatcatgttgaggacgatctacgcaacaatctacaaaaatgctaccaggatgcagcttcaagtcaagtgacaaccagaaggttgttttcatgcccattgttgtacacagtgggccgcaaaggatcgttcttccagacaccatcaacgataaacttaatctcatatctacctgggtacagcctcaggttcaaggaaaacatgcctctttctgatgattttttccagctttctttgacttgtccagccatcaaatgacccaaccaataaaacctctgaagcagggttggcccacatgatacaaacagtacggagctcactcagggccttctcaacttcatcaagcctcctttgtttatcttctattattttgttcctttcaattatctcaagtgccatcttcccttctaatacagctattttagcccggattgatcgtagctcctcctgagcttgcagtacctttgtctcctcaaactcccaatcgtcagagatatcatccagtacagtagctccattattatttgacatatttgataagactttggcgaatcttgatcgtaatgtttagagagcggcagataggtccaattccagagtttgaagacgagaatgtatctcatctctttcagagtctacaccatcactaggataatcacttacagccacaccattagatgatctgtgaaagtcattttgcg

SEQ ID NO: 34926 - DNA, 1061 bp, Setaria italica
  Peptide Sequence Number=SeqID_100900
ttggttccatcggcaccaacgaggttttgcctttttattcaaaaaagggatccccctccaccgctgctccgctctcctcgtgctcgccgcccccaccgagcctcaagccgaagccgcctccgcacgctcgcgcagccatggcagcattatcagcgaagaccatacaaaatgcattcttggcacaacatcacccacggactaggcatggtacaagatatcccagtgacttttgttccctcaaaacccgcggcatgcattccttccaggaatgtagattgacagtggctgattcttcagccaaatggttaaataccacatcgacaccatggactagcttcaacaaacaagcaattagctgcaatgctgctcaaggtggcagtgttgtctcttcctctgagaaagttgattttctcaagcttcaaaatggcagtgatattcgtggtgttgctgttgctggggttgaaggtgagcctgtcaacctcacggaacctgccactgaagctatagctgcagcttttgctgcgtggctgttaaacaagaaggaagcagatggattgagacgtttgagaatatctgttggacatgattcacgaatctctgcacataaattgcagaatgcagttactcatggaatcactgctgctggacatgatatcctacagtttggattggcttcgacacctgcaatgttcaacagtacacttacggaagatgagagaaatcatttacccgttgatggagccataatgataacagcgagccatcttccctacaatcggaatggtctcaagttttttacaagtgatggtgggctaaataaggctgatatcaaagatatcctggagcgtgcttctaaaatatatgaggaatctgcgcatggcaagctgaaagaatgggaggatgcttctaggggagttgtgaatagtgtggactacatgtcaatttatgcttctgatcttgtgcaagcagttcgtaaatctgctggagacaaagataaaccattggaggggctgcacatagtcgttgatgcagggaatggtgcaggcggcttttgtggataa

SEQ ID NO: 34927 - DNA, 1826 bp, Setaria italica
  Peptide Sequence Number=SeqID_100901
ttttagttttcgtttttgtttattttgtttcttagggttaatttggtttgttcttaggttcggttctcagtttggattggcttcgacacctgcaatgttcaacagtacacttacggaagatgagagaaatcatttacccgttgatggagccataatgataacagcgagccatcttccctacaatcggaatggtctcaagttttttacaagtgatggtgggctaaataaggctgatatcaaagatatcctggagcgtgcttctaaaatatatgaggaatctgcgcatggcaagctgaaagaatgggaggatgcttctaggggagttgtgaatagtgtggactacatgtcaatttatgcttctgatcttgtgcaagcagttcgtaaatctgctggagacaaagataaaccattggaggggctgcacatagtcgttgatgcagggaatggtgcaggcggcttttttgtggataaggtactcaaaccattaggagctgtcactactggaagtcaattcctggagcctgatggcttgtttcccaaccacattccgaaccctgaagacaaaactgcaatgaaggccattacacaagcagttcttgataacaaggcagacttaggcatcatatttgataccgatgtcgacaggtctgctgctgttgattccagtggtcgtgagttgaaccgtaaccgattgattgctttgatggctgccatagttcttgaggaacacccaggaactacagttgtgacagatagtgtgacttcagatgggttgactgtatttattgaaaataaacttggagggaaacatcaccgtttcaagcgagggtacaagaatgtcatagatgaggctattcgtctgaattctattggtgaggagtcacatttggctatggaaacaagtggccatggagcactgaaagagaatcactggctcgatgatggagcataccttatggtcaaacttttgaataaacttgctgctgctagaacactgggttcaagtattggaagtaaagttttgactgatttggttgagggacttgaggaagctgctgtgacagtggagataaggttgaagattgatcagaatcatgcagatttgaaaggagggcccttccgtgattatggggaagcagttttgagacatttagagaatgcaattggcaaagatccaaatctccacaaagcccccaagaattatgaaggcgtaagagtttcaggatatggtgggtggttcctgttgaggctctccctccatgaccctgtccttcccctaaacattgaggcaccaagtaacgatgatgccattaagctcgggcttgcagtgcttgctgctgtgaatgagttctcagcactggatgtgacagcattgaacaaattcgtgcagcagtgaactagggacactgacatcattctgtgagaggtttcacatggggacttgcttgtctctgtcgaacatgaacaaattcctgagctgtcaatatagggtttcgatgtctggctttcctcggatgaattttttcgtgtttataccaggtatcagaataagaacatttatactggtgaggctggtgtatacttgaaaataagatgcgagtgttttataaggatcaggaggcttgctatgaaggccatggatttgccaaaaatttacttgatttgttaataaccttttcaccgtgattagatgaagcacccattcgctgctttgttgtggattcctatcttaacgtttggtttactggttgtgctgtatatatgatgatggaggatgcatggataaaatggtttcttgcgtgatttttgaaaaaaaaaaaaaaaac

SEQ ID NO: 34928 - DNA, 275 bp, Setaria italica
  Peptide Sequence Number=SeqID_100902
aaaaaaagctgccatggattacaccgagggagagagagatacaggagcacgtggtcgtgtctcagtgtctgacagggcaaggagggattacaacgggcgaggcggctgcatcgccgccggcgagttcaccggagccagcggcggaggtcggtggtggacgacggcgacaccaccacgtccccgccgaggctctccgcgcacgacgacgacacggtcgaccgctgctccgacgagaaccgccccgccgacgactacttagaaagactacgggacta

SEQ ID NO: 34929 - DNA, 307 bp, Setaria italica
  Peptide Sequence Number=SeqID_100903
gaaggagctggcgggtgtgtacaagatgctgccgccgctgctgacgacggtgcacgagcagacagggatgctgccgccggcgtggatgggcactctgacgggcggcccctcaacgtctagctgatgaggtagatgtgaaatgtgaagctttgtattaattttcactttttcaaaagataaaaaaagctttgtgtttgccaggtgagtgagtttgcagtagctgagctgaatcaaggacatcgcattaatgtaatgtgctccgcatttgtatctaaaaaatggaaaccagtgaaatttctttttgatt

SEQ ID NO: 34930 - DNA, 2847 bp, Setaria italica
  Peptide Sequence Number=SeqID_100904
caaggaatgtgtcaggcaactgcggctggcaagggaagaacaagaggacaaaattcgtgaaatagtttccaagaagtctcaggtgccgcagtctgaaaactctgagctccaaaaccatatcacagagctaaaaaagcggctcgaagtgaccagatcagaagcatcatcatccatgctgttacagcataacctacaagaaaagcttcaggtaattgagaaagaaaacttggaccttaaggccaagcttcaagcaactgagaaagagaatatggatctcaaggccaagcttcttgtacagtccaaggatctgaagatactaatgttggaaagagacctgagcaacaaagcagcggagacagcaagtaaacaacacttggaaagcgtcaaaaagattgcaagggttgaggcagagtgccggaggttacatcatctaactcggaaaccaacactgatcaacgattctaggcctacacaaaacaatggttgcatggaatcactgactgacagccagtctgaccatggggagcacatggtggctgtagataatgatctgcgaaattctgactcatgggcatcagctttgatcgcggagcttgatcagttcaagaatggcaaggatggttcaagaaatcttgtgaacaatcctgttgagattgacataatggatgatttccttgagatggaaagattagctgcgctgcctgaatcagaccgcacaagctctaactttgaaacagattctgacacgagtgtggcaagaagcttctccttgaaagtcgaaacggaagaattgcaaaatcaggtcacagatttgcaggaaaagtttgatgccattgaaagtgagaaaagggagcttgagatgacacttatggaggttagaaatcagcttgacatttcctgcgatgcgctagtggcggcaaagaacaggctggtcgaaatgcaaatgcagttggactcggaaaataactccaaacttgcagctttggaagatgtggagcgtctggactccgagaggaaggctttggagttgcagttggagtccaagtctgtagaagttgaggagctacttatggctgtaacttcaatggaggaaaatgcagggcagaaagagttggagtcgcagctagaactgatgtcagcagaagccacagagcttcgccttactgtggcatcattagaagagagaatccaagccgagagggctctttctgtgcagcataaagaaaaggaagaggcaacgtggaatgctaaagaagatctggaagcacagctaagttcagcaaacactgaaatggggaaactgcatgacattgtcaaagcactagagaatgaggtcaaaagggagaagacgttgcatgaagaactaacagcacagttacaggtgaagatggaagcagctgtttgtgcagttaaagaatcattggaggcacagttatgttcagcaaatactgaagcagggaagctgcgaggtattgtcaaagagcttgagaatgaggtagaaaaagagaaggcattgcatgaagagcttgcagcacaaatagaggtgaaaactgaagcagcaagaaccgccaaggctgctaaagaatccttggaggcaaagctgtgttcagcaaacgctgaaatacagaaactgcaagatatcacaaaagcactacaaagtgagttagaaaaagagaaggcactttatgaggaactctcaacacagttagagatgaagattgaagcagagagaactcgttctgtggagtctgctaaagaatcattagaggaacaactacagttagtgaactcggaagctgcaaacctgcgtgatatggtgactgcacttgagcacgatgtggaaaaggagaagatattttctgcagagctccaaatgcaactagaagctctagaggctataaagaaggtgctggagtcagaggcggagtctgcacttcaggatgccagaaatctcaaccagaaggtggagtcattggaagcaaaactcgaggaccagatgtcatcagccgaagaattcactgccaaggcagaggctttacagtcagagaagatggctatggagcataaacttaaaacagcagacagggaactcataaaactgacaaacaaggtgagcttgctccatagggagatcgagcaggagagattgttatcagaagagtatgaacagaaatgccaaaagctggaggctcagctgtcaagagatagcagggatgcaaagctctggcggctcgcaaattcaaatggagatctgaaggctaaaaaggagaaggagctcgccaacgcagctgggaagctcgcagagtgccaaaagacaattgcttctctggagcatcaactgaaatcactgacagacctcgacagtgtggtgctggagcctgaaaggcttgaatccagcagggatatgcatataccattgccactggacttcagaaatggggatgctgaattcgcgatgtttgcggatgatttatacgactttgaccttccaaacagcaacacaagctgcttttctccgctcccgtcgatccagccctcgtccccgccctcggagatgtcagtgtttgcaggggggctctcgactcttagcagttacaggagcaaaagagcaagtaggaggtaacagaaaatgctgcccagatcccatactaacaaacagttcctggatgccaccatatgtaggtaggtcgatgtacattcacagaaactgatcgttagattcgtgtgctgaattccatccattccagcaagctcagtttttatagcctgcttgatgaggtcttactgtatcagcgatgggtgttgtttcgttgtttgctgctaaatgtagaacccggtatctgtgtg

SEQ ID NO: 34931 - DNA, 1079 bp, Setaria italica
  Peptide Sequence Number=SeqID_100905
taaataatgttgtcaaggctgtcgaactccaggagcaaggagaggcaggtttacataacttatctgatgctcagatagaacttaagactttggttgacgcaatatcttcggcaagtcaaagggaagcagaagcccatgaaactgcaattggtttggccaaagaaaatgaagaattgaggatgcagcttaaggttttgattgaggataacaagagactgtttgatctatatgaacatgctattgtaaatgttgaggcaaatcaagatggaaactgccctaccattcctggaaatgaacatgcaagtggtcagcaaggtagtcatccttttggagaaaaccttgtgaatgaagatctgcctaatgccccaccagcaggcccatcagatttgcatgcacacaactcatccagcatggaagaagagtctaagatagcggatgagaaatgcatcaacgaggataacttgtcaaggaatacatctgctgaactgtgtcttcagctggaagagatgcacgaggaaaatgatagacttatgggtttgtatgagaaagctatgcaggaaagggatgaatacaaaaggaaaattttagagcaaagcaactctgaaactgtaaaagagattcggtcggatgaaaaagatgatgaaatgagtgaagccgcagatcctaagagtcttgaagtgaaacatgttcatgactctacaattttagctttgaaagaagtgctgcagcttgttcggactaagctggagcttgtccaagacaaggttgtgtctgctcaggatgcagtaaaatattttgagctactcgaaagggtaagtagaaaggcggaagaactttctgcaagcattcagcttcgtcgtctagacgtgcagcatggtcaggaagaaaccaaggccctgaagtctgcactgtcagaatcacaggacaagaaagatacttttgaaggcaagtatttcttgcctgcagcatcgtgttggaacttggatttgaagaccaaagccattgcttcatccaagtttgattctaactttgcattgatgaatgaaaagaaggaacagttgaatcttctcctaagtcgc

SEQ ID NO: 34932 - DNA, 803 bp, Setaria italica
  Peptide Sequence Number=SeqID_100906
ttcggttgtcgtccgccgccgacctgcaccgggagttttggggaggatgctgaaagatggtgaaggggcagacgtgacgttcactgtggacggccagttgttccgtgcccacagatgtgttctggcctaccgatcgccggtgtttcgagcggagctctttggtccactgaaggagaaagctacaagttgtatcaggatcgatgacatggagccgtcaatcttcgaggctcttcttcacttcatctacacagatcgtctgccggatagctgcaatgatggtcggaatgcggcgatgcagcacttgctagttgccgcggaccggtatggagtagagaggctaaggttgatgtgtgagagtaagctcagcgaagctattgatgttgaaacggtggcgacaacactggccttagcagagcagcacaactgctcacagctgcgacgagcttgcattgggttcatggcctcgccgaacatgcttggcccaatcatggaaaccgatggattcaatcatcttgttgcaagctgtccgttggttttgaaggagattttggacaaggtgtcctgcatttggagtgataatcagcaccggtaacaagtgagtgatagtgatactgaattttagttgcgtgtggttgtctgcgatcttgtgcattactgtaatatttagggagtatgacttctcatcaatcatgtaagaacagtagcatcggtcccatgaacagtagcagcgatatgtaaccagtgtgacttgtttgcccccttcggttgcatatcagtgcccacaaactttctgtacaaaaaaa

SEQ ID NO: 34933 - DNA, 856 bp, Setaria italica
  Peptide Sequence Number=SeqID_100907
acaaaatactaaaagacccgaccgggtcggttcagccccgcaggccgacgccgacgccgacgccgccgacgccgtcgagggggaagaggagagaaagagagggtgattcggatttagtgtgaggctaacggagtgccggggagtggagtgaggaggacgaaggggttcgccgtcgccggcggagcatgtcgtcgctggggacgtccaaggggatcctggagatcgccaagttcggcgtctacgtctccgtgcccgtcgcgctcacctacctcgtcgccaccgactccaagaccctcaagaagctcatgggcctccgtccttatgtggtttatccacctgaaggtccacgcccaccaccgcccgaagaacttcgtgagagggctcgggaaatagctcggaagaggcagcagagttgaatgtattggtgactagggagcatcacagatcataaatccagctcacagatatggtagagaatgtcactctggttgttgatatggagcacttgtttggccctggtctgtaacatccttttgatgttgttgtcataataacattcaagtggctgtgggttctctgttttgagctgaggattgactgaatgtaacgcactgtatttcttgttgggagccagttcaaatggtacattttgagttctagactcctttaaatggtacagaataaaagaaaggtcatatttcgtataaaaaaaaaacaatttgagtttaatgagtagtaaagaaagcaattgtcctggatgagactaagatacctctgagcatagatggttaaatgtactctgttatgattacatatttacaacagaagcttgcatggtgaacctacaaaggaatag

SEQ ID NO: 34934 - DNA, 376 bp, Setaria italica
  Peptide Sequence Number=SeqID_100908
ggcagtttcaggttgcattttgaatttcgtttagttcactttattctgccggaagttcggatccattggaaattcctgcacagcattggaagttcctgcacatctaatactgctgcgaagtttttcaggaaaaatttgaagtgagcctattcactccccctctaggcatcacaagatcctgtcaccgtaccctcacccatcgcccatcaggaaggaaactcgcaggtacccgtgctcgcaggcagaattgccatcccttcaagcatgtgagatatagatataggtggggttaacccagtagctatatgaactatcctctagatagtcttagcatgctgataatcaaaaataagtgtttaatcatgtcatttgtcaa

SEQ ID NO: 34935 - DNA, 645 bp, Setaria italica
  misc_feature (613)..(613): n is a, c, g, or t
  misc_feature (630)..(630): n is a, c, g, or t
  Peptide Sequence Number=SeqID_100909
tcataagcacaacgttgaactgtggcatcacacgcctatatttctttagagaagatgaaagcacttcagaaatcattctaactaaaagttgacttttatgtctgtgagactttatttgaactatagttgaacaaattgcagtgggttgaactggtgatgaatgaagctttggttactttcactccttgaaactcctacattttctttgcttgaaatgacacacggtaggttttgatcttttgaaaggtcaactaacattcttcttgcagcagccgcgaatgataacatccttgctgagtgcctcttgcgaagttgaggagtcaagaactaagcaaacaccaaaaaagatcaaaggattctggagcaatggagattgctctacaaaaacactaagccttttctctctccttcctttctttccaggtggaactatcaaggcagatataagggataagaatatctctatccaaatatgcaatctttcatgcttgtgccggttgtttgcgtcatgtacaaaaaaaagttgaaaaaaactagagaaaagatcagataataatatatctgactttcttcagatgcctgcagcatcatacagggaagatgcagcaaaggntatagaaaaagcaaagnttgcagcgtcggatc

SEQ ID NO: 34936 - DNA, 372 bp, Setaria italica
  Peptide Sequence Number=SeqID_100910
tcctcctggctcgcctgcactgtgtactgcacctccgtgccctcccgtccactctcgtccttgtgctgctgaccatccaacatcctcctccgtgatcggtggcgcgccgcgggcggttcatcgatcggttcagccattcttgcagctacagggcatgtgcttttctggtaaagcgtgctgtcccctgtgtgccttgggccggagcaaggaatatttctgaattcttgatcacgggaaggtatcgacgaactagatgcatcagaaagttcccgcgtgaagatcttcacgcgacaagccgagaaatttcttgggtagtgattccactgcccttaagtagaaatggaaaagggagggttcaagatgttcaacata

SEQ ID NO: 34937 - DNA, 1072 bp, Setaria italica
  Peptide Sequence Number=SeqID_100911
taatggagatattctgtactctccattgtccagctgatcaaggtcaatagctgtctcaacaagagaagcaaacctaccaaatcgattctctgtcatccattcttccaatgggtcaagaaactctgtctttatcaatgtggaaaattggccattgtattgctgaagaacacccttgacgtatgagattctggaacaagactggtaaagcttaacaacaggctgcagattagctgatttctttcggagagaatgtgttagacgatcaatatctgatatccttttaagttgttgcctgagtccctgacgaagctctggatcttctacgatagcctgaaccatatctaatctgttattgatttcatttatatctaatagaggttgtttcagccatctgttaagcaatctctttcccatcccaacagtacaggttctgttcatcaaaccaaacaaactgaagttcttgttcatatcagttttcccttctgtgatgtttaatgctcgcaccgcagcagaatcaagtctcatgtagcagttcagattgtacttctcaattgtgtaacttccatagttagtatcatctgctagcaactcggcataagataacagagctccaagggcaccaagagcatagtcaaactgagatagcaggtcacgaacaggttcaacagaacccctgattattctaccaagatcttgtgcaagatccctggatttgaagtcaaccttctttttttcagtcaatagaacattacaattactaatggcatcttgaagggggttcaaatcaatggatttttcacaatccgctgggagaagacactccttgcaacctaatgcaacaagtgctgattcaacatttgtgaatcggctatcttcagggaactcagctaacccaagcttcctgttggtcatatccagaaaactaagccctacatacagctgaccttcccggaaaactggaaacaaagcaacaatgactggtgaatcttgcatgtcgttatttgcaaacagaatgtcttcaaaactaccaatatttccaggtgttccagactttgtttaaccttcctaacta

SEQ ID NO: 34938 - DNA, 391 bp, Setaria italica
  Peptide Sequence Number=SeqID_100912
cacaaatataactcagcaccaacacaaacacacaagcataaacaacataattcaaagtgtttctaggctcgaacccgacattctcacaaaaacacacacaaatctaaacatgatagcagctctgttgcttctcttttttatcttttaatcttgacagctaaaaattctcatcttgtgccatctgaaggataacttcataacttacaacttcctcgtgatccaaaaatagaagaaaaattctgaacataggctaatcttgacatgaacctcaaactaaaaatctgacaataattgcaaaacaatcctaataaaacaggtatacttagagctccaaaattcatatgaagatgcacttcatcaatctgaaatcttataaattcctacaacttct

SEQ ID NO: 34939 - DNA, 351 bp, Setaria italica
  Peptide Sequence Number=SeqID_100913
ctctcctcttagtgactttagctcctgttctgcagccttcacaaatcctcgcaaccctcttgctaatccatcatcgctgcaggtctccagaagcctcttgatgtctgtgagtcggctgcctagaattgaacactcgctgacaaccgcatcgtagtccaccatggctgccctcttcacgttggcaaactctgtgctgagacctccaacaattggcagcccgaggttcatgtattcattttgcctctcctcacgtgatggcccctggcctgctgctgaactgctgccctcgtggccagacctggcgagactgccagaacgccggatactgtagttgcgattgatggcaagccg

SEQ ID NO: 34940 - DNA, 608 bp, Setaria italica
  Peptide Sequence Number=SeqID_100914
acttctattgataaggtagccaccttgccccaaaattgcagtgaaatcttcttacgtattgtcaccataccttatccatgtagatcacaacatggacctgggagaaggcaataccaccacacggatcaaaagggcaaaagccacaaattggcccagggtcatgtcaaagtttttgcttgattggtaccttgagaaaaagagaggaatgccacccaaaaccaagttcaagaagatgcaccatgtttggtgcacatctgcagtaaatgctaaattcagaacaagttactctgtcgatcaggtccatcgccattttaggcgtttcaaggagatctggatcgttgtgactcggtatgccaatgagactgggagcagattcaacaataaacacaaaatgcttatacttcctgctgccattatggctagtttacctatagcggagcgtgctattctcgcgaagcccattccattcttcgaccatctgctacaactctttaatgatggcgagctggatgctgcctgcatgagagaccctattatggatgatgattctcatgaggaattggaaacccagattgcaatgaatattattgcccagggtgcagacacaa

SEQ ID NO: 34941 - DNA, 584 bp, Setaria italica
  Peptide Sequence Number=SeqID_100915
ctcggacatcatcttttcccagcttcctcttctcaaactcaaattcaagtttagagataggctgtgctatgggttcacgttcagaatttgctaatccattgaagtatggatctgtcagggcctcagcagcacttggtcgttccttggggtcaaaagcaagaagacgttcaagcaaatggagagccataggatctacccctggaaactttttagaaatggaaccttaggctttttcctcatattgcttaagtatcgtcgagctttctcattccttatcttagagatggactctgctgaaggtgtaccaagtagatcagtcataagatccaactgatgcacaacattcttccctggaaagagtggcttccccgtgagcaattcagcaaatatacatcctacgctccaaatgtcaatagcaggagtgtactttgagaaaaaggagccacataattctggagctcgataccatctagttgccacgtaatccgtccagaatatggctgatggggtctcacagaatgacacacgggcaaggccaaaatcacaaatcttcagcttgcagtcagcattggctagaattattt

SEQ ID NO: 34942 - DNA, 327 bp, Setaria italica
  Peptide Sequence Number=SeqID_100916
gccgccgcggatccggcgccggcgcccgcgcgggaagctacctgcaggtggtgggcggcggcgtgcgggtggtggtgcgcggcggcgacgaggttgcgcagcgccttgccggcgagcttgcccctgccgaacagcaggtggaggtccatcatgaggcgcttgcggcagaggccccggcgcagcatgtggtagacggcgcggagcacgctcatgaggcgcttcccgaacccggggggctccatgccgccgccgccggacggctggatccgcttgtcgggctcgacggcgagatccgtggtgccgggctggggaatgctcaccaacgga

SEQ ID NO: 34943 - DNA, 403 bp, Setaria italica
  Peptide Sequence Number=SeqID_100917
tgaactaacactcaacagtggaggactgtgcagcctaaatcctgaaacaacattaggtcaatagtgtaatggtaaatacaagcggaatggaaccagtaacacagaaaatgaagtgatgcaggtggctgatggtgggcacttatttacttgccaacaaaatgattggaccctgtgtgtgagtattaacatccacatgacagtactgtcaatccaagggaataatcataatcagaggatccaacaaggcaatattctgaatggtaagtttcaaaggtcaaataatgcatttgattattctagaagaaaagtagtgccaaattgctaattataactcaactcctgatgctgtcctgttccatgaattgaatttaacatgggaattcaaagaaacataaaagaagaa

SEQ ID NO: 34944 - DNA, 713 bp, Setaria italica
  Peptide Sequence Number=SeqID_100918
ctgcactccaccatcaaacgccgccacaaatcccattccactccaccactcatcactagctctcggcgccatggatccgagggcggcggcttccgtcctggcgctcttcgtggcggcggcgatgtcgccggcggtcgtcgtcgtcggggacttcgcggcggaccgggccgagtgctcggacaagctggtgggtctggcgacgtgcctgacgtacgtgcaggacgaggcgtcggcgccgacgccggactgctgcgcggggctcaagacggtgctgcagagcagccgcaagtgcctgtgcgtgctcgtcaaggacaaggacgaccccaacctggggctcaagctcaacgtcaccaaggcgctcggcctccccgccgtctgcaacgcacccgccaacatctccgactgccccaggctgctgaacctggcgcccaactccaaggaggcgcaggtgttcgagcagtacgccaagcaggcggcggcacagggcaccactccgagcgccaccggtggcggcagcgcggccaccgcggccggcgcgcagaagagcggagctgccggtcatcacggcggggcggtggttgggagtgggaacggtcggtgacggcggcgcacgcgcggtggtgctcgccctcctcgccgcggccgctccactcgccgcgccttttctggtccttctgctgggatagacgatgccacgatgaacacgaacggcg

SEQ ID NO: 34945 - DNA, 1994 bp, Setaria italica
  Peptide Sequence Number=SeqID_100919
cccctccaaattgtcaacacaagcgagctgatcgcaaatggcatcaacttgtccgtgcaaaaaaacggttggccgttaaagtccaccatcccgagcgtccaaatcgaagcctcagctcgcaccatgagcagtcgccaggcccaatttgcaaactttgttgaaaaaaaagacagtcacgatcatgtcgacgataaacagcaggctagctcgtttccaggcatctaccgtcgtgtcctagcagcgcatctacagtccccacatgcacacggtacaccggcgaccagggcggccggcgatacggatcgaacacatcggcgttgccatcgcggtcttaaacatgggcatggcccgtcgtcatggcaccgcctcatgattgattaatgattaatgaccctttgccataaaaaatattgattaatgaccctgattatttcccccgttccaacttgctctgatcggttggcgctatctatctgacgcctctggcgtgcgaagatttttctttttgctccccttccggctgagcgagcacgccggcgagcacatacacaactcctcctgatcgtggggagcaaagcagggtccaggtgcgaggtaaagcgaggccgtcgcattcgagctaagcgataaggcacggaggagtggccgccggccggcgggacaccacatgtcgatcttaatgattggatcaggccaaacgcgatggttttgcgtacgcggacacgcagcaaggaaatggatcttggttgacggggagactagaaattggacgccggataaaaacggctgtacagtggcgcgcatgggcatgattggcagtgtctagctcgtaaggatcgaggggagcagggaatgggtccgatttgcggggaatcttagtagcaacaggagcttccttaaattattccaaaattacttttaaaaaaattgtcccaaaccttatttagcaggaaaacagaaaaacttacctccaacagctcaccatccttcctataaaaatacgcagacgtaaaaaaacacctccgtcgcccgcgtatacgtgcgagtccggtccttcccccgtccaacgacaccagcaggtgagagggaggagatcgagcagttgcgcacctgggtagcccagccggcgatatggggtgggcgctagtgctgcacgacggcgctggggacgtcccgcgcacgctgccgccggagaccagggagccccgcctcgtcgcgctttgccgctgcctcgaccgcggcgctcgacgtcgtcaagctcgtcgtacgtccttcgttccctttgctcttccctggccctgggcgtgccgcctgctcatcatgctcgagccgatccgacccgagacccgaccgaccgagcgcctgatgatggtgtgacgtgcgtgtaggtgtgggagctggaggactgcccgcacttcaacgccggcaggggctccgtgctcactgccgacggcaccgtcgagatggaggcgtgcatcatggagggcgccaccctgcgctgcggcgccgtcgcgggcctctccaccgtcgccaacgccgtctcgctcgccaggctcgtcatggagaagacgccgcacatctacctcgcattcgacggcgccgaggccttcgccagggaacagggggtggagaccaaggatccaagccactttatcacggagcagaacatcgagcgactgagacaagccaaagaggccaacagggtccagattgattacacccagccaatgaaagggtcgcagcaggcaccccaagacaccccggccccagccgacgacaacagccagacgggcacggtggggtgcgtggccgtcgacgccgcgggcaacctcgcgacggcgacgtccacgggcgggctggtgaacaagatggccggccggatcggggacacccccgtggtgggcgccggcacgtacgccaacgccctgtgcgcggtctccgccacgggtaaaggcgaggagatcatgcggcacacggtggcgcgcgacgtcgcg

SEQ ID NO: 34946 - DNA, 448 bp, Setaria italica
  Peptide Sequence Number=SeqID_100920
aagaaccaaagaagaaaaaattaaatcgaggtatgggaaaggtcggcgcaatagtctgaatgtacaggtgcttgagattgaggaatttggtgggcagcattggtgtatccacctgcacaacaaatttatcatgttcagattaattatacaccatcacatagaggtattactactgtacagtatacctcattgcaacataaataaagtctctcaagatttggcataatggctggaagcttagcacgagcataatggacggcattcgcatggtccaagcccaagaccttcatcttttgcgatgcttctccaagagagagtgttgaaacttctccagtaagggtgaaactggagatacttggtgctttattctctataacttgcagattcttacatacaaaaactgtcacctgacaaagctgctgcagcacagaaggtatcttcaggataa

SEQ ID NO: 34947 - DNA, 429 bp, Setaria italica
  Peptide Sequence Number=SeqID_100921
tttttttgttgttgttgtgtgtgtggaaactatgtcatttgaaagaagcctctaaaatgaccatgcctgtcgcaaagctccaggtttatcgcaatcaacctcagatggcattatgtcattggatgcctcagatggcattacagaagtgcgattacgggatatgcagatggctgccttcgcaatccgttcacccaaataccgcaggaatgacaggtgaggtcatggcgcggacgtgctgatccatatgcatggatcatggtggcatatcccccaagtcagtccatagcggatatatttgcaaggagactgggctctctctttacaaaatagttcatcaggctacaatctgagttggctgctaacattctagtattcctacgtaggtcgggttaccgttacgttatttcgttccggttaacttttgttctt

SEQ ID NO: 34948 - DNA, 771 bp, Setaria italica
  Peptide Sequence Number=SeqID_100922
ttatcctgcttcatggatctttcaaatgacatagtttccacacacacaacaacaacaaaaaagaagcctctataatgaccatgcctgtcgcaaatctccaggtttatcgcaatcaacctcagatggcattatgtcattggatgcctcagatggcattacagaagtgcgattacgggatatgcagatggctgccttcgcaatccgttcacccaaataccgcaggaatgacaggtgaggtcatggcgcggacgtgctgatccatatgcatggatcatggtggcatatcccccaagtcagtccatagcggatatatttgcaaggagactgggctctctctttacaaaatagttcatcaggctacaatctgagttggctgctaacattcagatccacgaggcgggaccgacgatcgccggaacttgcttgcttctcttagtatacccttgcactgtcaatatcctcccaaaatgaagcatcccaacggggaaagcatttacgatggttgatagatcatgcagctagcttgattctgtcctcagacctccctcggcgtcactgctttgcaagctatgcaagtacggcatgaatagtaaactttcagtgttttttggcaccatgtcttgtgctacttctttcctaagtgaacctctatcgaaacgatcagaattcaccatgcatgtttcctgcctaccaggcttgatctcatgtcctggtaaagatgttccttgaactgaagttaggcgatatgttaacatcatgtcctccttcaag

SEQ ID NO: 34949 - DNA, 535 bp, Setaria italica
  Peptide Sequence Number=SeqID_100923
aaaatagtcatttgcataactgggtggtgatgtattgtaatctcacaatgtcatacataatgagattacaatacatcaccaccctactagaaatagccactgctgggttcttccggtcaagaaccgaagcttcggctcctgagacaaccatctacgacgattcctcgcaggaatcctcgtcactcgtcacatcagactggtcgtccgattcatcgctggaagcagcaacgggagcaggcttcgctgacatcttgctcaaagcggcagtcttgcttgctctctgggaacgtgtagctgtcatgctgggagtggttggaaccctgctcaccgatgctgcaggcaagttaacttcaccatccgtgtcactttcatcgctagaggatggtgcccgtcttgcccttctcctggagggagccggaggccggactgaccgtgctgctggtgttggaggcactgcttgattggtgtccaacttgaagctgccatctaatcctagtttcttgaatatggcctcagcttcatcttttggcaattc

SEQ ID NO: 34950 - DNA, 313 bp, Setaria italica
  Peptide Sequence Number=SeqID_100924
ttccaacctaatttttcctacatggcacacacaatagtttaatatgcattggaagtgcttgaacttgacatcagacaacctacaaacacagaaaacaaaaacttgaccatggtgggacacattcccttggctttgtcttaagggaggtgagtactgaacccttttagggaggtaatcacacaacctgcaagcacctgggttcaaacccatgcacagcatcataaaaatttctaagctgattgtggcgcttggtaaaaggcatcataatcacgaaacttcaagttctagaagcacacctgcagtgttttgaggt

SEQ ID NO: 34951 - DNA, 453 bp, Setaria italica
  Peptide Sequence Number=SeqID_100925
gccccgtcttcgtcttcgacgggccactccggcgctcaagcgccgcaccctcgccgcccgccgcaggcaccgtgatgccgcgcaggccaaggtccgcaagaccgccgagaagctcttgctctcccatctcaaatcgaggaagcttgaagaattggcagaacaaattaggagtgacagggctaagcatgatgccaagggcaaacaagttgggagtagcagagatggagaaaatgaaaataaaaatcaagatcaaaaccaaaatggtgataccaacaacagtgagggaactattgcatcaatcaaccaggagaaaatggatgaaatgctggctgcatcacttgctgcagaggaagagacaggcttcactggtgaagggaaacactttacaagtgttccattgcaagaaggagctgaaattgatgatgatgatgatgatgatgatgaaggatgatc

SEQ ID NO: 34952 - DNA, 558 bp, Setaria italica
  misc_feature (516)..(558): n is a, c, g, or t
  Peptide Sequence Number=SeqID_100926
ggacgccgcgtcttcctcctcctcctcccctcttccgcctcctcgtccgcaggccccaagtgcctgtggcagagccgccgcgccgaccgcgcgcacaagtcgctgccgggcctcgtcctcgccatctgatcgatcgacaacagagacagcaagatcggccgcccctccataattacatatactactaatattagtccataaataatctgcaacttctctagtcggtgacgtcgaagccagttaatcggtgaagacgaatgcgtatgggctgagctgaactgctccgagttgtgaggttccgttaccagttggcagttgcattgcttagcgtgtgtgtgctggattagtagtgttagtccgataagtcaagtcatggactatggtgtgtactgccattactactgctgctgttgtgatgatccgttacggtctgatggaaatgatggtaaattgtggatgaatgaaagctgcttgagctggagggttcgagttctcttcccctctgttcaaaaaaannnnnnnnnnnnnnnnnnnnnnnnnnnnnnnnnnnnnnnnnnn

SEQ ID NO: 34953 - DNA, 325 bp, Setaria italica
  Peptide Sequence Number=SeqID_100927
ggcacccgacgaggcccccggcctcgtacagcatggacgggcggtagaaccagctcgacgctgacacgacggcgtagtcgaactccgcgacgtgcgccgcccacacggcgtccggctcgtcgaggaagaggttccagaggcccgtgtgcgccggcccgtcctcgtcgatctgctcgtgccggaccaggtacggcgcccagaagttggccacggtgaagttgtactcgccgtagtagtacaccgtgtgcttgctgctcggccagctcggcgtaggctccgcggctctggtcaggaggcagatgagcgagtccttgtgattcctggc

SEQ ID NO: 34954 - DNA, 1156 bp, Setaria italica
  misc_feature (12)..(12): n is a, c, g, or t
  Peptide Sequence Number=SeqID_100928
gtttggaaaacnctaaatcagcaaatgagatttcggtattatcgattccttcagcatctatgtcttctcaatcacaaatttcttcctcttggccttcttgtcctttctaccagtatcatcaacatcatccttcctcttcgatttgctgtcattggcatgttcttccacttcaggcttcttctttgcttccttcctgccctttttcctttccttaccatccagcacttcagatttgccaagggcagaagtggtgacacctagggaaacagtcttgacttcaggctcttcagggacctttaactgttgtttcgactgcagctttttatccttctttttcctatcaacctcaactggatcattctctttttcatatctgttatcactcttggagctggcctctaggggctttgcattcaagattctcaaggttggcacaagtttcttaacctttttgacatggctgtctttctcagaaataggatttccctgcaaattaaggttcctcaagtagcgcaattcagaaagtacctcaagatctgaactcctctcgatcaagttattccctaaatcaaggttcagcatcttcacatttttagccaaatccgaagggattgtagtgatcttgttgtgggaaagcctgagttccttcaattccacacatgcagcaagagaggacccaatattttctatttggcagtgtgacaaggatagctttttcatagacttagccttggccaaagcattgccaatggcaaaaatgggattcttagagagaacgagtgtattcaactgttgcagccgatcaagcttgcagatggaagaaatattgttatcattgagaatcaatgcccccaggcttgttaaggatgcaacctcatccatctttgtaagtttgtcttgccagcattcagcacttgcagctttgagagtccttcaacgccttttaagctcacaagctgtttcaataaccgaaagccacttcaggttggcacaggaggataaaccctcgagggtgacgaggcagttgtagccgaggtcgaggcgctccagcttgttgaagctgctcaggcacgacacgtcggagagcgcgcggtgggagaggttgagggccgtagcgccggtcccgtccgatcccgcctcgcgcgccgcctgctcc

SEQ ID NO: 34955 - DNA, 412 bp, Setaria italica
  Peptide Sequence Number=SeqID_100929
acattcagcaccgaggaggaggcggcggaggcctacgacatcgccgccatcaagttccgcgggctcaacgccgtcaccaacttcgacatgagccgctacgacgtgaagagcatcctcgagagcagcacgctgcctgtcggcggcgcggccaggcgcctcaaggacgccgtggaccacgtggaggccggcgccaccatctggcgcgccgacatggacgccggcgtgatctcgcagctggccgacgccgggatgggcgcctacgcgtcgtacggccaccacggctggccgaccatcgcgtttcagcagccttcgccgctcaccgtgcactacccgtacggccagccgtcccgcgggtggtgcaagcccgagcaggacgccgccgtggccgccgccgcgcacagcctgcaggacc

SEQ ID NO: 34956 - DNA, 397 bp, Setaria italica
  Peptide Sequence Number=SeqID_100930
gtttgtgcctggttgcaatgaagtaggaactgttctcagtctctatttgcacagtgacagatttaagactctccactgcttcaattctaatatttgcaagtgtgaggtgcctgagattatgcagtggcaagatttctggaagaaactctagaggatttccaaacaagcgcaaaattcggagcttgggcattgacctgaaatccaacaatggccggacaagcttgttatgttctaatgataattcctccagcataacacattgtcgcagttctacagggacagaaactagcatgttgttgttaactgacatcactttcatattcttcaacgcaccaacttcgagggggcaaaactgacaacttattgttgttaagatatagcttctcgagaagtggaa

SEQ ID NO: 34957 - DNA, 275 bp, Setaria italica
  Peptide Sequence Number=SeqID_100931
gagcagccaatccatgaatgtactgaaaaatacagcccggcgagtaggaggccccacttctcgcgaaggagctgcagctccaccgatatctccacagtcaccttcctccataccaaatcgaatcgcggcgagaccttggacgcctcccgcgctatgtacatcgtcaactccgcagcagcacgcgcagcaacgacctccgctcccacgccggcccacgcagcagcagctcctactgggcgcagacgcgatcacgtccatgctccgatccgcacatc

SEQ ID NO: 34958 - DNA, 1637 bp, Setaria italica
  Peptide Sequence Number=SeqID_100932
ccaattccttttttttttcccctgtgccatcctgagaaatgtcactgcaatcaagggtgatgcaaaactgtgccgagaacgccacgagattctgatccttgcacagcgcaacggggctgttcagggagatgcatcatgcatgtggaatgctgcggctggaatcttggacggcttcagagttacaggcggcccccgggcaagtttttatcggcccccggaggattctcctccgggcgccaaggacaaagctcccggtgaaaagcagatgccgccggccccttatgtgccgttggcagtggcctcggagagcgcgtgattgatgtcttcgtcgtgcctcccgttcatctgcgcccgctgtcgccgatcagtagggtccccatggttcccgttcagtaacttgtggaactcatccttcagtttactgtctttctcttccttcaacctgatctctttttctttggtgctcaacggaagcaaaggtactccatttgtccgatctggcatttctggaagcttgttgtcgacaaagaataccactaaatttacagtataccatgcaacaacaacatccaccgaataatgcttgcgggaagcaattataagaagactctgaattatagccatgaaccaagcaaggaacttaatgaatcttttcgagccatatttatggtatgttcggacaaaaacaagagtgaaaatcatgtgagatgaaaatatcaaatcaccacaaccaaaaagcactccgcgaggaaagttaatcagaagaacttcaagtacactattgggtggtggaagagttgccaatttagagccctcacggcagtgataatttggacctgggagctgggtcgaatagaatgtaataatccttagaaactgtgaagcaactaaaaaagcaagcaccctgcgccagattagcacagtatagaaacgtttgctgtgataaataaaaggatgaaatgtccacaacacaaaggagatgaagatggaagaaaatatgctctcactaaggtaacctttgtcttgcccaagctctggaagggccataaatcccaagtcctggagcagtggtccaggtcgatgcaaataatgcactcctcgagcagccaatccatgaatgtactgaaaaatcagcccggcgagtaggaggccccacttctcgcgaaggagctgcagctccaccgatatctccacagtcaccttcctccataccttggacgcctcccgcgctatgtacatcgtcaactccgcagcagcacgcgcagcaacgacctccgctcccacgccggcccacgcagcagcagctcctactgggcgcagacgcgatcacgtccatgctccgatccgcacatcacgcctcgcgccgccgcgtccgccggagcgggatcggtgcctgcccggagcgtacaacggctcgaatcggagagatacggtacggatacggcgcgccaattccggccccggctcctcgagaggcggggcacgggaagcggctgcggtagtcggtccctccaggggctgtcctcgcggggcgccagaagcggcgaccggaagtgcctcgggagcggggcggcggtggcggccggcggctggcggtttgggagtcaagttgaagagagagagctgtggagagatcg

SEQ ID NO: 34959 - DNA, 504 bp, Setaria italica
  Peptide Sequence Number=SeqID_100933
gcaagatgagacattttttcatcttgtagatctagtctgataaagttcttccattggtacacgaacttttcttgtggtgcgagcaatcaaactttttaagtttgtctaaccatttatctgcaaatatcaataatgaacatatgaaaatgctatgttagatttatcaggaacagtattttcatgattttattactataataggtttcataagtattataatagaaattagtggtaaaaaaaaactggcatcggagactgttgatttcacaatgatgctcttttgtgactggagggcatacatatcttgtagacatagcttgaaaattggagattgtgcggaagccactaaaaaggcttaatgtggtagtagttggggtctttgggatggaatatttgttagtgacacatgacctgtttccgttacatgatcctggtcagttctgtcagttctctcattctctgagagtgtttgttagaaattttgaataagttatcttgaacaag

SEQ ID NO: 34960 - DNA, 196 bp, Setaria italica
  Peptide Sequence Number=SeqID_100934
cagtggcagttctatcacttcagcaaagaggagatcccctttgtcaatcaacaaaatagccctaaacaatgctgcaaatatgcatcgcttgaagtctggtgattggcgtgttgaggtgtcagttccaaagcagaatatgatgccattggttgatattgatgagaaggggtccagtaaagtctgcatcctaaaagat

SEQ ID NO: 34961 - DNA, 262 bp, Setaria italica
  Peptide Sequence Number=SeqID_100935
ttttaagcaatctgatattacaagtgtttcctatcaagttccttagtagatggaagttcccacagcaaatagaagacaaggacattgcagaaatggagtgaatggggcatcaaaggtattgctactcctatttttcagtacagcacgagtttactgaatattgaatgtcccttcagtattaatcctgaaatgataagtaaacaatcagttctagatggaagaggttaaccaatccaggaagagaaatgaaagagaaacatcc

SEQ ID NO: 34962 - DNA, 357 bp, Setaria italica
  Peptide Sequence Number=SeqID_100936
gatgaaccttgatcattatagtcatacttcttgtctaaagtatctatactacctgagtgaaggagatgagtctgactgattattcccaatggatattcacctttcaaaattttcccttgagcaaagtttccacttccacgctgacatttttcttctgatgagctatctgcattgccctcaccagagttatcaacaccattctcattttcggacctaacaaatggatcaatatggttgtcagaatgtatagacgttttatttctgactagaatgcaattctctgtcgagaatttttccccatcgccattctagagccacgaatgccatcatcaccattatcattaacaacttccaaga

SEQ ID NO: 34963 - DNA, 691 bp, Setaria italica
  Peptide Sequence Number=SeqID_100937
ctgaatctgtcagaattttcgatacttgacaatacaatacttcagtttcctcagaatctccagctggcacacagagggaagttccatccctcacatctgaggaatatgcatctgcattaatcctgttcttcatatcctggatgttatccacatgacctaacgaaatgcagccatcctctttaggtgctacgacttggctgcatttattcaaactttcaaatttttgtggaccattaagatgaccaccttggtttggcaattcttcaacagattttgcttcatttgtatgctgcgagttcaaggtcttatcaggaccactgaaacgagtagcttctgccagtaaggattcttctaggggatcttttcctttaaagtgttcaagtcagaggaagcaaatggactaatctgcccatagatattttgtaatttactgtctccaattctttcctcctgtaccacactgctcccagtaaaagcatttccgtcaccagtatttccctcggcaacctccactaacaacttggaagcttcagttgatgaaccttgatcattatagtcatacttcttgtctaaagtatctatactacctgagtgaaggagatgagtctgactgattattcccaatggatattcacctttctaaaatttttccctttgtagtctaaaagttttacctaactttacctaacta

SEQ ID NO: 34964 - DNA, 748 bp, Setaria italica
  Peptide Sequence Number=SeqID_100938
cgcgcgtcgtggcgtccgcccttgagaatggcccggcctgggcgttggccgccgtcgtcgttgtcccagaatcctcccggcgcgctgaggccggcgacgtatgtgacgctcaccgcgaacgtggccaacagcatcagcaccttgcggagacgcagcagcgcgctcttgtccgccctctccgcctccgattcgccggcatgctccggcgactcatcctcccccttgcccggcgcgaggtgcaggaggaggtaggcgacgacgccggcgagcaggagcagggagtagacggcggtgaacacgtcgcggaacgtgccggcggcgtaggcgaccatgaggcttagcaggtctaggaccatgacgagccggagtatggcgagcaccggcgccaggctgatcccgccccggtcgtgcaggatggacaggatgaggatgaggacgatgaccacgagggaggatgcaaaggcggtggcgttgccgtagaagaagaccaggtagcgtgggtggttagtctgctggatgatggggtcgccggcgatgcggcccttggcggggtcgtcgtcttgccagacgccgccgggcgggttgaatgccgcgccgtacgtcacggtggccaccagcgaggccagcagcaggaggtacttgcgcaggctgtactcccacgagtcaccggcgccgccgggcgtcgccattgccggccggcccagctctctcagctcggtgcggcggcaccctgcagctcttaattgtg

SEQ ID NO: 34965 - DNA, 270 bp, Setaria italica
  Peptide Sequence Number=SeqID_100939
gttgggtgtggttggtggtacatgtgcaccctatctatctatgtagtaggaacttattccctaaaatgcccctgctacctacccttgtctatctctatatatgtaccccgaaactactttgctacgtgtggttaatcagaaacagatcatttgggccaacaattggtatctagagcctaattctttccctaacaaccctctcctctctctctctctctctcttgtgctcagccacgcccctccaaccccgaaacctgccgccacggccca

SEQ ID NO: 34966 - DNA, 302 bp, Setaria italica
  Peptide Sequence Number=SeqID_100940
gcgtggaggcggcggcgggcgccgactgctccggcatggcggtggaggagatcgtgcagcacccgctgccgggctacggggcgcccgtggcgctcagcttctgccccgacgaccgccgggtggcctacctctacagccccgacggcacgctccaccgcaaggtgtacatcttcgacacggcgcatcagcgccaggagctgctctttggccccccgaggcggcgggctcgaggaggggaacctctccgccgaggagcggctgcggcgcgagcgcgcgcgggagcgcggcctcggggtcacgcg

SEQ ID NO: 34967 - DNA, 710 bp, Setaria italica
  Peptide Sequence Number=SeqID_100941
accgaccgaccgcgcccgcgcgccgccgcaggtcgccgagctgctgcgcgccatcgagctgctccaggagcgggaggcgcgcctccgcgtcgagttgctggagcagaagatactcaaggagaccgtcgccatcgtgccgttcctggaggccgagctcgcggccaagaagaccgagctcgagaggtgcagggagaccgcggaccggctggaggccgagaacgcgcggctgtgcgccgagctcgacgccgccgcgctcgaggtcacgagcaggaagcagagaatagtcgagatggagaaggagatggcggagctgaggaggcaacatgaagcggcggcggcggccgatgactgctcctcgtccgcttcggcgtccaacgagcacctcgagagctccagtgccgcgccacatcacgcgagttcagctcaacctggagctgagcggccgtacatcccgccgcctcctccggcgccaccaacgcctttcaagtccaagtcctacttctcggcgtcgtcgaccccttcacccgcaagttcgtcgccaccctcgccgtcttcctccacgtcaacctcaccatcgtactcccgctcgtcctcggacacggcgaccgcaccaagaccccgcgtgccagacctctcgaagctgccgccgatacctccgcctccaccgccttgccctcctcctccaccgccaccgccgcgcagcacgagca

SEQ ID NO: 34968 - DNA, 444 bp, Setaria italica
  Peptide Sequence Number=SeqID_100942
tagtggatatggaccatatggtggtggttatgctcaggcaggtgggcaaggcggtggtggcggtggtggacaatatggtggttctggacaaggttccggttctggttccggttatggtcaagctggtggttatggaccgtatggtggtggatatgctcaggctggtggccaaggtggcggcggtggtggtgggcaaagtggtccaggtggcagcggatatggcaacggctcaggaagtggtcctgggtctgctggtagtggtggtggatacccataaaatttgaacattacagaagttcaattctgatgccaacatacctacttgcaataatgtggttcatgtgttttggtgttgtctacttatatagggaataattggccatttcttggcttctgtaataaagaatagcacgtgttgttgtagtactactataccaatttatg

SEQ ID NO: 34969 - DNA, 317 bp, Setaria italica
  Peptide Sequence Number=SeqID_100943
gctgtgccagtaaagccatctgtcaacccatttgtgaatgttaagaagaatgtggctactggaaagtttgacgtgactggatattgcatagatatctttgaagctgtcatggcgagagatgccatatgctgtcccctatgagtatgtacctgttgtggaccctaacatagccaccaaacataaccctgtcatacagtgagatatgttatcaggtttccctgaagaaatataatgcgatggttggggacaccacaataatcataaatcgctccaagttagttgacttttactttaccttacactgaatcgggggtgca

SEQ ID NO: 34970 - DNA, 305 bp, Setaria italica
  misc_feature (279)..(279): n is a, c, g, or t
  Peptide Sequence Number=SeqID_100944
ttttttttttttttttattcgctgtaaagatatgtaccacaatttgtatgattctgtttgcagcaccaggaacaaatgaaaaatacaatatctgtttgtcgttgtaaagcgacatgtacccttttttgggcagtcagaaaaaagaaaaagaaaaggaaaaaaaaaacaaggatagccattagccgccaccacaaacttgtccatcagtgtttcaaagaaaacaaacttgtccatcaaaccccaacaagcctgatctcttcactgccgttcagttttccnctgtgagactgacctttctttaccgg

SEQ ID NO: 34971 - DNA, 633 bp, Setaria italica
  Peptide Sequence Number=SeqID_100945
tgataataattaataggtaaattgatcaatacttgatcagttgattgtagaactttcagtagtcacatgctccctgcagtgaaaactgaaatatggaagatatataattttgcaaattaatttcaatatctactgttagtttggaagtgtttggtggccagtgtgtgagaaccaaaatataaatatatcaaatacaataaacctaaacaatcgaattcccgatggccctgtgtgacaatcctctgataaaatgtgtgccctgtattgtccttatagtaaacagggtgaaaactgggtctgaatgtgtgcacatgtctacatttcagttgggtagaggttgatcttattttagattttcactgaaggtgtggaatggcctcattagtttactactgaacagtatagttcattctttgcaggatagtgggttgctgatttgggataatctgattctctccgagtgaatcaagatgtctggaaatgatgataagtcccaggctgcggcagaccgaataaaagcagccgcattatcagcggctaagggattgagcagggctcaagctgagcgtgctgcggctgctgcagcccgcaatgtcaatgcctatgggcagaaggaagaggggccaagccgca

SEQ ID NO: 34972 - DNA, 1321 bp, Setaria italica
  misc_feature (1313)..(1313): n is a, c, g, or t
  Peptide Sequence Number=SeqID_100946
taaattactaaaacggggcaaacaggacggacggcggcttcgtcgtccccgaccgccaaaccctagccccttctccccggcggcctccggcctccacttcgccgcgctccggaaggatagtggggttgctgatttgggataatctgattctctccgagtgaatcaagatgtctggaaatgatgataagtcccaggctgcggcagaccgaataaaagcagccgcattatcagcggctaagggattgagcagggctcaagctgagcgtgctgcggctgctgcagcccgcaatgtcaatgcctatgggcagaaggaagaggggccaagccgctggcaggagaggaaggaagctaagagacagatgtatctgatgagtacagagaaggctgcgatactgggtactgtgaagccaaaagcttcagaagcttcttctggtggagcatatacccaatgtcagaagtgtttccagcatggtcactggacctatgagtgcaaaaatgagcgggtttacatgtcgcgtccttccaggacgcagcagcttaagaatcccaagttgaagaaaagtgtaccggtttcttatcaatttgagaatcctgatcttataaaggagagggaagcggagaagaagttgatgaaagaaaagaggaagaaggaaagatctgaaagaagaaagggaaagagcaagaggaagcatcgttcaccgagcgattctgatagcaatagcagtgatgcttcagtgtttgactctgaatcagaatcatcagggactggctctgattattcttctggaagcagttcaagttacagctcctcggactccgaggacaagaagcagcaacacaggaggaagcaaaagaagagaaggcaccggagggacagcacatcatcggcttcatctgaatctgaatctgcatcagacagcgattctgatgacaagggcagccggaggaagagcaaaaggcggagcagtaggcgctgagtttgaagaactggagaaggcattgtggatgtcaagtatcatgatatacttatcgatcgattcacgagtatctttttttcatcgtcagacctgcatgtgccgggcgttctccaagaagcaaatgtagcattcctttcctgaatgctagtaccgatagttttccctgtaccaagaagtgcctaaagctctaagtgttcttattctatggtagttgtgagaaccattgaatgctgtaacaatattcgcatatgaatttctgagttttgcgtgattaccttccatacagttcttaaaaaatgattttaaccttgggctacaaaaaaaaaaaaaaaaaanaaaaaaaa

SEQ ID NO: 34973 - DNA, 912 bp, Setaria italica
  Peptide Sequence Number=SeqID_100947
cttacgtaggttctcatcacaaccaaatgaactcgacttttatgccctgtctttaccctgccggcatttctctgtcctccggctccggctctcgccgtctttctccgactgatggatggatggtttttggcagcgcactctcgcatcctccgcgcctattttcctccgctgtctcgccccgggcaactcatcgacctgccgaccttgccgccggcatgttcttgctggcggctgtgattgaccaccttggccgagctgaccctgaaccctgccccagccctgccggctgtctcaggcatggcctcatcgggcggcagctccacgtactttgccgcgctcatctccatctgcgcgatgcgcacggcgccgaagagcctctcgggcagctcctcctcggactgggactcgacgaggaagcccatgtcgatggtgaccgaggtgacggcgccgagcgcgaggtgcaggatggcgctggcgatcgcggagctgccgatgtcaacgtcgatctcgaggtagtcgtcgcccttgtggtagcggcaggtgagcgcgcggccgaggaggcacgcggcgtagttgccgacggtggcgcggacgagccatgggcccttgacgatacggttggcgatcttgaagcgcgcgttgcggtaggcgtcgtcgccgtggacgaagcgaccgagcagcgagtccggcgggatgggcgcctccgccgcgaagtagaacaccgcgctgtacgcgtccggccggcccggcacctggagattgacggcgaggaggaagtgcgcggtggggtccttcctgaggcgcgcgcggcggaaagcggcggcgacgcggttgtcgtcgcgggcgagcacgtggtcgagccgcgcgtgggagcggagccagtcgacgccggcggggcggagcagccactac

SEQ ID NO: 34974 - DNA, 414 bp, Setaria italica
  Peptide Sequence Number=SeqID_100948
gagaaactaatgaaactattcattcagcctacttattcccttgcgagttcctggctagaccaatttactaccagatgcagagaacaatcccatagcacacccaccaagtgttttgagttctcattgtaatgttaagtctaaaacaagacaatcattcatagcaataaaactcatgaatctaccagacagatgcatccaattatttaaccaaggctatagtcctatagggaaatgaagaactctgtcaaataaatgctaggttaatgtcatgcggggcttctgacatgcaactacacattaatcccggtggcacgttaccaactcaagtaattaatccccgacgcatttcaatcaaaccgtatcggaagggaacgaatcaaagaacatcgaatcaagcaagtaaccagatcgaaa

SEQ ID NO: 34975 - DNA, 584 bp, Setaria italica
  Peptide Sequence Number=SeqID_100949
tttttttttttttttttttagttttcttgaagcgctcggatcatgttcttgaacaagaaaccagtggcatgtgaagagaaaaaatatatatttacatatagttgatgccacaggctcgcaagctgcagcattgcattgcaaggatgtcattctactactccttaggcctcttgacgatgaggaccgggcacttgcagttctgcgcgcagtggttgctgacgctgcccaggaacgccctctggatgaagccgtatccatggctgcccatgacgagcaggtcggcgcccaccttgtcggtggcgtcgcagatgacgtcccgcgggtcccccgctctccaccagcgtctcgaccgccaggtgcgggtgctcggcgcagatgcgctttgccttgtcgacggccgccgccgagacggcggtggcgtgcctctcaacgctcgccagcacgtccgaggtcatgatgtaccctgcgctgtccatggcggcgtagacggggcgcgagcggcgcgcgtgcacgaggacgagcgtgtcgccgcccgccggggagacgacgtttggcgaggcaccaggtgagcgcgtgcacgctct

SEQ ID NO: 34976 - DNA, 309 bp, Setaria italica
  Peptide Sequence Number=SeqID_100950
atcacaaatatttttatgtagagatacactcagcagtctgcacaagtaaatgtaaagttacctggaatcatcttagaagatttggccaacacctgttaatatcaagattaaattagtaacgatgtatcttgatcttcaagaatttgttgacatgatcacatgaaatggaactacttggtgattgttcgtcataagtattgctctagctattcaattcaattagaagatttaatatctcaaagaggggagacatgaaagaatattgactcaatagggtgagataggcttgtcccagttgttataataagt

SEQ ID NO: 34977 - DNA, 467 bp, Setaria italica
  Peptide Sequence Number=SeqID_100951
ttttggccctcgtcaccgtcggccgcgccatgtcaacaagcgcacaccggatgagtgggccgatgcactcgacgccctcaaggcgtcccagctctcgggcacgcccggctcagaaaagggcacgcacgccctggtgaagttctgctacgacaacctggagagcgacacggcgagggaatgcttcctgacctgcgcgctctggcccgaggatcataacatctccaaggacgagctcgtgcagagctggatcgggctcggcctgctccccgaccgcggcgacgtcgacgaggcgcaccggctcgggcactcggtgatcgccgtcctggagggcgcgcgcctcctggagccggggggacaaccaccggtacaacatgttcccgtccgacacgcacgtcaggctccacgacgtcgtgcgcgacgcggcactccggttcgcgcccggcagatggctggtccgcgcgggcgcc

SEQ ID NO: 34978 - DNA, 440 bp, Setaria italica
  Peptide Sequence Number=SeqID_100952
acaaaaaaaaaaaacaaaaaacaagaggatagatcctgactcctgcgcattcctggtgagcagccgccagccgcaatggcaaatcaagcaggcccggcaccgccggcgttcgtgtaccggatcagcacggccgacgagtgggcggagcttcagcgcgcgggggccaccctcggcggcgacctcgaccgctccaccggctgcatccatcttagcgacctaaaccaggtgaagatgactttaaagaacttttttcttggaaggaatgatctatacctactacaaattgacacttccaagcttgcagatgggttaatttatgaggcaagtgatgataataactactttcctcattctatggtcctggtcggagctttgtgccccttaaactagatgctgtcatcaaggcggacaaaatagagcttgaaaataatgattttacg

SEQ ID NO: 34979 - DNA, 598 bp, Setaria italica
  misc_feature (42)..(42): n is a, c, g, or t
  Peptide Sequence Number=SeqID_100953
atttcaatcatatcttatatctataaaaattggagaacttancttttgatccaacatacatgtggtttccatatgaatgccattcatttttcattttgtcgctcctgtataccttttctcgagaactgaagattgtttaatccttggacctggtgaaggtgaagatgactttaaagaactttttccttggaaggaatgatctatacctactacaaattgacacttccaagcttgcagatgggttaatttatgaggcaagtgatgataataactactttcctcatttctatggtcctggtcggagctttgtgccccttaaactgatgctgtcatcaaggcggacaaaatagagcttgaaaataatgattttacgtgcagcctacttgatagaattaatctcccaagctgattctacagtctcagccttgtcttagcaattttcatgtgaattctctgccaaagcttagcaatttttaagcagcttacatccagaaggcatatataagatatggcaaattgtatcatacagaattggttaagatgccaagcatctaattattatcacatccaaaattcataattgcctttgccaagctct

SEQ ID NO: 34980 - DNA, 350 bp, Setaria italica
  Peptide Sequence Number=SeqID_100954
aaagcgtacagcttgaccgtactggcccttgagtacagaactcacaccacacaccccacaagaactagattacatgtgcctcacagaaacactacaaaaacaacctaaaaaaatggccccagcctaaacagcaacgggcagtgaccagaattacaatttcttattatggttcattgctgagactgttgagcagaaactgcttctaatagctgcattgtgcctgctttatcattttttggtcacatgtggaggggctgttgctaactaatatgcctggatgaccctgtgacctgagagggttgagtatcataagttttagttcgatgtatgttccttctggttgtttgcta

SEQ ID NO: 34981 - DNA, 340 bp, Setaria italica
  Peptide Sequence Number=SeqID_100955
cttcagtttcttgcgcgcataggatgtcacaagacgaagataacatctacaaacacggccggagaaaaccagtaatgcagatcatgcatacttattacctctccgactcgatcacaagaagagacgagggaacgtatggattcactgatgttcgtgtgacttttggcgccgccgtttggaagcgtgcatggccccgcatccttggcctcctgccatggatgatctctagttgtggtgctgagggtccgggccgcccggcacctcccgcttgcgggcggcgtcgccttgctgcacattccaccctccccccgacgaatgcccgccccgcctgccaccgccg

SEQ ID NO: 34982 - DNA, 575 bp, Setaria italica
  Peptide Sequence Number=SeqID_100956
tgcatcgacagtgagataaagcaaaaggagttcattttctaggggtcgggcatctaaatcattcagagcagacagataggagaaatgtagtagaattggactcatgaaatgtgtaaagtgctctgaagatgtgagaatgtgacagagtaccatgtaacctagaaatacaaaggtagccatttaaagggacatataagctgatttcttagttgaacttcaactatcaaggttcaccaatatacatacgccttgggaacactagatatcttttatattgctatatacataatatcagcaaatataccaattatgtacgtattaggtaattcagggaggcagctaatgtgatgttcagtagattaacctttgcttgtattagtggactataatcgtgaggagcgtctttgaacttcacctcagcaacatatttaccaatatggactcttcttgatagcacctgcagacatgcaaaatccaacgcaactgtttctgcatagctaccgtcgtcgccgtcaacagtgaataaggggagcaattcatcgaaatacattttccatattgcatcattcacagtg

SEQ ID NO: 34983 - DNA, 500 bp, Setaria italica
  Peptide Sequence Number=SeqID_100957
tgtgattttcatgtgacagttgtgtcatcagtcgaggcggcggaggagatactcgacttcgacgtccttagtcaatggcatcacccactgatcatacagcttggagagcactttaggatcgaccttgcattcgctgtcaccggcagtgacttcttgcttgccggcgttgtcctccaaggtgacgttctgtccgaaggtcctggccttcttctctactctcttcttcaccttctcttcgacagccttgaatgtaagcagatccatcaaagaattgctgtcctttgcttgtattagtggactataatcgtgaggagcgtctttgaacttcacctcagcaacatatttaccaatatggactcttcttgatagcacctgcagacatgcaaaatccaacgcaactgtttctgcatagctaccgtcgtcgccgtcaacagtgaataaggggagcaattcatcgaaatacattttccatattgcatcattcacagtgaccaacgaag

SEQ ID NO: 34984 - DNA, 871 bp, Setaria italica
  Peptide Sequence Number=SeqID_100958
ctaattctctggtaatcgagtttgaatatttgcagctgaaaatcacagttgttgctaaaggcgtgtgcaaaacactctgatgacacaactgaaaatcacacatgatatttgcagctgctgctatgttttgtgatcagtcgaggcggcggaggagatactcgacttcgacgtccttagtcaatggcatcacccactgatcatacagcttggagagcactttaggatcgaccttgcattcgctgtcaccggcagtgacttcttgcttgccggcgttgtcctccaaggtgacgttctgtccgaaggtcctggccttcttctctactctcttcttcaccttctcttcgacagccttgaatgtaagcagatccatcaaagaattgctgtcctttcacctcagcaacatatttaccaatatggactcttcttgatagcacctgcagacatgcaaaatccaacgcaactgtttctgcatagctaccgtcgtcgccgtcaacagtgaataaggggagcaattcatcgaaatacattttccatattgcatcattcacagtgaccaacgaagctagagggtgcaaaacctttggggaactcttggtaggaaagagtggcgagggaagatcttgagggaagaatggaacatcttctggcttttgataatgtccagccttggcgttgagggcctccgcttcccggacgaagaactcaacgagagagcgccctccgccgccgccaccgccggcgggcgcgtaggccggcgcgttgtgcgggtgcctggcgcgctcgaggagcgcgaacaccaccgagtcctccagccggaccagcgcgtcccgcaccgcggccaggctcagctgctccggcccccagcgcgtcc

SEQ ID NO: 34985 - DNA, 288 bp, Setaria italica
  Peptide Sequence Number=SeqID_100959
gaaacttttcttccgttgagttgagcatccgctactgcttcaaggttgctgtctatgcggagtttagaagggattggccagaagcattaaagttctatgaggaaggtgttcgcgttttgcgtgagatgattggaacttcgacaaggttgcctccaacccaacgcctagttgagatcaaagcagttgctgagcaatttcactttaagatatcaactttgctacttcatgctgggaaagtggtagaagcaatcatgtggttccgtaagcatatcagaagctatgaacggg

SEQ ID NO: 34986 - DNA, 329 bp, Setaria italica
  Peptide Sequence Number=SeqID_100960
ggcttcgctttgcaattgtgaatattgcagtaaagtttggtctttcatgggttaaaacttgatttataagattcggttccctttgttctttggacatgaatgctttcttgctctgcttttttatcatccatcttaggtttcatgactatcaaaaagctgttactaagtaacagaataagtattttaacctgctagtaaagacaatacaaatgaatttatcatctatattaggtttcatgactatcaaagctgctactaagtcaacagaataaataagtattctacgctttgaatagatgatcaaagaaagagatcaagaaaaagcagag

SEQ ID NO: 34987 - DNA, 315 bp, Setaria italica
  Peptide Sequence Number=SeqID_100961
ggtgtggcatctggcaaataaccggagagcaggaatgcactataaggaaaatgggtcaaaacataacatctagaattctaggttcgaaaaacctgaaacctgtttgagcacactaccaagtctacaacagtagattgccagagcaagaagtgatcactagtaccacgcagcaagttagagccaaagcagcgacgaatacattaaccgccacgcggcattaaccggttatagcgaagataggttgattccctgcggtggtgagtgaaccaaagcaatgagtacggcagatccctgttcgccagcggtgcagaagcg

SEQ ID NO: 34988 - DNA, 668 bp, Setaria italica
  Peptide Sequence Number=SeqID_100962
tatgagagccctggatcgatgatggtgcccgtgacagtgggcatgtctattgggtcgtacacgactggggaatggactacgagcatatcctggtgctggacttgcaaaccaagaagttctccaccatcaatctgccatgcagcggcatgtgtgataagtacaacaggaacatcaaggtcatgaggagcgagggtgacagggacctccgtgtcgtggcaatggcgtggtcccgctgtgcactccatttctggcgtcatgacaggagcaggagtgccaaaggccgatggttgaaagaggatgtcgtgaagttttcgggtgtggatgggttgcttgatctcagaatggcaggtggatctggtaacagttatttgattaggattgtagatgctggagagggatttgttttcatcaagcactatgaggctccctgggtgtttgtcctcaatctcaaggaaatgacaatgcaaaagctgccaaatagggaacggttctgtgggcatgcacttccctacaggatggctttgtctccccacttaccaaatttcagagaagggaaccactgagcaaacaagaaaggaaccactgatcttagttgagtattggtactattttgttcgtttagcctaattactaagggggtactaaggttaatttagtttaagttaaaa

SEQ ID NO: 34989 - DNA, 281 bp, Setaria italica
  Peptide Sequence Number=SeqID_100963
ggggggctgggtactacagaacacaactgtgcatgtacgcagaatttccattcctggacaactgtcagaaaaaatcgtcttgtcccccgtgtaatgtctcctcctcaatcttatactttacatttaaattcattattgtcctttttgaacagataggagacacaaattttttaaatcatagaacaattcttgtagaatctgcactcaactggaacttgctaacctgccattgtgtgaacccccactttctccccttccaggaaaaaggttctttgaaccat

SEQ ID NO: 34990 - DNA, 395 bp, Setaria italica
  Peptide Sequence Number=SeqID_100964
attcaaaatctgctgcagatctaatgaaccagggaaaaggttttaagccaacagggctgcgaaggccaacacccaagataggatattttgatgctgaaaaatccattgaccaaaacataggtgtacaggtgcagctgcaacctatgaagattcagtgtctgctacctgccacaccgaaatctcagccacctattcagaacatgaacgctgcatcatgtacattcgatcaacaggagttgaaactgaatgcagcacctcgtaaggaaaatgattcttccaaaagcgaggcaatgaagacgttgcctcttaacgttgcacaaatggaagtggagccttttaaggtggctgaacctgaagcctgtacacttcaaactgatccagttgtgctgaacctg

SEQ ID NO: 34991 - DNA, 639 bp, Setaria italica
  Peptide Sequence Number=SeqID_100965
tcaaataattttactacctggaccaattgttcttcactgaggtttgtcaggctaactattattggcaaccttccaatgaattctgggatcaagccgtaggcaattagatcatcattttcaacagcatcaatatagcaagattcctgaagtgttgtccagccgcggttccgcagctcatgacatatcggtatgccaaatccaacaggacagtgttgatttctttcagagattatcttttccaagccgaagaaggcacctccacagataaaaaggatatttcttgtatctacctcaacataaccatggggtacattatcttggtttctttttcttggcacattgatgactgttccttcgaatatttttaataatgcttgctgcacaccctctccagagacatcccttctgtcctcacggcattcagccttctttgtgagcttatcaacttcgtcaatgtacacaataccacgctcagcagcttcaacattgaagtcagcagccactagaagtttgtaaatcacagattccacatcttccccagaatatccagcctgtgtaattgctgttgcgtcagcaatcacgaatggcacgttcacatagcgagctaatgttttgctaatagtgttttacctgaccctg

SEQ ID NO: 34992 - DNA, 517 bp, Setaria italica
  Peptide Sequence Number=SeqID_100966
acagcatcaatacaatccattcatatatcgatgaaaaacaaggaaatgtctggtaaatccagagcttagtcgccgataatgcgactagtaggcagaccggaaatccgacggcggctggggttgctctgaattagcccgggaagcttgatattgttctggtaaacatacatttccaaggctccatcatcctggaaaattttggctccacatccccgatggtgcaatggccctacggactcttcatcgacaagaacagcaattatcttctcttttccctcccttgcctcaggaatctcaaacattgcttctgtcaaaatgtcctccattatagatcgtagcccacgagcccccgtttcttttgcagatgctttctttgctattagatgcaaagcattttcagtgaaatgcagcttgacattgttcattttgaacaacttcttgtattgctttcctattgcctattttggctccctgagcacctggaccaattgttcttcactgaggtttgtcaggctaa

SEQ ID NO: 34993 - DNA, 563 bp, Setaria italica
  Peptide Sequence Number=SeqID_100967
cttcttgtattgctttcctattgcattttttggctccctgagcacctgaaaagagaattggatataacctttaggttgtggtcatcttgagaagaaaaataaaatagtagaatcaactagtagacaagaacaaggtgtgaagaaagtgatcattctataggcaaaaaactatagataagtaattttaagaaagatttgcttcaaattacaaacttagtcaaataattttactacctggaccaattgttcttcactgaggtttgtcaggctaactattattggcaaccttccaatgaattctgggatcaagccgtaggcaattagatcatcattttcaacctaagtagcattagaaaatatatgttgttaatacatgatcaaataaaaaggaatgtttagagcaaatgtcaaggacttaagcctactgaacctacagcatcaatatagcaagattcctgaagtgttgtccagccgcggttccgcagctcatgacatatcggtatgccaaatccaacaggacagtgttgatttcttgcgtagtacaaaagtatgttgagaaacat

SEQ ID NO: 34994 - DNA, 265 bp, Setaria italica
  Peptide Sequence Number=SeqID_100968
ccccaagctcccacaagaagacccctagctgtccctcactctctctcctacaggctacagctactctactcgaagggcatgaagagcaggaagggctacgggcagcagcagggccacctgctgagcccggtgggcagcccgccgtcggacaacgagtccggcgcggcggcggcggctgctgctgcctggtgcgggagcagcgcggggtactgcggcggcgactcgccggccaaggagcaggaccggttccttccgatcgcgaacg

SEQ ID NO: 34995 - DNA, 662 bp, Setaria italica
  Peptide Sequence Number=SeqID_100969
cagcattgagagcgtgaagcagtttcagcaagaggtttgtatccttggcagggtgaggcaccctcatatactgacattggttggggcatgcccagaagcgctgtgtctggtctatgaatatctgccaaatgagagccttcacgaccgcctcttcagcagatgcaacagccattggttgacatggaaaatccgtgcacgtgttgttgctgagatatcgggtgctctgctgttcttgcattcatgtaaacctcagatgatcatccatggcaacttgaagcttgagaacatccttctagatagcgaattccactgcaagatagccgattttggtatttctcgggtattcacggataacacgacggattacccatcatttgtggagggttccgagctgaaagggtcctttcccgacacagatccagagtacaagagaagcaaagtaatgacgcagaagtctgatatatacaactttggaatggtgatactccagctactgaccggaaaacaggagcttgaagggcttgctggtgaagtaaggcgtgctatctcttgtggcaagctatcatccattctcgatccaacggccgggcggtggcctacggaggtggctggaaggctagcattattttgggctgagttgtagtgaaaccagcagccgagat

SEQ ID NO: 34996 - DNA, 329 bp, Setaria italica
  Peptide Sequence Number=SeqID_100970
cgacggcggcggcggtagggaatgggaggacggggcggcgccggcgccggcgacgacgacggtggcgtgccggagcgcgtgcgaggcgttcgggacgccagagtactgctgcacgggcgcgcacggggggcccaacacctgcgggccgaccaagtactcgaggctcttcaaggcggcgtgccccgcggcctacagctacgcgtacgacgaccccaccagcaccttcacctgcggcaccggcgcccagtacctcatcaccttctgccccgggcaccagtaggaactaggacgacgacggcgtggtggtggtcgtgtcagtgtatgcgcta

SEQ ID NO: 34997 - DNA, 487 bp, Setaria italica
  misc_feature (466)..(466): n is a, c, g, or t
  Peptide Sequence Number=SeqID_100971
gtgacctccctttcagtgtgaaaactgacagcaccaacttaggaagattgtctgccccagaggtggtgattgttgttaatactggaaatcatggaaagcatatgctgttctctcgaagatcatcttatcagcagatactagctttggagaaagaaggaatgcagattgtagaacgagatgttgatctgcctgtggacctaatacttagtgccacagtttgtttactatggtatgataccggaacctttgggtccagtgaattaacaatatcagcggacgcatccagtataacaaattttatagaagatattgctaccaacattctgatgtcacttagcttctgtttcagtggctgcataatggtcttcgaggttgaaaaccacttcctttctgctgtaatggaggcatctgattctctatatgcttcagctgctagcctggacatgaacttgcagcttgtttttcncacaagccaacccaaatcaaa

SEQ ID NO: 34998 - DNA, 440 bp, Setaria italica
  Peptide Sequence Number=SeqID_100972
cttattgtgcacagatcgcagagtcttatcagggtgtaaacaaacaggggtgtttttgttcaggacacacaaaaggaaacactattaaaaacaagattttggagttgatcagataattgtagtctgaatttttggtcaacactggagtttctgtgaaagcttatcatcacatcaaccggacaaaatccttcctctttgcataaaacctattcgaaaaaagatacaaagcaaaccgaagaacagaacaataagcgaaaaatcgcgtagatattgaaggctcagaaggatccattggattctctcgtcaggattcagaaaataggtaggtattttttggtcatcacagcctccaattagaaccatacgcaaacgcaaacaagaagggaaaacaaacaaaatccaaacgcaaacaagaagggaaaactaaactaaaataccta

SEQ ID NO: 34999 - DNA, 331 bp, Setaria italica
  Peptide Sequence Number=SeqID_100973
tttttttttttttttttcctattataacaggggggacatttctcattgattagtcatacaaggctccaaaagattacaaagcagcagatgagggaagataggagcatacacctctatacaaaattcaggcggaatgctcctatgcggctatgcctgggtcagttcatactagataaattagtacaaacagaaaagggactaagtcttcatctaggttctgcgtcataccacggctcaaggaaaaagaggctcttgatgttgaacatcagggcagactgtagtctccgttgtatagcttgttgccatgggtggctgagacacgacaaactaa

SEQ ID NO: 35000 - DNA, 2489 bp, Setaria italica
  misc_feature (1)..(97): n is a, c, g, or t
  Peptide Sequence Number=SeqID_100974
nnnnnnnnnnnnnnnnnnnnnnnnnnnnnnnnnnnnnnnnnnnnnnnnnnnnnnnnnnnnnnnnnnnnnnnnnnnnnnnnnnnnnnnnnnnnnnnnntttttttcgtagttcattataacagggggggacatttctcattgattagtcatacaaggctccaaaagattacaaagcagcagatgagggaagataggagcatacacctctatacaaaattcaggcggaatgctcctatgcggctatgcctgggtcagttcatactagataaattagtacaaacagaaaaagggactaagtcttcatctaggttctgcgtcataccacggctcaaggaaaaagaggctcttgatgttgaacatcagggcagactgttgtcgtgtctcagccacccatggcaacaagctatacaacggagactacaggtgttagcgcaacttccatcgttggtgttgcctcaggccatgagaactcaaaaggggcatcggtggcaagaagctgaggggcggatgcaatctcttttggggaagattgggtgtagtggaactcaatttggaggcgatggtgcaacggggttgatgccatcagtcctttcttgatgtctacctgtagttcccggattggtatggctgccaagaaactcttgatgtattctttgcatgattctttgcccttggacacaaggatgtcctctccaatatcattctcactgtcctggtcagttgaagagctctcaggacctgaagaatcctttgatggtccgcttgagtcggggctagaaggtttcttttcagcctgtaccttgtgaatcgtggtagtgttgtcaaacttcaaaatgtatgcctggctgcacccttcatggagcctctctccaagggtatcgataatgtaatatgcatcatgctcaaccttgaggagaaaaaagtggtcattccaactcactatgtataggttagggttgtcactagatgagaactctgccgcctgggtaatctcatcccagatgctgtcaaatgacatggcgccattaagaaagtcaaaaccgcccatgtcctcatcgccttcaggctggaagaatccaataaaagatttgcttggggagactgtcagtgggcgaatcttggcatgaaggacagtttcaagatcaaagtgcttatcaggaaagcgctctctatatgtctcgttctcacaaaggtttctccactctagtgatccttcacggataaggctgtcaaactgtgactgaataggcatcatattccgatttgcctggaaccagtctgcaataacagccacaagtgctgtacatgcactctccccagctgctcgctcacttctctggtctattgatgcaaagaacacctgggacgaaagtttcatatggccatcacggctgattatctccttgaactcccaattccccacaataaaattatcatcaccaaattctgacaccataccatttgctgatccatcttcagctcttgatccctctgaaacagattgatcagaagaggttagcaggcgtcgatcatagtcaatatcatcacctccctcttccccatatgccttcttcaacagaggttcacctttagccttcagtgatcttaaactcaatttcctcttcctccaaggaagtatactccgtttagcagttggcaacacagtctcctcagtggtcgatggcaacattttctctacatgataaccgacatcagattttcggtgactataatatatccagtcctcatgctccccatcaatctttgcatgggcataaactaggccaccgacatagttgacagactgcagcgatccataactgaaggacttcctgatagttgaatccccaatttcatcttcctgtactctgtcatccagatcgtcatcgagagactcagtatcacatggatattcagcaccatcactgttaacacagaacttatcttcgccgccttcatcatcttggcaagtcttcttggaccttcgtgtcgccaccagatctgtgagaatttttactttcctcagccctgctttgataactgaaacctcatcttttcctccaggaagagaatcaccagatgatggggacaatggaaaggttgcagcaggtcgttgtgatgcatcggacgtttcttgaacagctcttagttccaccatacttagagtgaggtgaagggatggggctgattcaggttcaccaccaggtacagacaatgggagaattatctcaatcacctcctcagctgctgatgcatagtctgctaggttgagagaagcagttcccagaattgatggtttattctttgcccctatgttgatgtcgctgaagacgcagaaggcgagctcccagggctggaacgcggcgccctcccgctgcgacgcggccgcgagcgtgacgacgctctcgaactcctcctcccacgccgcctccgcctcctcccgcgtgcggttgcgcctgaccgcggcgcgccgcagcgagcccagcgcc

SEQ ID NO: 35001 - DNA, 533 bp, Setaria italica
  Peptide Sequence Number=SeqID_100975
gcctgtatatttcatcactaacatgcccaattttggcgttagaccacctaatccagaggactttcaaggtctggtctttggtctatcgtctttgacatcgcaccatcagggaaagcgtccggataagtggccgctagccttgctttcattgctctcagctttgtgaaaatatgctcaagatcagctttcatggacttgagaagtcgagttttactagcaaaatcgctagacacttctgcaaagcattgctcggaatactcattaaaatgtgtgagaactgcattgctatcttgcaatcgcccccaatatgaggtgctgcgtctgcctgatggaggcgacgtcgtcagggtccaccagcgacctgaaccgcgccgccacctcctccgcggccgccgctggggcgggcgccggcggcgacttctccatcgcttcaccgcctccgccgtccctgctctcctcaccggttgcggattcccctccggcgtgtgtggggatcgatccctcccgatgcacgcggagcggagcgcttaccc

SEQ ID NO: 35002 - DNA, 1069 bp, Setaria italica
  Peptide Sequence Number=SeqID_100976
tttaacggttttaaatttttagtttaagtttacgttaatttctttgtctcgaatcagtgtgagtagtgtcaccggaggcctatgctcaggatcccttcaacaggaagatatggagacggatgagcgatcttgctcgaagaatgtgttggcgggttgcatctaagaagaaccagacggtgatatgggccaagccattggccaatggatgctatatgaggagagagcctggaacacgtcctcccatgtgcgaacgtgatgatgatccagatgctgcttggaatgtacccatgaaagcatgcctaactccatactctaagagagttaacaaggttaaaggcagtgaattgcttccctggccacaaaggctcacagcaccaccacctcgccttgaagagcttgggatcagttcaaacaatttttctgaagacaatgagatttggcattctagagtaactcagtactggaagcacatgaaatctgagatacaaaaggatccctttagaaatgttatggatatgagcgccaaccttggtggatttgcagcatctctgaggaaaaaggatgtctgggtaatgaatgtagttcctttcacggaatctggaaaactaaaggttatatatgatcgcggtttaatggggactatccataactggtgtgaatcattctcgacatacccgcgcacctacgacctccttcacgcctggcttctattctctgagatagagaagcaggggtgtagcctggaggatctgctgattgagatggaccgcatccttaggcctcaaggttatgcgatcatcagagacaaagccgctgtcataaactacatcaagaagcttttaccagcgctaaggtgggatgactggacatttgaggtgaaagctaagaaagatgcactctcgtcgggtgatgaaagagtattgatcgtgaggaaaaaactgtggaatcagacattgcaagatttgtagcagtcgtagctctcgttgatcctaactgtagctaactgagtacggtgattatcctaatcttcaagtgtaatatagttctcgactttttgtttaaaaaaaaa

SEQ ID NO: 35003 - DNA, 695 bp, Setaria italica
  Peptide Sequence Number=SeqID_100977
ccaccggtaaagaactacaatgggagaatatggagtagtatattttgtagcattgcaacttactaaaaaaagatctaaaaaggagctacgagtcccaaaaaaaaaggagaaagaaacggggtgcatattctgtgcatcgcgaagctgtaacatttttttaggagcatatacgtgtacgcgtggcaacgagagattttagctacacaaagaatgacgagctcagaagagctcgatcctgctgttgttccatgtctcctgatgctcgaacagagcgatcctctggtccgtgagcaaggggtcctcgaactcccacggcgtcgggcccgtgaccacgtcaagccacatggactccggccactccaccatctgcggccactccagccactcgccgtcgacgatgctgctccccccgctcgatgacgaggaggaagaggaagattcaggcgaataagctgtgctggtgccgctgtcgttggccgcgggcggcgcgtcgacgacgtcgccgtctgggatgacgatgtcgtccaggaggcgcgccatgcgcacctcgtcgacgcagaacgcctcgtttccagcacatggcggcggcgtgattgccgccgcgacggccttcgcctcatcctccggcgagctgccggtgtccggaacgggctggaggggcttgtgggtgacggggtcgagtgcccatcttcttc

SEQ ID NO: 35004 - DNA, 313 bp, Setaria italica
  Peptide Sequence Number=SeqID_100978
aattcaacatgtagccatggaggagtccaattagcgcagggaatatctaaaatttgggatgtatttaactttgttgagcgcttgactaatgagtatggattacatgaggaccaatggaggaggaggatgtactcacgccgaacacgacgccgaacgcccacatgtactggacgaagaagccgagggcctcccactggggcccctcccagaagtcgggcgtctccgggtccggaatctccggcatgggctccgtcgacacctcgaaacccagcgggtaccattcccactccctacgccccccgcctccgctgcg

SEQ ID NO: 35005 - DNA, 1171 bp, Setaria italica
  misc_feature (1)..(36): n is a, c, g, or t
  Peptide Sequence Number=SeqID_100979
nnnnnnnnnnnnnnnnnnnnnnnnnnnnnnnnnnnngtttttttttttttttttttttgttcagaagggaattcacagtagtactccaaaattttccaagagagacatgattaattgtgccggtacagaatgtaacttgtgaaattcatttgaattatatacattttccttggactatatgcatgaaaagcatcctatgatggtatagggtacgatgaatgcaaaatacaggaaagatggcaatccttgctctcttttctttttccctacttctgggtacaactgacagttgaatacttgaattccatcaccactagccatctatattttcatccaagggaaaattcagtgctcaatagtcaccagccagtttttttgagcattatgatttcaaccaaaccttacatgtcttaccggctactttacaggtaaggccctataggctatacctcaaataaaagagagacatcgtcttctctcacccgtgtttcctccacagtcctactcaagagctggtgctacctcagtcggattgccttcaaacacatcagcgcttgatgattcagactcctcagggaactcctgtgtttgtgattccttgtacgcaggagtgtctttgaaatctgttgcgccatcattgtaggtagccaccgcgacaccacaagcaatgaggccgaacacgacgccgaacgcccacatgtactggacgaagaagccgagggcctcccactggggcccctcccagaagtcgggcgtctccgggtccggaatctccggcatgggctccgtcgacacctcgaaccccagcggctccccttcccactcggccgcccccgcctccgctgcgtcctcgtccacgtcgggcgccacgaccccgccgcggcgcttctttccgccgcgctcctcgaggcgccgctgcgtgcgggacgagaccccgccgcggcgagcgagggccacgtgcagggcagctcgaccgctcgcggggagaaggggaagcgccgcagcgcgacggtggacgacggccacgccgaacggcgtgggggaagtgagcagagacatgaggctgagacggcggggcacagtgaatgcgtgtggtcacgtggagaagctcgaacgaggagctcctggctgtggatgctttctcgagctggaagagcggggagggagaaaa

SEQ ID NO: 35006 - DNA, 1059 bp, Setaria italica
  Peptide Sequence Number=SeqID_100980
gtttttttttttttttattttgcagaatttctttcgattttattggaattcccatgtgattcctttggaattctttctgaacttttcctacactggtagaaatgtagaatcgtaccagtaccagctggccacatttccttattcatcacttatcatcattattgtatttgtagcacacaacaatgtgagaactgagaacccacgtcacagctactttattcaggatttgcacgcgtgcatgcaagctcttgcacgccgccgcaccacctcactccgcacctacttgtactggtcgccggagaagacgctgcactcctgtggctccagccggcacatcatcggcagccccgcggcgtactgccgggccttcgtcaacctcacgcgaccgatccttctaggaggaaacggcaggtacccctcccctccctcgccgccgccgtagtacccttctccttgctcgccgccgtagccgtagggcccctcctccagcggcggcatggcctcctcgtagccgcgcaccatgcggcggacggcggagcaccggcactcgcggctcacgtcctggagctgctggcagcaccgcatccggagcccggtgccccaccggaacgggccgacgccgtagcgcatgccgccggtcagctgccggtcgaggacctgccggcacgcccacagagggttctcctcgacctcgcgctggcaccggaggtccctgagcctctgccgctcgaacccgctttggccggcggccatggcaaccagggccgccaggcacagcgcggctgtggcggcggcgacgacgaacttggccatctcagcacggatcactggcagatctctgtagctgccttgctggtgttgtttggtctggctaattgcgctctttggttgatgatgagatggtggtgagggattggttttttattaatgctggcatgcagactaggtacgaccggaagaaagaacgactagacaactactagtaagactagaccttacaacaactaactacaacaactaggtagttagtttaggttacttaggtacttaaatttagta

SEQ ID NO: 35007 - DNA, 336 bp, Setaria italica
  Peptide Sequence Number=SeqID_100981
aagaacaaggtaaataggaataagtaccaaattagaagtgttttcttgaagaacttaatgctagatgcagagaggttagcacctcacttaatactgcgaaattagtcgatgtgccatatgttggagaagaatttgttgcaaacaggaaggaaatgtcagttttgtgttcgttggagattttggaatttattgacaagcatgatactgcagaaatagtagttgacagcgctgggagtgattttgagattccagaggttccttcttccgatgattcagcccaccatggtattttaaacgaacacaggaaggatgtcaaccaagaacagagcatagcag

SEQ ID NO: 35008 - DNA, 493 bp, Setaria italica
  Peptide Sequence Number=SeqID_100982
aggttttagcagaaagcagaggagagctgcgtcctgatccacggtttgatgccatcaatgctgtatctttggccattgaggatgatgctgataatactgtcgaagttcatgtgtttatacgtgacaacagtgacatatcatgcaggaggagaaatctggatggtattgctggctgtaatgtagacgtcttccctgaagagagggaccttctgaacaatcttattagtgcagtctgttcaattgatccagatatcctagtcggatgggagattcagttaggatctttaggatttctagctgaaagagctgcttatctgggtataggcttactgaaaaggatttcaagaacactaccgcatgagctgaatcatccacgtaaagttccagttgatgactctagtcagatgcttgctgaagcatcttctgctgatgatgttggtgatgtcagtgagaataactggagtcatactcatgcgagtggtatacatgctgt

SEQ ID NO: 35009 - DNA, 594 bp, Setaria italica
  Peptide Sequence Number=SeqID_100983
ggaagacgtctacattacagccagcaataccatccagatatcctagtcggatgggagattcagttaggatctttaggatttctagctgaaagagctgcttatctgggtataggcttactgaaaaggatttcaagaacactaccgcatgagctgaatcatccacgtaaagttccagttgatgactctagtcagatgcttgctgaagcatcttctgctgatgatgttggtgatgtcagtgagaataactggagtcatactcatgcgagtggtatacatgctgttggaagaattgttcttaatttatggcgtctcatgcgtgcagaagttaagcttaataattactcccttgaagctgtagctgatgaagtactgaggagaaagataccactgataccaaacgggatattgaaccgatggtttgcaacaggtcctggacgaggaagacaccgttgcatagaatatattagcactagagctagaattaaccttgaaataatgaatcaactggacctggtgaatcgaacatctgaacttgctcgtgtatttggtattgacttcttttctgttctttctcgggatctcagtatcgtgttg

SEQ ID NO: 35010 - DNA, 989 bp, Setaria italica
  Peptide Sequence Number=SeqID_100984
acactccaaagaaagcctagctcccgctgagaaaagagagagagagaagagagggttggtggaagaagagaacaaaaactcaagggcgtagagagagagagaaagctgtggccggcctttgcgtggggagagagacaggcagggggagggaagccattgcagttgcagagggaggaggaacgagtgggagaggaaaagtaggaggaggaggaggaggaggagcatggatgagagagtggaggttgagcagcaggagcgggcagcgaggactgccaaaaggagatttggcgccgtgggcccgcctccctccagctgaggaggaagcggcgagggaggagagggaggggaggggaggaggggaggatctcctctcacgtcaaagagtaggagagaaagcataaagggtggaggagagggggaagggggagagcttccagtccgcacaaagcgagaaaaagcttcatcagtcagaaagagagaaagcgagtaggaaagaaggcttcagaggaagagcaaggcatccagtgagtgtgctgtgtgagtgataaatagcggctgcaagccgagagcatccggtgctcttgccaccaccgggccattgccttcttttgctctcctccattgtagttgtgtagttctgtagtagcaggtgctgtgttcaagtttggtgcgtggtgatggcattgcaagagcaggacgaggagggcggcgatgatggcgaggaagaagttgaggaggaggggatgatgagggcgtgggagagctgacgatctctcctcgtcccgaggtgtgctgtccacttgttgagtagtaagatattggcacaataggctcaatcacgtttttcttttgctcttttactcttggtttgctgtgcttgctcttttcttcttcgtctaatgcaccattacatactcccttctcgtgtaatttcattccggtttgtttgttgttcctggtgccttcccatgtttagaatggaaggcgac

SEQ ID NO: 35011 - DNA, 443 bp, Setaria italica
  Peptide Sequence Number=SeqID_100985
agcagtccttcaccaacatctggagatctacttcgtcgacgggaggaggatcctgagcaacctctccgagtccgggagcgagtatggcgggcgggtgaagcagctggagtcggacatcacgttccacatcgggaagcaggaggcggagctcaccctgcgggtcaacagcgccgccttctacggcgacctgcaacagctgaaaagcctgatccgggcgggggccgacccgaagaacaccgactacgacggacggactcctcttcatctcgcggcttccagaggctacgaggacgtcgtgcaattcctcatcggcgaaggcgtcgacatcaaccttaccgatcactttgggaacacgccgttgctggaggcggtgaagcaggggcacgagcgggtggcggcgttgctgtacgccaagggtgccaagctgagcctcaagacgccgg

SEQ ID NO: 35012 - DNA, 209 bp, Setaria italica
  Peptide Sequence Number=SeqID_100986
caaagtgatggagatttgatggaatgtgctctctgagcaatattggatggtcagttaacctgtacagtaccaggtagataagcatgccctttctttcgctctgacctacatcaccaatgtagtcttggaaagtgaaattatagacagatgctgcttggattactacaactgagacacgcaagggataggcaaggcacacaggggatagg

SEQ ID NO: 35013 - DNA, 344 bp, Setaria italica
  Peptide Sequence Number=SeqID_100987
cgatgatctacggcaccacgaccaccccattcccatccccagcagcagcttccccgtcctcctccgtcagggccagggtcccggtcggccttccccccggccccttcctccgcttcgctgcgcgtcctcctcaggaatggagcccggcgctggcactgccctgtaccctctgcaccgctgcaaaaccatttacctggtcaggcacgcccagggcattcacaatgtcgcgggcgagaaggatttcaacgcctacaagtcgcatgacctcttcgatgcgcagctcactcctctgggttggagccaagttgatggtctgcgggagcacgtgaagaaaagtggacttg

SEQ ID NO: 35014 - DNA, 240 bp, Setaria italica
  Peptide Sequence Number=SeqID_100988
cgtatctcctcggttgctcattccctgctcgtttgtcgccattgtcgcacctcgtgcgctgctctgtgaagacatggcgagctcggggccaacgtctggaaagaaatctctaaataaggtgactttgctgttcaaattaccatattacacacaatgggggcagagccttctgattgctggctcggaaccggcactgggatcgtggaatgtcaagcaaggactgtctctgagtccagttca

SEQ ID NO: 35015 - DNA, 390 bp, Setaria italica
  Peptide Sequence Number=SeqID_100989
cgtaaaataacataatagtccattgtccaaagttccaaaactaatgtacaaaagtcaaaccgttcacttattcaaaaaaaacggttcaccggttcgacacgaccgggttcgcaacggttcataccggtccaattgcatgaccaataactgaaccgtctggtcaccgttcacggtttttccggttcaaccgtgaaccggttcgatttttttctatggcacttgggcagggtcgcagggaatctcgttttctactgtggcagatccatcgtccacttgggcagaatctgtgtcgctccccatggatgagtaaccaacccattccgcaggccgcatctgccgcccatttccgggcccaacgcactctccagttgactgctctgctctgcaccc

SEQ ID NO: 35016 - DNA, 221 bp, Setaria italica
  Peptide Sequence Number=SeqID_100990
gggggtttggaggtgatagatgacgctaaatcccagctggaagctgtgtgccctggcgtagtgtcttgtgctgatatactggctcttgccgcacgtgatgccgttgatctggtgagaacatgttataccttgacaattcttctgttttattaaggtctaaaatttttttaccgttttactgagattatgatgagtgaatttgttcttctgcctaattttaa

SEQ ID NO: 35017 - DNA, 938 bp, Setaria italica
  Peptide Sequence Number=SeqID_100991
cggagtgccccacaaaattttggtctgagggggtttgaggtgatagatgacgctaaatcccagctggaagctgtgtgccctggcgtagtgtcttgtgctgatatactggctcttgccgcacgtgatgccgttgatctgaccggtgggccaagctggtcagtgccactggggagaagagacggcagaatttcattagcttctggtgctaaggccttgccatctcctgccgatcctgtatctgttcagaggcagaagttcgcggatcaaggcctgtcagaccatgacctcgtaacattagtcggtgcccacaccatcgggcagacggactgccagttcttcagctaccgtctgttcaacttcacggcgacgggcaacgcggacccgaccatcagcccggcgttcctggcgcagctccgggcgctgtgcccgcccaacggcgacccggggcggcgggtggcgctggacagggacagccccggcgcgttcgacgtggccttcttcaagaacgtccgggacggcaacgccgtgctggagtcggaccagcggctgtggagcgacgccgccacgcagggcgccgtgcagaagtacgccggcaacgtccggggcctgctcgggctccgcttcgcctacgagttccctaaggccatggtgcggatgagcagcgtcgccgtgaagaccggcgggcagggcgagatcaggaggaggtgctccaggatcaactaactttatgatgaagcgctccgctataagttgcagtgtccgtgtgcgaatcggaactgcttcgtgtgttggcacgtcgtgcttcaccggggacaaacaaattggctccggcctgtggtgtttgtttgtttgtttgttcttgcctgtcactttctttcctttttctgtatctgaaggcaccctgcataattcgtccaacatcctgtgcctagtcgccg

SEQ ID NO: 35018 - DNA, 486 bp, Setaria italica
  Peptide Sequence Number=SeqID_100992
tccctaaaagatatgttgaaatttctgtgtcatctgtttttatctcttatagattcctttttgctactttaaaatacttttgatgatttgaatataagatttaccgctttacaagatcaaggagaaaagtgtgaaatgcgaagtatcaaggatgcaatatacactgaatatgtgctaatcagtaggtaaccaattttctttatttcaagaatggccagagaactgcccatcattccattagagaagaagagtgaccgattagtaatagtatcttgatagtagacaaagctgtatctccggatggaactttatttgtttgtttacactagtaactgtatgttgagttcttgttgagtcacctatgtctcacagcatatgtacatgtgtggtgtggtggtatattattacttctgatggattttgatagcttcacattgtgtatactcctgaatattttcttattatttgcttggacaggattcaaac

SEQ ID NO: 35019 - DNA, 521 bp, Setaria italica
  Peptide Sequence Number=SeqID_100993
gcacggacacgaggctgcagccggcgacgaagttggtgacggcgcggcggcccggcgcgcggagggtgtcggcgatgagcaggccggcggtggagccggagccgtagacgacggcgtagggcgggcagacggtgcctgcggtgcagttgttggcgaggtgcgcggcggagtggacccagaggcaggcggggttgcggcagccgacaaggcgggaggtggaggagttcttggggtggaagacgggggcggcggcggtggggcagttgcggcactggtagttggaggtgcagggcacccaggtgaggtggctgccggtgtcgagcaggacggggagcggctgcggcggcgtgccgagggaagctgtgaaggcgtagcctccgtaggagtgcgggtagagcgcggtggaacccccttgggctttgtggtgggcgggggcggggcgcctgaggtgcgaggcgcgggcgagcgaggcagcggccaggcgggagagcgggtggtggtgcgccgcctcggtggcgacg

SEQ ID NO: 35020 - DNA, 341 bp, Setaria italica
  Peptide Sequence Number=SeqID_100994
cgccggcggcgagagggcgaggagtttgccgccatggacatggtggacttgctgctggagctcgctgatgacccaaacctggaggttccgatcgagcgggatggtgttaagggattcactctggacctcatcgttggcggcacagacacctcgtcggtgaccatcgaatgggccatgtcggagctcctgaggaaccctgacgccctcgccaaggccaccgaggagctcgaccgcgtcatcggccgggaacgcctcgtcacggagggggacatcccgaacctcccgtacatggaggccgtcgtcaaggaggccatgcgcctgcatcctgtgacgccattgct

SEQ ID NO: 35021 - DNA, 203 bp, Setaria italica
  Peptide Sequence Number=SeqID_100995
agctacacaaggttcagtacagttacagagactcggagagtatcggctgcctagactgcgcgccggcacaaggggcaggaggcgtgccggagcagccagccgtcgatgcacggcaggtggaacgtgtggcggcacaccggcaggctcctcgcgctctcgccggcctcaaactcctgcacgcggaggagatatatcgtcaagag

SEQ ID NO: 35022 - DNA, 309 bp, Setaria italica
  Peptide Sequence Number=SeqID_100996
cgtagggctcgcttctgggctagttgatattggaggggaaccatgtcggagaacatcgatctggtgctcgagttcctgcgcaagaacaggttcgccaaggcggaggctgctctccgcggggagctcactggccggggcgattcaaacggcccgaccacgcagaggcgtgtggcggagccgaaagaggacgaggagcgggatgactcggtgggctccaatgtagggcccaagggcgccacgtcagtgaggagtgcggactcgtcgagggagttcatcgtgaaggagatcgatgtgggagctctgccgaat

SEQ ID NO: 35023 - DNA, 463 bp, Setaria italica
  Peptide Sequence Number=SeqID_100997
tgagagatttgttcaagttgctgatgcacgcaagaagcaccttgtttccgtcctcaggaaattcttgttgagaaggacaaaagaggagacaattggacatcttatgcttgggaaggaggataatattgttttctgtaaaatgagtgatgttcaaaagcgtgtttacagaagaatgctgcaacaacctgacatacagatccttattaataaggatctccgatgtagctgtggaagtcctttgcctcagattagcaaccacctggagctgataaagcctaatccaaaggatgaggttgagaagcagaaaaaagatgctgagcttgcggctgctgtcttcggtgcagatgttgacttagttggtggtagtgctaaaagtgaaaacttcatgggtctcagtgatgcagaacattgtggaaagatgcgtgcactggagaggcttctgtcattgtggactcagcagggt

SEQ ID NO: 35024 - DNA, 282 bp, Setaria italica
  Peptide Sequence Number=SeqID_100998
ccgccgggcgtgcgccgccgccctcgctcctgcttccggcagtggccccgccgcggcagtcggcgccggggcttccaccctctcgaaccgggcggaccacttggccagcacgtaccgcgtgcgcctccacggcggcacgtgcatgcccgcgccgcggatggactccgcggccgtggcgcacattgccgcggcgagttccttcagagcctccggcctcgccacgagcaccggcggcagggacgagaggaggtccccggtactcggcgctaggcctcgcgatct

SEQ ID NO: 35025 - DNA, 697 bp, Setaria italica
  Peptide Sequence Number=SeqID_100999
tttacatgtgaagaattcaaatgtgaagaaggtataatagtacgctatgacgaaacgtctcaaagtcaaagttggtatagacaaggaaaggccattgaatttgcgtcttaaggaacagcttggggatttctcttggtgttggatcagtgttgtgggcttgtggcgcatttattttttcaacttgaagggcatatgttgcttagggtctgtaagttacgaaatatattgtgttctgtgcataattcatagtttcatactcgttgtgaaccctagcaatcaccttccttacattttcaatgttcatggggaatgatttgttttgaattttggagccccagattgttagcacttagcagtgtcaagtgccgagaatgatttatctcttccatgtttgtgcattccagttatttttctatcatcatcacttcattcagaaacaactaatgttattttcacagttgagcaaacacaacttttggtaaccttagtgactcccagccatcagactaagctaaatgattatcatcatcttctttgcaaagataaaaatgattctcatctggctgtctttcaagcaactgttcagcatgtggtttcatattagatgccagtaattttgcctgatcaaacacggcatacttgtttatttccttccctaaatatttatccatcactgacgagcttaattgtgtagggg

SEQ ID NO: 35026 - DNA, 246 bp, Setaria italica
  Peptide Sequence Number=SeqID_101000
ctaaaatcctcacaatgtaattttccattcttaaatgatcagctaaatatgtatggatataactgacaaagtgagcaaatggcgctaaatattgggacctgttcatcccacaggcactgttattgccatcggggtaacatattagtcccaagcacatgatacataaacctatgggcaaacatttatgttgaagctatggcctccagaacataacgcacatatgtatgaaaactgtacctattagca

SEQ ID NO: 35027 - DNA, 258 bp, Setaria italica
  Peptide Sequence Number=SeqID_101001
ttgggatctgaagttcagagttctaagcagttagaaatgctcgctgattcgattgcgttcaaaacatgagaaatgtacataagtgtccttttgctgacagttcaaacaccatgcggtggtctctgagatcccagcaaagttgtttccttgtgctggtgtctcactagtacacccttgggaaagggacaaacaaaaggtaattttttgatgtttcggttgttagtgcatcacttatcctgtgtgtttgcctgaagcgcc

SEQ ID NO: 35028 - DNA, 401 bp, Setaria italica
  Peptide Sequence Number=SeqID_101002
gagagtgagaggtttggaagattgcaatgggatgcaatgattggcctggatcggagttagtaccttagtatttctcattaggttgatacattcagggtaccttgccatttccgttggtgcttaacttgtcacgagaggtttgaccccctgtgtggagtgtggggacccctcttcttaccgctgtcggtttacatgtcaacgtcatggcaggccatgcccgtcggttttctcatctcgtgaggtcagggtagaaaagggaacgtaaacaaaccatagctgacaagctgagatcacgacggcaatcgggaatatttattgctatgccaaaaagataaaagcacgcgcaaagttactttcagtagattacagccgcgttctttcactgactgcatgtccccttt

SEQ ID NO: 35029 - DNA, 368 bp, Setaria italica
  Peptide Sequence Number=SeqID_101003
ccgtgagatggcggcggagaccgaaccggcggcggccgcggccagcgggctcgccggggagatggaggtagaggcgtaccgccgcctcttcccgctggcctttctggagcgtcacctcggcgaatccgtccgccccgatgcccgacgcctctgcgaggcccgccccaccaccgtcgccctcggcgccgtctcctccgcgcatggctccgctctcgttcgccttggcgacaccgccatgctcgcgtcggtcaagcttgaggttatgtcgcccccagccgaatccccagatgaaggatccctcgctgttgagttccatatgccacccatctgctccccgctggtcaggccaggccggcctgttgatgtgg

SEQ ID NO: 35030 - DNA, 411 bp, Setaria italica
  Peptide Sequence Number=SeqID_101004
gaatgcaagtccaaggcacccaaaaatcttgggcatcagctgcagctaaaggaagtatttctcaagctcatggggctcagatgtatgggtactacaatggaatgctccatgctggttgttctatctggagagatcatggtctgaaggggctttatgcaggatactggtctacgcttgccagagatgtcccttttgctggtctaatggtcactttctatgaagcaatgaaagaattgactgaatatgggaaaacaaagtatttgccacacagtgatctggatgtcagcaactcctttgaaggccttgttttaggaggattggcaggcggctgtagtgcatacttgacaacccccttggacgtgattaagacaagactgcaagtacaaggaccaacatctaggtacaatgggg

SEQ ID NO: 35031 - DNA, 412 bp, Setaria italica
  Peptide Sequence Number=SeqID_101005
cggcgctgctcgttctccccgtcaaggttggcgacaaggctcgtgtccccgatcaaggcgaggctgtcgctgggcaggagccgagacagcggcgtcggtgctggcggtggcccgatgagcgggctgaagcagcggccgggtgtcaatatgaccgtgcggacggtgtcaagcaggatatcgtcgaggtgatcttcgtgtcgtcttcagcatcttgcgaagtatcggccgcgagtacagattgcagagtaagaagggaattcagttggtctccttctgaataagctgctctgctgggaaagaaattcctttcttggggtgcttacacataacgcctatctgtaattttcagtgatccttggtgataatacatggtggtcttctcgaccgtataatcgaaaggcaaaaatttaac

SEQ ID NO: 35032 - DNA, 746 bp, Setaria italica
  Peptide Sequence Number=SeqID_101006
ggggtgaggaacacggcgcgcatgccggccgcggacggcgccggctgttgcgccttctggagcgggggccacgcggacgggttgagggcgtgtggcgcggcaccaaagccggagccggcggttcgtttaggaccacagatgcgcgtgccccatgccgccgccgtagcggcggcgagctcctgctgctgttgatgcttgagcatctgctgttgcttcagggcattaaactgagcaactttccggcgctgttccagcaaaatattcggctgatagtggtcagcacaggcggccttgggagcaggagccggcgcagacggctttttcgccggcggcacgacggcgtggccacgatgagcagccgcgttcttcggcacggggatgctgttgctgcgcaggcaggccacctgcccggccgcctcgtgcaggacgtcccagggatcagccggctgctgctccagcggcgacgacggcggcgagctgacctgcgacgccactccgttggggctatcctccccggaagccgcgaggccgcacaggatcgactgcggcgagccggccatcacttccgcctttgcaggggaggaatcatcgtctcccttgccgccgcctacgaggatcccagccatgcggcgcgagagcccgtcgagcccttcttcctcgtcgctctcgctcttggcggccaccgcggccttctcctcctcggagaagaagtcgtcgtccaggaactcgtcgggaagcagaactcc

SEQ ID NO: 35033 - DNA, 215 bp, Setaria italica
  misc_feature (209)..(209): n is a, c, g, or t
  Peptide Sequence Number=SeqID_101007
tttttatgacaaaaaaaccaaagtagatattgtcatctttacatgaaatttgttacagttttccaaaataaccagatggagcgcactcataatattggaatgcagattcaattcagagtcttcagcatgtgagaaggtgggcaggaagatcaattacccacccaggtgtttgaaagatatgaataagaagttatcactgcctataaatntgccag

SEQ ID NO: 35034 - DNA, 1941 bp, Setaria italica
  misc_feature (1926)..(1941): n is a, c, g, or t
  Peptide Sequence Number=SeqID_101008
cgcaatagcctgtagtggtggcaatgtggctattgcgctgagtaaccctccaaagtcagtgaaagatgaggaagtgtttgtttggccctggatgggtatcctcacaaatgttccggccgaacaaactcaggggggtggagccatactgatgaagcagttagctgacttcaaacccttgcaatatactgctgtatatggtgccaatgggtatactggttgtgggatcgtcctcttcagcaaggattggattgggttcaagaatgcactagcattccagaactttttcaagtcacaacgcctgggtaaaatggactggaaggagacaaggcggcatggaaactatgtatttggatggctggcgggagaggaggattacaaatcagatgatccagttggtatgttcttatcagcaaatggtgacctgaagacagtgtctgatctggaacaggagatgtcgagcaaaactgacaatctaatagctaatttgacacaacagatgtctgctcaaagcaagtacgtgcaggagctagagtgcaaatggaatcaaatgaatctctcccttcaaagagccatggaagaaagtgacttgctgcacaagcgttataacgaagaaatgcggaatatgcagtctgctgctcgtgaacatacacagagagtttttcaagagactgataagctgagaacacagttggtcgagaaagagaggtacatccaaaggagatccaggcaactaaatgaattagttgctcaaactgacatggaaagaagaaaattggaggaagagagaaaaaagaatgctgaccaaaatgattccctcaacatggctcgaattgagcaacaaaaagctgatgaacgtgcgctacagctccttgagaaacacaagaaagagaaggaggctgctttcaacaaaatcttgcagttagaaaggcaggtggatgaaaagcaaaagctggagctagatattgaacaacttaaaggcaaactggaggtggtgaaacacatggagggagagggtgttgatgtgaagaaacgttccgaggagctgacagcagaactgaacgaaagaatcgaggagatggaagatcttgaatctctcaatcaaactcttgttattaaagaaaggatgaccaataatgagattcaagatgcaaagaaagagctgatctcgggtttggcagaattattaggtcctcgtagtaacattggaatcaagaggatgggtgaactggatgggaagccctttcttgtggcttgcaagcaaagatatggagacgatgctgacatgaaagcagctaaactttgctcatcatggcaagagcaactgaaggaccctaattggcatcctttcaagatagtgaccacaggcccaacggcagagcaagtcattgatgacaaggatgagaaactggtgggtttgaagcagcagctcggtgaagaggtttacaaggctgtgaccacagctttgctggagatcaatgagtacaacgctagcggcagctacgtggtatctgaactctggaacaacaaagagaatagaaaggccaacattaccgaagccatacagcacgtcctgaagcagtggaaagcactgaaacgtcgaagatagatatacatctcgctgaaaaaaagccaaggtttgggatagctaactatcagcatcaccggcaagtccagacgctacttctactgaagatggtcaatccacggctgtgttcaccttggagggcgcaagctcaactagcttaatttatcagttcctcttttttgggtctaaaacaagtagattggagaatatcctagagtagacgttctctttcagtctttggtaactgtaatcttgtctggtgctgccattactctgtgacatgtctccaatgtccaatgtgcgatgtgttgctcctgctaaaaatttcgtgactgaatgcnnnnnnnnnnnnnnnn

SEQ ID NO: 35035 - DNA, 292 bp, Setaria italica
  Peptide Sequence Number=SeqID_101009
tactaaagggtaaatagacaattagtttaggtaattgcatgttggataattgaattggtcagcaaatgatgcactgacaatagttaactactttgctattgcagtgacaatcattgtggtcgcagttcctgagggtctaccactggctgtgactcttagtctagcgtttgccatgaaaaagctgatgaatgacaaagcactagtgaggcatcttgcagcatgtgaaaccatgggttcagcaacttgtatttgcactgataagacaggaactctgacgaccaacacatgattg

SEQ ID NO: 35036 - DNA, 639 bp, Setaria italica
  Peptide Sequence Number=SeqID_101010
ttacttcgacaaataattcccaaaaagtcgtgattattgaagtttgacccgagatctgtgataatcctgttgggaaaaccatagcggtgtacgatttcatccaagaagtcgaggactcggtctgccttggggcaagtgaccggtttgacctcgatccatttggtgaacttgtcgattgccatgagtactctgttgaatcctcctagcgcagttggtaacgggcttatcatgtcaagcccccagcaggcaaatggccatgttggaggtattgtgactagcttgtaggccggcacatgttgctgttttgtgaagaattgacaaactttgcatttctgaactagttgtttagcgtcggccagagccattggctagtagaagcctgctctgaaagcctggccaattagtgtcctcgaagatgcgtggttgccgcagattcctctgtgaatctcttctaggatttcttggccatcttctctggtgacgcacttcatgagtactccagatgatgcatctttcctgtagagcttgtctccgactagaacgtaattctttactcgccgggagatttgctcagctttattcttgtcggatggtaactggtgatctttgatgtagtcgatgaagggtatcctccagtcg

SEQ ID NO: 35037 - DNA, 542 bp, Setaria italica
  Peptide Sequence Number=SeqID_101011
atcggctatacttctgaagttgttattcatttttttctttcttcttcaatgaacggcgacgcttcaattttgccactcccaaattggaaagtaaacaaggcctgagtcatgagtcactgcttgcgtgtgtcttcgttccatgttgttggcaaattctatcacctattgcaacatggccgttgggaagagaactatcttcatatctacaaacaggttggtcgccggacccgacgacccgtacaagtgagctccggttgctaagccactcacgacactgtcggcttcaccggctggccggtggtcggcaatcggcgcggtgcaagcgcggcaggcaactagcagctgttagtttttgggtgggtgggcgctagcggcgtgtacgcacttgccagtcctggaggccctgcacatcgtgggtgcactttcactcattgggctcgccaacacatcgtgggtgcgtacaggcacacagcaatggcggaacttgtggatggagatagaacaacaacaactggagactgctcggttgatggatgggtgta

SEQ ID NO: 35038 - DNA, 381 bp, Setaria italica
  Peptide Sequence Number=SeqID_101012
ctctgccgctgcaacatcacgttcgtcaccgtcggggtggtgtcgccggagccggagccggagcgccgcggcacgcgggaggagcaccggagagacaacaccgagctggtcctgaccatagacgactactcggagcaggcgcgcgacgagccccagaatcagaatgcggccagcggcaacggtggcggcggcggtggaggcagccaggaggcgccgaaagattgcccggggagatcggaggaggccagcggcattgtcgagatcagggaggacggcgcgcgccggtgagggcgtcgtcgtcactgtcggacacgcaccgcgaaggccgcatgtccatcgccgacgtgctgcaggccagcctggaggacgagctgatgatgg

SEQ ID NO: 35039 - DNA, 592 bp, Setaria italica
  Peptide Sequence Number=SeqID_101013
gggggtgcacgcagtgcctgtagagaggaagccatggtgtcggaaggctccgccacgatgatctcgcggaaccagggcgaggcaacacgccgctcagcagccggtcggcgtcgaagccggtggcgaggatgaccacgtcggcatcgacgcgctcgcccgtgccgtcgagaaccacgccgccggcgcagaagctgaaggagtcgcacctcttgagcacgatgccgccctcgtcgaccgcatcgtagaacctatccgggagcacgctgatccgccagcccagcatcgccgccgagaagctgtggtcgggcaccatcccgtgcttccgcatcggcatgagagccttgtagtacgtctcggtcgccctggctattagccatctcatgggagtgagcaccgtggcgagaaggctcaggacgaacccttctccgggcttgtgaaccatcagctctgccaaccggcttgtcatcatcttctcgaaaaaagcaccccatttaaggttgggatccatcgtccaattggcagttctgtaaaccaaggtacatgggtacttgctaccgttggcttcagcgcactgcgcgacgatatcgattcc

SEQ ID NO: 35040 - DNA, 838 bp, Setaria italica
  misc_feature (835)..(836): n is a, c, g, or t
  Peptide Sequence Number=SeqID_101014
cgcgtcgttccagcgcccaccacaaaacgcaacaacgcatcgcggcggctcccccagtctctctgttcagctctccctcctctcccctcccaatccccgcccgcgagatcgccgccccaggccgggggggccctagatcccgatggcctcgcgccgccgcaccctgctcaaggtcatcatcctcggcgacagcggggttgggaagacgtccttgatgaaccaatacgtgaacaagaagtttagcaaccagtacaaggccacgattggcgcggatttcctcaccaaggaggtgcagttcgaggacaggctcttcactttgcaaatatgggacacagctggtcaggaaaggtttcagagtcttggtgttgcattctaccggggagcagattgttgtgtcctagtctatgatgttaattctatgaagtcatttgataatctcaacaactggcgtgaagagtttctaattcaggctagcccatcagatccagataaccccttttgttcttctgggcaacaaggttgatgtagatggtggcagccgtgtggtctccggggcggcatggtgcgcttcaacatcccatactttgagacatctgccaaggatggaacgaatgttgaagatgctttccagtgtatcgtgcgctctggtgaaaccaagaaggaaagaaactagtaatagtagacctagaataaccgtaggaatagtaggtagggtaggacaaacagtgatgattcttaatttccataatcttaccctccagtgccctgagatgtgaccttcttccaaatccaacttttcaggctagcccatctgatcctgatacttcctttgtcnnct

SEQ ID NO: 35041 - DNA, 463 bp, Setaria italica
  Peptide Sequence Number=SeqID_101015
tgtatagctgttaggatttttacaatagttcaacattaaatatccatcaggataatggtacaatggtaccaagctttctgctattggtcattaatctgtcatttctgtgtaacaattgaagtgttaggtgtttctttccctgaatacacaccttaattgtgtttcaaggtatttattcatgtttgttgttgtttgcatgacttgaacttcagtcagttcctggttagttttgtttgatgcagttttaccaaaaacttaagtttatcttccatttcgtatgcaacacaatcttctttatttgcaattacgaagaaactttgcacttaccttaaaactgtttcatgaaggtacgtgcctgacactgttgatgtggtgggtggcaaccgggcccaaaggtcatcaggctgctgttaggtgatgatcttctgaggccacatatccagtccttcattcctgtataatg

SEQ ID NO: 35042 - DNA, 1104 bp, Setaria italica
  Peptide Sequence Number=SeqID_101016
ggccaaaccaagcgccccttcccccccttccgccgcgagccgcgacggcaaggtagcaaacactgctagggttctctctctccctagcctcccttctctttctctccccccaggcgcgcggagcacgagcccttggtcgatcccgatggcctcgcgacggcgcacgctcctcaaggtcatcatcctcggcgacagcggggtcgggaagacttcgctgatgaaccaatatgtgaacaagaagttcagcaatcagtacaaggctacaatcggtgccgatttcctcaccaaggaggtgcagttcgaggacaggctcttcactcttcagatatgggatacagctggtcaggaaaggtttcagagtcttggtgttgcattctaccgtggagccgattgttgtgttctagtttatgatgttaactctatgaaatcgtttgataatctgaacaactggcgtgaagaatttctaattcaggctagcccatctgatcctgataacttcccttttgttctgcttggaaacaaagttgatattgatggtggcaacagccgcgtggtctctgagaaaaaggcaaaggcttggtgtgcctcaaaaggcaacataccttactttgagacgtctgccaaagaaggaactaatgtggaagatgcttttcaatgcattgtaaagaatgccctgaagaatgaacctgaagaagaattgtacgtgcctgacactgttgatgtggtgggtggcaaccgggcccaaaggtcatcaggctgctgttaggtgatgatcttctgaggccacatatccagtccttcattcctgtataatgtcatggttctgtatttcatttgtgaccttaatcgatcaccccttctgtacgaaatgaagaattcatgcatctgttctcgaattgtcacattacatgatgccgtgcagtttatcagtgtgtttattatgtgaacacactacgaataatttatcgaataccagtctgccgtttatcagtgtatttatcttgtgaatacactatgaataatactgtatttatcttgtgaatacactatgaataatactgtatttatcttgtgaatacactatgaataatactgtaaaaaaaa

SEQ ID NO: 35043 - DNA, 1470 bp, Setaria italica
  Peptide Sequence Number=SeqID_101017
cgcatcgcggcggctcccccagtctctctgttcagctctccctcctctccctcccaatccccgcccgcgagatcgccgccccacggccgggggggcccgtagatcccgatggcctcgcgccgccgcgattcggataaattcttgacaggctgactgaatttctgtgatttttctccttctcgctggttattgttgttggttagttcttttgttttctttaagccgaccctgctcaaggtcatcatcctcggcgacagcggggttgggaagacgtccttgatgaaccaatacgtgaacaagaagtttagcaaccagtacaaggccacgattggcgcggatttcctcaccaaggaggtgcagttcgaggacaggctcttcactttgcaaatatgggacacagctggtcaggaaaggtttcagagtcttggtgttgcattctaccggggagcagattgttgtgtcctagtctatgatgttaattctatgaagtcatttgataatctcaacaactggcgtgaagagtttctaattcaggctagcccatcagatccagataacttcccttttgttcttctgggcaacaaggttgatgtagatggtggcaacagccgtgtggtctccgagaaaaaggcaaaggcatggtgcgcttctaaggggaacatcccatactttgagacatctgccaaggatggaacgaatgttgaagatgctttccagtgtatcgtaaagaacgctctgaagaatgaaccagaggaagaactgtatgtgcctgataccgtggatgtggtgggtggcaaccgggcccagagatcatctggttgctgttaaagcatgacgcatcatggggtgctgtgatcatcggctttgcagtaaccaaacatacctttgacattgctgggtctccatggttctcaatttcatttgttacatttccagtctcctgctatgtactcaagggcatcctgcccccatgctgtcagattcgtggacattgtgcagtttcatcagtagcgtcatatcttgtgaatacaattcggcgaaataagagaagtgtaaactaaagttcatccgttatggtcttgtgtgtgactgtgaattctgtctatcaggtgatgatcttctgaggccacatatccagtccttcattcctgtataatgtcatggttctgtatttcatttgtgaccttaatcgatcaccccttctgtacgaaatgaagaattcatgcatctgttctcgaattgtcacattacatgatgccgtgcagtttatcagtgtgtttattatgtgaacacactacgaataatttatcgaataccagtctgccgtttatcagtgtatttatcttgtgaatacactatgaataatactgtatttatcttgtgaatacactatgaataatactgtatttatcttgtgaatacactatgaataatactgtatcgttgaataaaccaaaaaaaaaaaaaaaa

SEQ ID NO: 35044 - DNA, 303 bp, Setaria italica
  Peptide Sequence Number=SeqID_101018
cccgtggtacctctcgccaccacgggagccggccaagctgccggtgtacgactactcgtccccgcccccgccggcggccgggtggacgccgtgaaaaacttgattctttccgggaattcttttttccgtatcttgtgatcggtcatacagtacattgttaattattcgttgtggtaaaaaggaagtgtcgctgaatgattaatctttcgtttccatttccttgatttttcgattgattttgtatacgttccttttattcttccttttcttttcttcttctgctgattgatttggttccgctac

SEQ ID NO: 35045 - DNA, 861 bp, Setaria italica
  Peptide Sequence Number=SeqID_101019
ttcttcctgtacctggtgatgagcttcatgtactacacgctgtacgggatgatgacggtggcgctgacccccaacatcgagatcgccatggggctgtcgttcctcatcttcatcttctggaacgtcttctccggcttcatcatctccagagaggtgccaactttttacttttcttctcccccctaaaattgattgagaaattaacggatcgaattacctgacgaacggaaatgggaactggttgccgcagctgatgcccttgtggtggcggtgggtgtactgggcggacccggcgtcgtggacggtgtacgggctgatgttcacgcagctgggcgaccggacggagcagatcctggtgccgggggtcgggatgcagacggtgcgcgagttcctggaggggtacctgggcctgcaggaccgctacttcgagctcgtcacctgcctccacctcgccatcatcggcctcttcgccttcctcttcttcctcgccatcaagcacctcaacttccagcgcaggtagggaagggggaggaggactcgcccgccgccgccgccgccgccgccgcccaccgatttggcgtgtcgatggctgcgaacgccacacgtctccaatcacgagacgggacagatggtgaccgcatgctaacaaaaactgtagaggaagctgtgaagaagaaaagggggacgaggacgaacctgtccccgttgcaaagtgtgcatagattaattaccactagtagtagtacagaggaatggattggtagtagctgtagattcaaagggaagtgaaaaggatgtggtactgattaattacagttcttgtctagtaattgtctaaattgtctaatttgttgtttaaaa

SEQ ID NO: 35046 - DNA, 892 bp, Setaria italica
  Peptide Sequence Number=SeqID_101020
ccggcaccgcaacctcgtgcagctgctcggctactgccgccgcaacgacgagctcctcctcgcctacgagtacatggccaacggcagcctcgagaagcacctctacggcgtcggcggcgaacctggccctacactgatctgggcccagaggttccaggtgatcaagggcgtcgcctccggcctgctctacctccacgaagagtgggagcaggccgtcgtccaccgcgacgtcaaggccagcaacatcctcctcgacagcgagatgaacgcccgccttggcgacttcgggctcgcgaggctgcagaaccacgacgccgagctgcacaccacggtcgtcgccggcaccttcgggtacatagcgccggagctggcgctcaccggcaaggcgtcccctctcaccgacgtcttcgccttcggcgccttcctcctcgaggttgtaaccgggagaagaccggtcgaggactccacggatggccacagggtcatgctggtggactgggtgctcgagcactggcgtaacgagtcactggctgaggcggtcggccccaggattcagggaggctacgacgtggacgaggtgagcttggcgttgagggtggggttgatgtgctcgcatccgctggccggtgtgaggccgagcatgagacaggtcatgcagtacctcgccggggacacgccgcttccggagctgacgccggcgcacatgggcatgagcatgctggcgctgctgcagaaccaggggctcgactcgtttgtcatggccaactcctcgtcgtcatcggcgtctgtgaggagctttgacactagcctatcaagagggagatgacaagggcagtgtgttgttcgtttctatcgaaccaaagaattttgttggaagtttaattcttaattc

SEQ ID NO: 35047 - DNA, 489 bp, Setaria italica
  Peptide Sequence Number=SeqID_101021
gcggtccacaccacggagtcctgcaactacatgctggagctgatgcgcgcccacggccgcgtcggggacatggcgcaggtgttcgacctaatgcagcggcagatcgtcaagaccaacgtcggcaccttcgccaccatcttcagcggcgtcggcgtcgagggcgggctccggagcgcgccggcggccctgccggtgatgagggaggcggggatgtccctgaacgcctactcgtacaacggcctgatttacttcctcgtcaagtccggctgcgacagagaggccatggaggtttataaggcgatggtggaggacggcatcgtgccaagcgtgaggacctactcggtgctgatgttggcattcgggaagaagagggacgttgacacggttctctggctgttgagtgagatggagactcgtggcattaagccaaatgtgtatagctacaccatctgcattcgggttcttgggcaggctgcaaggtttgaggag

SEQ ID NO: 35048 - DNA, 325 bp, Setaria italica
  Peptide Sequence Number=SeqID_101022
tttttttttattaaacactatccattttccgttacatgaagaaatctacacagtatggttggtcatttttactaaattctccactggaggtattgatttcagttaatctaattacatcatatagtagactcaacagaatgaagtggtgagaatcctagttcaatgttacaaaaatttcttaaatcatagaataaatccaccacaccttacagggaagctatgatctttagaacagatacaatccttcacttcgtagctgttagcaatcgatatgatcatggtttacagcttcaggtcgcacagatcagttgtcagcttcagtttc

SEQ ID NO: 35049 - DNA, 306 bp, Setaria italica
  Peptide Sequence Number=SeqID_101023
ggaggggccataatagcaaagatgccttcaagcaacctgacatctccgtttcctccagctatcgccatgtcatcttccagtgaagatgaggagaatgaccacagtgagcccctaatggtggatgttgatcgtaactgccacgatcagagctctgacgaaatgaagctccaaagcgagccatcagagttggaaactgaagctgacaactgatctgtgcgacctgaagctgtaaatcatagatcatatccaccacaccttacagggaagctatgatctttagaacagatacaatccttcacttcgtta

SEQ ID NO: 35050 - DNA, 715 bp, Setaria italica
  Peptide Sequence Number=SeqID_101024
caagtgtccaagtatccaagacaggacatttagctactactataagagacgaatgaacactgcgagccatcaaccaaatcaagttggatgccaatggggaaccactaaacagaataagcaagaaaggaacatccataaaagattatttttaaccgcccccaacatgtagtttaagtgtgtaaacatccaaggtagtttattaagattactataaaaggcaaatggagattgcagaccatcaaccaaatctggtaagatgcaataataagggtagcgtacattgtactctacccacgacagcagatcagtgacaaggacaatgtgcttaactaatatttgaacagaaatggagagagaacatccccaataggctacatatttaaggtgcatctgcttgatcaagcaatcatgtagaccaaatacattgaaatcaaaaccaaatacactagtgtgaaaaaaactgtccaagacagtggttattaataagctagtataaaagcccaatgaggactaatttattcaagaatatcaatcaaatccacaacttgaatgcaatgaggggtccagtgtattcagccaagctaccacaacagcactgtaccagtaatctatgacaaggatagcatgcaccactaataattgcaacagaaatgcatccagctactccctccagacatgagtgcaagacattttaaacagccaaaactaaaactag

SEQ ID NO: 35051 - DNA, 407 bp, Setaria italica
  Peptide Sequence Number=SeqID_101025
tgtttccaaagagaattttgaaaggccttctatttttcggaactctaaggtccagcacatggctgctgaagcagctgggctgctatccaaggaggacagtgacctgaggaaccattgtgcatcaatagattcatttgatctcagtgctaagggacaggattcttcgctggaatctgaaggtgactatgataatgaggatgatgatgagacgggtggtgaattgggccattttagtagctcagagctagctaataaaacagcagctaatgatggtgagtgcctgactcaagaggagatagttggatcatcaggaaatcagaagcctctttcttcattggacttcacgacaggtggtgacatggcaagttctagtgttcagcatgcttcagtgagaactagcgggtcaa

SEQ ID NO: 35052 - DNA, 498 bp, Setaria italica
  Peptide Sequence Number=SeqID_101026
aaaactaacaaatcaagatgatataccaaatcgaacttattctaatgatcccacttgatccgatcagattcgattatagcaaaacagaatattcgcaggaggcaatgtacacgacccaaaaccaacacggacacgaaagagaagcagggcgcgggcgctctgctcccgggaggcgcgcttccggcgacctccctgcggcttctagcttttttatatcacggacggggcgacgctcaccgccgccgaaggacaaggcgacaagctgcagcaggtaggtccggccttgtgcctcaccggcgcttgtggtccctggaccgccgcgagtgccgcggctgctcctcctgcgcctcctgctcgtgctcgcgccgggaggacgaggatgggcggcgcttgaagtgctgctcctcttcgtcgctctcctcatcctcgccaccgccgccgtagtactcggtcgcggcagcggcaggcctccgcttctcctcctcggcggcctcacgg

SEQ ID NO: 35053 - DNA, 923 bp, Setaria italica
  misc_feature (1)..(23): n is a, c, g, or t
  Peptide Sequence Number=SeqID_101027
nnnnnnnnnnnnnnnnnnnnnnnctctccaacaagaacgttactcgggaaaaagcagagcacatgctgcgtccgacgcatatgatgaaatggaagaataggtccttcatttcacttcagccaccatgcctgcttatcttgctatctagtagaaaatcctagagttcgagatcgtaaactgaagtttggggtaatgcaatccaacacacagatctgatacaataatatagcatatctactagccaagtcccagatttcgcatatccttcctgtgaccagtggacccctctttcttgatccgagaaggcctgataatgcgatcgataatcccgtattcgagagccccttcagcgtcaaagcgcttcaccctggacaggtcctcatgaatcttttcgacagaatgacctgtgtgctccgcaagcttgccatacagatagttcttgatacgaataagctcatttgcttcattttcaatatcatcagcctggcctcgagcagctccagcaggtgactgaagtgaaatccggcataaaggcataccagtacgtgaacccttttcaccagctgcaagaataaatcctgccaagttgaatgcaaagcccaagcagtgtgtaccaataggactctttagacttagcatggtatcatatagtgccatacatggagtaagatctcctccaggtccattaatgtatagaagaatcttctttgtattatcaatgctgtcaaggtacaacatgcttgccaacacttggttgctgaattcttcatctatattgtccccgatgaagataatcctttcacgatacaaagcattccatatgtcaagccattgccaggttccttcaccaggggttctgtaaggcactcgtggagtacctataggcatcatcgaaatacgagctctggtagccttcttgtttg

SEQ ID NO: 35054 - DNA, 497 bp, Setaria italica
  Peptide Sequence Number=SeqID_101028
gatttgattttcctttttctaggcagcagctgcctctgagttttccagactttatcttggccataatcatcaagttgattgcttgaagtcaacttgtagcccgacctctccaatatatcttccagaaaatgtgccctcactggatgcgtgaatccaggaatgtggatagttggtgcccctccaaaataactagagaacagttccgcatttagagtagcactcatcaatatcaacctcaaatcacggcgccgtgataatagatctttcagtacaatcaacaggaaatcttcattcatgcccctttcatgtatttcatcaacaaatacatgagtcacgccattcaagtttcggtcactcagcaatcgtcttagtaaaatgccgctggtgcagaaaagcaaatgtgtgtcttttcccttcattccctccagtcgaactttatagccaaccgattcaccaaggttctctcctctctcagtggatactcttttacttctttt

SEQ ID NO: 35055 - DNA, 770 bp, Setaria italica
  Peptide Sequence Number=SeqID_101029
gttttttttttttttttttttatttaactaacacataccacgccgcattgttgttaaaatatccacctcacgagcaatccatcgttggcacggtttaacagtaaacaagcagtacgagattgcaagttgaaaacaagcaggcaatcacagatggtaacagtaataaatctgagattaaaaaagggaagtttactagagtaaacacagaacgccacttgcaaaaatggcagcaaatacatggtcctccattgcatagcaacattggtgaccactatatgatgggtagagtgatccatcattatccgcaaagcgaaatagcattcatcttcgctgctagctaccagagcagagccaggcccatgcagcaaaccatgattaagtcgacccgtccggtgcacctccatcatcatctggtgagtcctttctgtcctggttctccttccacttggcccaggcccatctcaacacaatgaacgccccaagtgcatacacctgccagaggttgcgcggggccatctcctcttcggttgcgggcggcggcggggcgccttcctcctcctcgagctttatcggcggcggctgccgggccttttggcgctccgcatcggggaagaaacggaccgtggacggcggcgcgcggcgggcctccgcatcggaagccccatccgcggagttcttggcctgctccggcgcgctcccggcgttgccccatggcctcgcctcctcacgcttgctgtattctattctatcacaccagcggcaaactccaa

SEQ ID NO: 35056 - DNA, 681 bp, Setaria italica
  Peptide Sequence Number=SeqID_101030
acgctccgttggccttgctacgctacgccgccgccgccgcctgctccgtccccggccctccagcagcggcgtgtgctctcctcaccacagcggtgaaaccagtgaccatggtgatccctccaccagaaagggcagcaagagttacccgctttctgaagccctacctgttgaggatgcatttctcaaacaagtatgtatccgctcaggtcatccatagcccaacagcgactgttgcatgttctgcaagctcgcaggaaaagctcctgagaccagacatggggtcgacccgtgatgttgcagctgctgcgaagattggaaagttgctcggtgagcgccttttgctcaagggaatacctgcagtgtccatccacatgaagagagaacagaagtaccacgggaaagtcaaggctgtaatagattctgttagagaagctggagttaaattgttgtgattgttatgttaaaattattgatctccagttagcatgtgacctacattgagatgtgtttctgaagtttgcaccagtgcaaaacggcgtgaactttgctgttttgaaatatggtgctaaatgggataatttctaagtcaataaaaggactttgtattgctgaatgccttagttttgtgttaaattgacatgtaatgctgtccaaaaaaaaaaaataaaagagactagccaa

SEQ ID NO: 35057 - DNA, 501 bp, Setaria italica
  Peptide Sequence Number=SeqID_101031
tttggcaggagaggtagagtaggaaaaagtaaccgtgggagcagcgatgcagtacgggccggtagagtccagaggacggcgacacggccggcggtgcttcccgtcactgcagcgtgcccatgatcggaggggccttctagggttgtttggtgggttagtggcggtggtcaaattcgtgtgttgtgcctcggccccgacctttctccttttatagcgttgtgtgacaggggtccgccgaccagtggtgggttgagcgtccccgatcaggacgcggtcaaggggtccgactcaatcgttggattgattcggatgagatcaatcctaacagatgtatgtatttgtttttaatcagttaccatcttatcactacgtgttagctagctcatactctgtgtgatggctccttaaagaaatggaggatcatctaatatactttggaacaatgaatgagtatttgtcccaattgattcctatcatggaatctagagtattgctctctct

SEQ ID NO: 35058 - DNA, 1616 bp, Setaria italica
  Peptide Sequence Number=SeqID_101032
tagacaagcaaacaggactggttttcattacattgtaaaaaaaactgtttgaaaaaaggttaattataaacatacaacccatcgtgacatgagatcggtgaacaggccaagctaatcatattaggctcagcactgggttctaagaagggacacggatgaggacaaagcatgaataagaacactgccattttccccattaaagtacaccattttctccttttctccttaagatatcaatcaagatacagtctgttgcaccggatatcagcagcatgtaacaatcagggctatgacggaatgtttacttattttctcaagccatatcactcaatcaacttaccaacctactaatcacatccgcgccttaggctggccgaggaacgggtagtccgtgtacccgaccacggggtccggcgtgtagaacgtcttccgcacgtacctgttgagcggcgcgtcgcgccggaaccgctccaccaggtccgggttggcgatgaacagccgcccgaacgacacgaggtcggcgtccccggactccacggcctccaccccgagctcccgcgtgtacccgccgctgcacatgaaggtgccccggtacgcgccgcggagggcgcgcatcatccggctctcctcctcggcgctcccgtgctgccccgactccgtctgcccgtacgccgtgtaccgcggctgcgtcacgtggaggtacgccagacgcccggcctcctgctgcagggcgttgagacggtccaccacggccaggccgagctgcagggggttagagtcggaggcgtcgaggtggtcgatggctggggacacccggacagcgacgcggtctgccccgatggcggagaccacggcacgggtcacctccagcaggaaccggcagcggttggagagtgagccaccatactcgtcggtccggtcgttgatgccgtccttgaggaactgatcgattaggtagccatgggcgccgtggatttcaatgccatcgaaacctgctttgatagcgtttatagcagattggcggtattgttcaactatttcaggtatctccgacgtggcaaggcgcctcggcgttggatacttgccgtaggaaccatcaggcatcagtatcctccatcttgacgagattggcttatcagttgaggatattggggcagcaccacctggctggtaaacttgatgagaagctcggcctacatgccacagttggcagaaaaatatggctcccttggcatgaacagcatcaaccacttttttccacgcatcaatctgctcttgattgtatatcccagggacacgaggaaaccccggtccggccggcgagatgatggtgccctcggagataagcaggccgccctccgtggaccgctgcgcgtagtactcctcgagcgcgggccccgggacagcgcggggcgccctgcaccgcgtcatcggcgccagcacgacccggtgggcgaggcggaagcggggcgtctggtacggcgagaagagggtcggccgcggccgcgggtcctccgccgccggcgagcgatccgcggaagccatcggtgggggggaaggggaggggaggagaggggaaaggggagggtggcgagaagcccggttataggagggag

SEQ ID NO: 35059 - DNA, 411 bp, Setaria italica
  Peptide Sequence Number=SeqID_101033
atttcatcagtagaagaaggtgtcaaagtatataggaaattctatacagaggaaagggaaaactcttatggagtcttagcaatatctgtttcgaagccatcagctcagccctacataattatgactgatattcttgccggattgggttatgatggattgggtcgactccttgctatggccaaaacagctggaacagttccagatggattacctccccgaagatctgcactgatatcatcttgtatgagactacatcaaccaaatgagtaggaaaggatggtggggcgaatttaatggaagtggtaaagatatggtccagcttggtactcatcccctgttggaggttactgttatggtctatttcattgttgcatcatttgtcttcagattcgaacaagaacaaactcacat

SEQ ID NO: 35060 - DNA, 1173 bp, Setaria italica
  Peptide Sequence Number=SeqID_101034
tattttgtcttccgttctatccttcctcttccttcccctgcaaactcctctcttgcccattggcaacactgaggtttgaaagatggctatcttggttatctcggtggacctggaatgctgccgctgcagagccaagatcaccaaggtcctggactgcctcaaagaggagttctgcatcgagaaggtggagttcgaggagaagctcaacaaggtgattgtgcgcggcaagttcagcggcgagcagctctccaagaagatctggtgcaaggccggcaggatcatcaaggagatcaaaatcgtcgaggtctggccgccgccgccgcccaagccggacccccctaaggaagatccaaagccagagccacccaaggaagaacccaagccacccaaggaagaacccaagccggacccccctaaggaagatcccaagccccccaaggaagatcccaagccgcccaaggaagaacctaagccgccgccgccgcccaaaccagaggtgaaatgggtgccatacccgtaccctctgccgtacccgtggtcgccgtcgcagagctggccgtgctcgtgcccgccgcagcggccgtgccagtgcccgccgccgcggccgctgccgtggcctcctctgccgccgcactgcacgtgctccaagaatgacgacaagcacgacaggtgcagcacctgtggcggcgaaaggcccgacccgccggcaaagccgccgtgccagtgcggcgggaggccgccgtggccgccgtgcagctgcggtcccaacaaacagccgttctggtggccgccgccgccgccgccgccgggggtcgtctacccgccgccgtggtgcaatatcgtcaccgaggacaacccgggatgctccatcatgtgacaactgctgcatgctaatggcatcagcactctgctctagccgggtttcgatttcctctgctaatgggcctcggagatcgcaataatccgacactagtcggtgccgttcgtgtacactctgaagctttttgtggttggtccttgcgtcgtgttgccatttgggttgtgcagtgtgtgcgttgtacgttcaaccttatttactttcttcaaaaataaatacatgtaacaccaatgtatttaattattcgatgttatgttggtaactgtatgagttgttcaaaaaaaaaaaacagagac

SEQ ID NO: 35061 - DNA, 428 bp, Setaria italica
  Peptide Sequence Number=SeqID_101035
taattttttctgggcctgtatctttttctaggttcattaggattcttagcggttggggcttccagttatcttggtaagaatatgatatccgtacttccatctcaacaaattctttttttttccacagggggtcgtgatgtctttctacggaatcgcgggcctattcattagctcctatttgtggtgcactattttgtggaatgtaggcagtggttatgaccgattcgatagaaaagagggaatagtgtgcatttttcgttggggattccctggaataaaacgtcgcatcttccttcgattccttgtgcgggatatccaatcaattaggattcaggttaaagagggtctttatcctcgtcgtatcctttatatggaaatccggggccagggggtcattcccttgactcgtactgatgagaagtttttta

SEQ ID NO: 35062 - DNA, 333 bp, Setaria italica
  misc_feature (1)..(29): n is a, c, g, or t
  Peptide Sequence Number=SeqID_101036
nnnnnnnnnnnnnnnnnnnnnnnnnnnnnagttaacagggtctttgtgcccaatgcgtgtggacgtatatgctgtcagatccatgataaacagatataatgagtaaacaaaaaccatgatgaacccaatttttatttggaagtaggagatatgtacagatctttcaggaaactcgacaggatgttgagggcttgaggcggatgaaactattaatacattccaataatatacatcttacttccaaagttacaaaactcaatccagttgctgtgcgttctcaaagttgagactaccataatcccttagtatgagcttgcttctcaagataatcct

SEQ ID NO: 35063 - DNA, 289 bp, Setaria italica
  Peptide Sequence Number=SeqID_101037
ttgtgaagatgatatgtggagatttgtttataaaaatactctaatgctgttataatttactgagtttaattggtatagtggcaacagaaaatagtgtttgatcactttttttttacaagtcgatccctctacaaagacaacttgaccttttgggaacaatctctaaatttgggaaagagtcctcattagatacagagcaagaaaagtataaacatcaattgacagctgtcttgtaattcacgggtaaacaattctttttgccatcaaatttaacaaacacaagttaaag

SEQ ID NO: 35064 - DNA, 425 bp, Setaria italica
  Peptide Sequence Number=SeqID_101038
aagaagagagcgagctgatcaagaagaaagaccatccaaggagtgaagatcttgtaggagaatcagaagctaaggttgtcagagtctagaagttgatgccacagcctgagatgaagcacggcttgctcctgcaacacgcaatgggccttggttcccatcacagcaccacagctcgccggccacagcaccatggccggttcgccgtcggcggcccatcctgcacaagccgctagggtgaggtgacaattacaagagaggaagaaatcgaaggggaaaaatggataaatagcatccagaacccttgtagacttgagttggagtagtaatcgtccaagaacttacagccatggctgtggatttgagggcagtagcttgagaactgtaggcgcagggagaggggaatggggaaaagaaacagaggaaag

SEQ ID NO: 35065 - DNA, 746 bp, Setaria italica
  Peptide Sequence Number=SeqID_101039
ttttttttttttaggtttttttttgggatgatccgaacctttgaatccttcattagatcttaacacaccgaggaccgatataaaccttgttgaacaaaggtaaataagacacacagacacgctgacaccggcagaacaaatcagaaggccgggctagctggattaacgagacgatggatttcttacaccaggactaaccaaaagtccaaaacacacacgctctttattcatgaactgcgcctggtgacacgagggttggaaaagggcggcggcagctagtgagctagccatatgcatggcccggccatcatgcatctcgcgccgggcacgcacgggcggcagccagctagctcactcacggcagtgcgtggtgcagaagcagcggcggcggaagccccggcacttgccgtccgggaagccctcggtcctgcagacgttggcgcagttggccctgcgcacgcagggtccccggaacttgtggctctgcgacaggcacgtacgcgcctccgccacgcccaccggacctccgacctctgtggccacgagcagcagcaggacgaggaggacggccgagaagagcttgcgagagagctccattgcgagcttgcttgattctttcttccaccagtgatgatctcaggaatggagatgaagggaggctacttgtggagcgagctggggtgtggctgtcctaccttatatagtcgtagtagtccggtactactacgttagttctttgtttcttt

SEQ ID NO: 35066 - DNA, 385 bp, Setaria italica
  Peptide Sequence Number=SeqID_101040
aacataaccatatcatttatttggttatacattcgaatctttgtgatgttgttaaatactctgtacccattggctattggaacttaaaagggaaatgatatcatgtagcagtgttcattgtaatgtgttaaaaacattgtattcttctcctagattttatttacaccttcgatcacctttcaacatgagtgcactaattggatttccatcaagtccatattaccatttcccttgaccagttagtgttgctttgttcattaccatttttctagaaggaactatgaacagggaggaggggaggatttgatgcatatcaggagattaaagttcagggatgatacattggaggtagaattaaatagacttatcagttgctctgaatgac

SEQ ID NO: 35067 - DNA, 374 bp, Setaria italica
  Peptide Sequence Number=SeqID_101041
taacttttggtccaagtggggaaggctgaggttgtcagtgcaagagggagaggaagtggggggcgggggcttcatgagtggtgctggtgaaacagagcttcaactacaacggaggagaatccaagaacgtcgtgtgaaattgttaactcaaatcgaacatgtacgccgtactagagcaatacaacgttcaggtcggaaaaggcatggtggctcatttggtcaagagcttgtaactgttgcagtagttggatatacaaatgcgggaaatgcttccactagctgtattggtaagtctgagatgaagccaacagtatcactaagaagtgcttttctccctgatggaagaatcacacttcgtaagcggggatctactg

SEQ ID NO: 35068 - DNA, 996 bp, Setaria italica
  Peptide Sequence Number=SeqID_101042
gcagaaagaatatcaagatactctttgaatgatggttgatataagtcgtacaacatgcataagtgcatatccaaaagcattgcataatttccatatctactggaggcaaactcagaaaccgagtggtatactgctattgatctcagcactaaatggacaggggaaaataagatacaacatacctattgttctgcagccttttcgccatccatagaggaagaaggtctccattttctatcgaaaggcccatagcttctttgcacaacattttgttgttcagtcagtttcctatctatcaatgccaacaactcttgcaatcctacccctgtcacagcagaagttttcacatgacaactgggcatttgttgtgtcaaagggtgtccaattgcatctgggacacaaagctctccaaaacattctttcgatgataaatctgggttcattgctttcatctcagatgactctttagatgatacttcatcattgttatcttcgaatttttcttctgataaatattctgaatctgctccatcatctaaggaatccaaagatgattgttctgatggaacgccatcttcagagaacatgtcatcctcctcttcaccttcagtcaggaagatctcatcttcaaccccatcagatgcagcattctcatccacgagatcaatcttgttccaaacttcaatcatattgttgatcttctcctgtgaaacacctatctgctgcagtacttgcaatacagtagatcgatgctcctcaagattaggtgcacttgaatccaaaacatgcactaacatgtctgcttcaaccacttcttccagggtggcatgaaatgcttccactagctgtattggtaagtctgagatgaagccaacagtatcactaagaagtgcttttctccctgatggaagaatcacacttcgtaagcggggatctactgttgcaaacagcctatcatcactgtacagggcagtttcagaaagtgcactcactagt

SEQ ID NO: 35069 - DNA, 590 bp, Setaria italica
  Peptide Sequence Number=SeqID_101043
cggatggcggggtcgctggtgaacgccgcggcttcctcgattaactatgtttcaagttcagtcagcagtattcttgaatcctccaacagtttctgtctgccagcatatgtgcctaacctggcatttaacaagaagcagcaagcatggttacgtgaacttgaaaactctggagttgttgctgatctaaaggtaatagactgtagtactcattctgcgtttgaaagtacgacaactgattgcccacgattgacaaggcaacatgatcttctgtaagcaaagtatcgaaaattatatgtcacttctcctttaaaagcatattgtctatgccttttgttctttaatgcagcttgatgacacaattgtctagtggtatgattcagtgctatgtctacattgaagtgaaaaacaagtatgattgtatgtttaaggcaaatcaatgtagtaaatgaaagttttagtttccaccttactctgagaatctcgcggcacttcttatataaaatatttaattcttgacggtttaccttgggattgaaatctcaaggaaaaagcattttgccaactaacctaagccttgtttaagaatttaa

SEQ ID NO: 35070 - DNA, 1374 bp, Setaria italica
  Peptide Sequence Number=SeqID_101044
tagaattaacctgatatgccaatgccggctttccgcaatgtcattgatgtgcctctcattgtaagaggattgcgcaaatctagatctgaggtgaggaaggaacttggacttgaggagaatgctaaggtgctcatcattaagtatatgtaacatgcttcttcaaaagctttgatccattcttctattatgtggctcaaagtttttatgtgaactacacaatacttatcactaacataatgaaatacttggtgtgctgttgcccccagccagcaggatggaaactgaagcaagaatggctccctgatggttggatctgtttggttgtggtgcttctgattctcaagaggttccaccgaacttcattaagcttgcgaaagatgcttacacacctgatgttatagcggcatctgactgcatgcttggaaaaattggatatggagctgcaagtgaggttttagcttataagctaccacttgtgtttgttcacagagattactttaacgaagaaccatttttgcgaaatttacttgagcactaccaaaacagcattgagatgatcagaagtgattttcttgctggacactggaaaccttacttacttcatgctctcacacttcaaccatgctacaatggcccaataaacggcggcgaggtggttgcccagatcctccaggacactgctattggaaaggaatgtatttctgataaatttaatggtgcaagaagactgcaagatgccatagtgtcagggtataaacttcaaagggctactgggagagatgtaagcattcctgactggtactctctgtcggagacagaaacaagtgctggtctgacctcaaaaaatgttgcaacaaaggaaactgcagcattctgttttgaagactttgagatactccatggggacctgcaaggattaacagatacgatggaatttttgaagagcttatctgaacttgatggaaataatttggagagccctgagaagcaacagcaagagagaactgctgcatctgttctctttgactggcagaaggaaatatatatagcaagggcacctggacgtttagatgtcatgggtggcattgctgattattcaggaagtcttgttttgcagatgccccttcgggaagcttgccatgttgctgttcagagaaaccaccccagtaaccagaagctttggaaacacacacaagcaagacagctcgagaatgcaggcctggcaccagtgatacaaattgtatcatttggttctgagttgagtaaccgtgcaccgactttcgatatggacctgtcagattttttggatggtgaaaaaccaatatcctatgagaaagccagagagttttttctgtcagaatccatacccaaaaa

SEQ ID NO: 35071 - DNA, 554 bp, Setaria italica
  Peptide Sequence Number=SeqID_101045
taaaaaccttttacctcaactttcatcatcaagaacgcgctccatcaaatagacatcacagaattttgcaatttctagaagaacctccataacagaaggcctcactgtgacatggttctgaagctcctctggagttgtttcctccaaaatcacaccaagtaagcggcatgtgacctaaaaatggaaagcatctgtcagtataacactactctacaaatctgataaatctagcgagaaagaagttatagcagagtacccttcttccttcgctcagcttatgcctgacaagctgctcaagagtcaaatttactggctggaaaagctgattgactgcttcatgtgctcttgaatctgctgatgaacaaacatctgttgcagctaaagcacctggtcgcaatctactgctggtgttgctagatgaaggggcagccctcctacgaggcctccgaggttgctcttgaggagctctacaaacaattttaccaaggacaaaacaagaaagtagtagaaccgaagaattagacaagacaaagtagtaaagtaaagaacgaaaa

SEQ ID NO: 35072 - DNA, 1078 bp, Setaria italica
  Peptide Sequence Number=SeqID_101046
ttttttttttaagtttaacggtttaaaggtttaaagtttaactttaaggtttttagtttaactttaaattttaacttaattttagtttttggtttattactttattactattgtaactactaacttcatacatcaagtatgcaactacagatgctatctccttgcatagctcatgccttatggggcatcgtctccttgcatagctcatgcctatggggcacattacagagggggttactagtacatgccacaaggcttttacacatgatacaagaaaatctagttccaccattcaagcgagaagaaaaaatgaacaatgatgttctcagttctcactaaaccacggctttgttggattgagtttgatctgcaggtaaagaataggcattagggcatgtctgctaggatcatgtctcatgttgtcttattgtttggaagtctatgctaagtataagagactaatacctctaatcatctctgatccaagcctccaaaatactgctccaagctcggggagctgaaaacgttggatgctattctttctggttgctgcggcgaaatgtgcagttgatatttgataaacctagataattggtgaacaatttccggacttgtgtcaatgtgccaatcaggctcgagttgccgaacaaaagatgtacggccgttctctgtactacagaagagaaccttgtcatttatcaaggcaccattagcaaaagtccagcttcgctcagggcagataaaaccttttcctgcagacatcattcaaattctaaatttgacaatgggtggtccatgtagatggtaatgtaaacactatgaaatccaaaattgtaaaccaaagtgctattgattcatgtgcactcatcacaaaaacttgttgctacttagtacttacctcactttcatcatcaagaacgcgctccatcaaatagacatcacagaattttgcaatttctagaagaacctccataacagaaggcctcactgtgacatggttctgaagctcctctggagttgtttcctccaaaatcacaccaagtaagcggcatgtgacccttcttccttcgctcagctt

SEQ ID NO: 35073 - DNA, 1352 bp, Setaria italica
  Peptide Sequence Number=SeqID_101047
tttttttttttttagtaactttagaacgtatgacgggaggagcaggttgacaattaacaattgttttggttatacttatacatgaacacaactcatacatcaagtatgcaactacagatgctatctccttgcatagctcatgccttatggggcatcgtctccttgcatagctcatgcctatggggcacattacagaggggttactagtacatgccacaaggcttttacacatgatacaagaaaatctagttccaccattcaagcgagaagaaaaaaaatgaacaatgatgttctcagttctcactaaaccacggctttgttggattgagtttgatctctaatcatctctgatccaagcctccaaaatactgctccaagctcggggagctgaaaacgttggatgctattctttctggttgctgcggcgaaatgtgcagttgatatttgataaacctagataattggtgaacaatttccggacttgtgtcaatgtgccaatcaggctcgagttgccgaacaaaagatgtacggccgttctctgtactacagaagagaaccttgtcatttatcaaggcaccattagcaaaaagtccagcttcgctcagggcagataaaaccttttcctcactttcatcatcaagaacgcgctccatcaaatagacatcacagaattttgcaatttctagaagaacctccataacagaaggcctcactgtgacatggttctgaagctcctctggagttgtttcctccaaaatcacaccaagtaagcggcatgtgacccttcttccttcgctcagcttatgcctgacaagctgctcaagagtcaaatttactggctggaaaagctgattgactgcttcatgtgctcttgaatctgctgatgaacaagcatctgttgcagctaaagcacctggtcgcaatctactgctggtgttgctagatgaaggggcagccctcctacgaggcctccgaggttgctcttgaggagctctcaacattttccaggcaaacagaagtgtgaccgagattgcagcaagtgtagtaagcgaacgaagtttctggcgatcgaggtcgaaggggaggcgatcagcgtagcgcgcgagggcgtccacgaggcgccgcaccagatcggcgagctcgtcgtccttcccgcccccggcgcctgcccccgccgccggggccggggccgacgccgacgccatcgccgctgacgagaggagaacggggtgggcggggagcggcagcggaaaccctaacggcgcgcgcaccggcgagaggggaggggggcagtgtaatttcgggtattgtacgaggggggtggggcgcgagatgtcggaccacgacgggga

SEQ ID NO: 35074 - DNA, 1248 bp, Setaria italica
  Peptide Sequence Number=SeqID_101048
tttttttttttttttcgggacgctggagatgtccagctggagatgaatttacgtattgttcacatgtcattttctaaatgtaaacaatcaagttatgatcaaactgtcattacgaaaaacaaatgacaacaaaaattagagagaaaaaaagcagtggcatatgcccaggaagggcaaaatgccaagctgtaatagccatttctcctactgaatgttgccactacatgtatccttgtgcagcataaccgaagcaaacatcatgccgcacacattcttataatcaccttgaacaacttcaaaatgaaatccggaagcacaacaagctcaatcagtagcaactttcttccttgctgcccttgcgttatcatactcgaacttaagcacatccggaatatgagacgtatccttgatgtacaaccatctcccaatcgcactctcctcaatcatggggaagtaatcaacaagcatggtgttgacaatccagtaccagatagcaccaaagacaaggcccactactgctcccgcaaaaacctgcgcgacggtgtggtaccctaggtacaccctggacagcatggtgaggaaggcgagcggccacggcacggcggcgatcacccggcgcgcggtcgaccggcggagcgagaggagcgagaggtaggtggcgaagaagaacatgtactgcgagtgactggacggccacccgtgggagtcgcaggcctcgaggaactcgcagtacgccgggcgggactgcgcgacggagtgcttgatgagctcgttgagggcctgcgagacgaggagccccgcagcgaagcagaggccctggagctcccggcggaagaggaaatgggagacgaacccgccgaggctgatgaagaccgggatgagggagacccacgcgaggaagaggcccagatggtcgcccgggcggtaccggacgtgcgtcagcgtgatggccttcagcgacggcggcaccgacgccgccatctcctggtaatccccggccccggacatggtcgcgctctcgcctccccggcccgcgtcgcggaggattggatgggtacttggtttcccggcggggaggttcgggattggggtccggcgggttgattcgatcggcgccggctccctgctccgattggcgtgggggtcgcggggattggcgccctctgcgtgttgtgttgctgggtgggggacggaacgcgtcgtggagcgggacggacgcggacgtgccagaagcaaagaagggaggcg

SEQ ID NO: 35075 - DNA, 414 bp, Setaria italica
  misc_feature (372)..(372): n is a, c, g, or t
  Peptide Sequence Number=SeqID_101049
tcgcggacacggtcacggaagtcgtcgggaggccgagcaccgcacggcagtggtggagcttcgcgagcggcacgcggcggtgggcggtgagcatgaggagcttccggaccgcgcgcacccgcgacgggaggagctcgtcgtggatgcggcgctcttcctcgaggagcgagcacatgagcggcgtgagcgcgaggtgcgggacggagtccacgacggggaggtggaacagcagcgggtggcgcgcagcggagcgagccactttgcggccgcgggggaagccgagctcgtggtgcagcttgccggcctcggagagggggatccggtgcggaggcgggagggaagccaggaacgagcgcgcgcggtggaggaagnggaaggccgtatcgtacggttcgtaagtactaacggtacgta

SEQ ID NO: 35076 - DNA, 1305 bp, Setaria italica
  Peptide Sequence Number=SeqID_101050
gggagggagaggagagggacggcggcggcggcgaaggcaaggccgccgcgccggcggtgctgaggtcgtccggcacggtgtggggcgagggctcggagacgttcgccgccgtctgctcgcgacgcggcgagaagggcaccaaccaggactgctccatcgtctgggagggattcgggtgccaggaggacaccatcttctgcggtatcttcgacgggcacggcccgtggggccactacgtggccaaggccgtgcgcgactcgctgccgccgtcgctgctgtgccactggcaggaggccctcacgctggcgtcgctcatcgacggcgagaagaggctcagcgactgccggttcgacctctggaagcagtcctacgtggccgcctgcgccgctgtcgacgacgagctccgccgcagccgccgcctcgacgctgtctacagcggctgcaccgcgctgtccgtcgtcaagcagggggacctcatggtcatcgccaacgtcggcgactcccgggctgtcctggcaaccacgtccgacgacggcaccgtcgccgccgtccagctcaccgtcgacttcaagcccaacctgcctcaggagaaggagcgtatccggcggtgcaacggccaggtgtactgcctcgccgacgagcctggcgtgtaccgtgtctggaagcccacccaggactcgccggggctcgccatgtcgcgcgccttcggcgactactccgtcaaggactacggcgtcatctcggcgccggaggtgacgcagaggaggatcagcagcagggaccagttcgccatcctcgccaccgacggggtgtgggacgtgctctcgaacgaggaggccgtgcagatcgtggcggggacgccggagagggggaaggcggcgaagcggctggttgagtgcgccgtccgcgcgtggaggcgcaagcggcggggcatcgccgtcgacgactgctcggcgatctgcctcttcttccactcgccaccgtcgtagcaggcgtgcgcgacacgtagacgtgcctgatcaatcgacgtcaacaaaatgcacatctcaagactacgagcatcgtgcccgtcgcgttcgtggtagggagtgcagttgtcgccgtcaacgattcagaacgtgcagctcgtcgcatgatcgcgacgctgcacggttcagacttgcagctggtggatgaccgaaccaaaaaaaaaaatctccggctttcacaccggattgtcaagatgtacgagaacgaacatcagccaccagaaaagtggggaaaaagatgcatttgtcctaacaaaaaaaaaaaaaaaaaacaaac

SEQ ID NO: 35077 - DNA, 948 bp, Setaria italica
  Peptide Sequence Number=SeqID_101051
tacactattcgtcgtccgaaaacgtgcaagtgtgaaaataatgttgagtacataactttggagccaatttctggaaaaattttcttgtaagtgagcagatatttttggacattagtgaaatatggactatggagaaggtaaatgaaatgttgttgtccagaaaaagtggaaggtttaaatttaaaatgaagcccaaaaccagcaaatgagcagatttcaggcttctcgctgaaattatcctaagtctgaaaaacagcattgattaacaatgtttggggccaatttcagaaaaatccagtgtgtaagagataggttattatgtgcaaaatggaacctttgttgtatgttggactaagatcagtggaagttgggcaaggtaaagtgagtttgggtagttggaatcgaatccaaagtggaggaaatggctctgccgagaggactgacgaaactgaatcattcgattcagttacagtctcgggttgtcaggaactttggagctcgaattcacggtcttagagtgatcctttcaatgcgaagcaaaaataacaaatggagtacttggattactctacaagtttacttaaaggagttttacgagttgagatagaaaatttcgagtaagggaggcctgaacatgtcggttgggaagggataaaaggagaaaaggaagaacagaacagagatggcaggagccgtgccgccgctggcacttcttcccaccagccagcgcgacaacctcatccacgccacgcacgcccgtgagccgtcgaggtggccttcatgcacgcggtgaatacttgaatatataccgctcccacctcatccgtttaccctgccgccagtttcaccgaaacgagcagagcacgacagtagcaccgccgccggccgattccaccgcgccgccgctcctctcctcgattccttctgcccgaagctccgctagcacct

SEQ ID NO: 35078 - DNA, 869 bp, Setaria italica
  Peptide Sequence Number=SeqID_101052
attcaacactgaaatcttagaatcacataaaaaagtaaagctcctcagtacacattcctacaaggctacaagcctagaactgacaggaaggttgatatgaaatcagagataatgttctcactgtcaccaaatgtatcacatcctccaattcactgcctttgacagtatagtggagtacacattgaggcttcagtcaatcctattcatagtggttgccctgcccaaaaatggaaaaaacaatgcaggataaccaacctaacaagagcaacaaaaaggttatagtggcataatccttccttctggtatttttctgtcaactcgaccaatcctgttgggtggccagactacatgcgtgactctgccttgcatcagacccagaggaacagggccgtaggttctcgagtccaagctgaggccggcattgtccccttccacccagcagtgcccctgcgggatctgccggatctcttgcttctccgggacctggatccaatcccctggcagcgcaatcaacctcttcaccaccatttcgcggtggttcctcggcgaccggaagacgacgacatcgccgcgggagaggtcgtagcggtagaggcatcgcttctccaccagcgcgcgttcgccctgctgtgcgtccaaggtggggtacatggagcggccgtcgacggcgatgacggaggcgcaccagtcggcgaaggtccggccaagcaagctgccagtgacgcaggccttcacgaacggccaaacggcggccctcgccatgtgcggagagaaaattcaacccgcgggaggacagcgccgcctcctccgccgacgggacggaaccatcggcggaggaggcggcgctgtcctccgccgatggttccgtc

SEQ ID NO: 35079 - DNA, 804 bp, Setaria italica
  Peptide Sequence Number=SeqID_101053
ttggtgtaagttgttgcggcttgccgagtgagaacggaatcattccttctagtgaaaataatctttgctaaagcgacatgaaggacacgattaaagcaatttggtgactcgacctaacatgtgcatatcttgttcaaggttgatgctctttatttctttctccgtcacggagataccatcacctaactgccgcctactgataagcataaccaaatagtagatgatttcattgtttcatctctgaactgaaccgcgtgacagatgaatccaacagcaaggttagtaataattaccgagctgtagagctggaatgctctgccactagcctcaattgcaacactgacgggctggtgtgcaacggccttctgcagactcttctcgctgttcaccggtacccttacaaggccaaaggacaaccggtgtgacgtcaacaggaaaaaatgcaaaggttgttacgatcgacagctatgaagatgtaccggtgaacagcgagaagagtctgcagaaggccgttgcacaccagcccgtcagtgttgcaattgaggctagtggcagagcattccagctctacagctcgggtatcttcaccggaacctgcggaacagcgctagaccacggtgtcacagccgtcggctacggtacagagaacggcaaggactactggatcgtgaagaactcgtggggcggcagctggggcgagaaaggctacatccggatggagcgcaacgtcaagtcgtccaagacggacaaagtagacggacaatacgaccgtaggaagaccctacgtaaccctactagaaagaa

SEQ ID NO: 35080 - DNA, 709 bp, Setaria italica
  Peptide Sequence Number=SeqID_101054
ggcaggttccctgctgtacgttgcagacggggtagtcatgggggcagcagctgtagtggtcatcgcagcaggtggcgccctcgagcgggcagcaaccccaggcgaagcagtacttgccgtactcgtagatgcagcagcaggtggtgctctccgggcacgagtagtagttgtcgcagacggtcggcggcgggtggggacggcggcgtcgggccggggttcgggggttggcgcccttcttcagagggtacgaggggctccacggcgatgccgcacttgccgctggacgacttgacgttgcgctccatccggatgtagcctttctcgccccagctgccgccccacgagttcttcacgatccagtagtccttgccgttctctgtaccgtagccgacggctgtgacaccgtggtctagcgctgttccgcaggttccggtgaagatacccgagctgtagagctggaatgctctgccactagcctcaattgcaacactgacgggctggtgtgcaacggccttctgcagactcttctcgctgttcaccggtacatcttcatagctgtcgatcgtaacaacctttgcatttttcctgttgacgtcacaccggttgtccttggccttgttaagggttagttccttccttcttgttgttcgattccaccattgttgatgatgaactgaaaagcataagtaccaatacaagaacctaccaa

SEQ ID NO: 35081 - DNA, 681 bp, Setaria italica
  Peptide Sequence Number=SeqID_101055
aggcaggttccctgctgtacgttgcagacggggtagtcatggggcagcagctgtagtggtcatcgcagcaggtggcgccctcgagcgggcagcaaccccaggcgaagcagtactttgtccgtactcgtagatgcagcagcaggtggtgctctccgggcacgagtagtagttgtcgcagacggtcggcggcggggtgggggacggcggcgtcgggccggggttcggggggttggcgcccttcttcagagggtacgagggctccacggcgatgccgcacttgccgctggacgacttgacgttgcgctccatccggatgtagcatttctcgccccagctgccgccccacgagttcttcacgatccagtagtccttgccgttctctgtaccgtagccgacggctgtgacaccgtggtctagcgctgttccgcaggttccggtgaagatacccgagctgtagagctggaatgctctgccactagcctcaattgcaacactgacgggctggtgtgcaacggccttctgcagactcttctcgctgttcaccggtacatcttcatagctgtcgatcgtaacaacctttgctatttttcctgttgacgtcacaccggttgtccttggccttgtaagggtagtcctcctctgtgtcgattccaccattgttgatgatgaactagaaaagca

SEQ ID NO: 35082 - DNA, 961 bp, Setaria italica
  Peptide Sequence Number=SeqID_101056
tttgcaaggaagctctgatcaccgtggctgttggtggcctgataccatgctgagattgcttcacgcgctgctcttcatgccgtcagctgagttagaccaagaagaaaagcccaagtgcggcttggccagggtgcgcttcagagccttcactgacagtgggctgtccttgctcgtgaggcaggttccctgctgtacgttgcagacggggtagtcatgggggcgagcagctgtagtggtcatcgcagcaggtggcgccctcgagcgggcagcaaccccaggcgaagcagtacttgccgtactcgtagatgcagcagcaggtggtgctctccgggcacgagtagtagttgtcgcagacggtcggcggcggggtgggggacggcggcgtcggggccggggttcggggggttggcgcccttcttcagagggtacgaggggctccacggcgatgccgcacttgccgctggacgacttgacgttgcgctccatccggatgtagcctttctcgccccagctgccgccccacgagttcttcacgatccagtagtccttgccgttctctgtaccgtagccgacggctgtgacaccgtggtctagcgctgttccgcaggttccggtgaagatacccgagctgtagagctggaatgctctgccactagcctcaattgcaacactgacgggctggtgtgcaacggccttctgcagactcttctcgctgttcaccggtacatcttcatagctgtcgatcgtaacaacctttgcatttttctgcgatcaacccaacacacaaaagcaatggtaagtaaaaatgttgctggttcttggaagttcaagggaaaaccatggaggcgaaaaataccctgttgacgtcacaccggttgtccttggccttgtaagggtagtcctcctctgtgtcgattccaccattgttgatgatgaactgaaaagcatagtccatcagacc

SEQ ID NO: 35083 - DNA, 1380 bp, Setaria italica
  Peptide Sequence Number=SeqID_101057
ctaaattcaaaaaaaaagaaaaagaggaaaaaattgcaatggatttaaagcgagaacttgttcttaagtaaatcaattgggagatgcttctcgagagtgtcccatataagttttccatcttccatacgaaaactttcaattcgcataagatcctcttcagtcttactcaaaaggtccaatagtgtatgtatattggcccttttgagacaattatacgttctagaaggcaattctaattgatcaataaaaatacaattcaatggaattccttttttgtttttctttagattagtgaatcttttttgaaaggttaaaaggggtggagtaaatctgtttttattttcttcgaaactagtgccctcttcctctgcgtgtagaaaaggaagaaataaatcaatcaaattacgagaagcttcataaagcgcttctttaggagttaaacttccattcgtccatatttctagaaaaagtatctcatgtttttcatttccattcccacaagaaaaaatactataattcacatttcgaacaggcatgaatacagcatctataggataacttccatcttgagagttctttctgagttccgtatgatatccgcgatctctcttgatctgtaactcaatatagaaatcaatcggctctctcaagttagctataggttgtgtcgtatcaacgatttctacggaaggcggtaagattatatcttgagcggttatgtatctaggacctttgacgcaaattgatgcgtctctaactccatagagattacttctcaatacaatttctttcaaatttagtaaaatttcttgtatggattcttcaatacctactattgtagaatattcgtgtggcacattcccaaatttggcgcgtgtgatacacgttccttctatttctccaagtaaagctcttcgcaaggcaataccgacagtatccgcttgaccttttctaagcggggacagaatgaaacgaccataataaagacgcttactatctactcttgattcaacacacttccactctagtgtttgggtggatcctgttacctcctctcgaaccataacggactagtattattatttgatcattgaatcgtttatttctcttgaaagcggtttaattcttttacagacgtctttttttaggaggtcgacatccattatgcggcataggtgttacatcgcgtatacaacttaaccgtacaccacttttagcaatggctcgtaatgcggcgtctcttccgctaccagcaccttttaccataacttctgctcgttgcaaacccactgtacgaatagcatctactgctgttctttgaccagcatagggtgatgcttttcgtgagtcttttgaatccacaagtacctgcagaggacc

SEQ ID NO: 35084 - DNA, 481 bp, Setaria italica
  Peptide Sequence Number=SeqID_101058
taatcaagtagtcgctaatcagcgacaacatcccctccctttctcccatcacctagtctccaggatatgaagaactcgcatacagaggccctggggatccgtcaccagcctagacgaaccataacgcggacgggacgcaccctgaaacgccctgtcgtctcgcgacagaacgattccatgtaaagcacgtcgctatcaattcgatccccttctgcatcactctctaccaaccacgtcaatctgccacaatccatcgccgcgcaccggccagaagcagccgattccactcgcggcggcggaactcctcctacggctcggtcctaggcggcgcggatcgcactcgggaggaaccagatgaaaaagcaaagacgggcgaagaggaacgtgggcggagcggggacccacccggagcagaggaagaggcaggcggaggagaggagccgcgggacggagcgccagtcccagccctcgcccaggtccg

SEQ ID NO: 35085 - DNA, 228 bp, Setaria italica
  Peptide Sequence Number=SeqID_101059
aagcaagcactattacaacgctagaggtttgtagcaatatcctatattgccacaatatatggtggttgcgaaaatgcctatgccgttgcaatatgcttaggacatatcacaacgaatacgcaggcgttgctatatgctaaaagccaattgcaacgtaatttatgtcgtcgctatatgcctaaagactatcgcaactaaatgcgtgtcgttgctatatgcttaaagggt

SEQ ID NO: 35086 - DNA, 257 bp, Setaria italica
  Peptide Sequence Number=SeqID_101060
atctcccttcccattcgcacacgcgcgcacggagacgaagagaccccaagcgcaaccgcaagcaacgcatccacccctccctccctccccttccatggcgcctctgctcctgctcttcatcctcggcggcctctgcgccctcttctccctcaccacctcctcgcgctccaccgccgccaagaagtgcgtcggcgacgtcaagtgcggagacgccggcaaggggagcgccagcgagggagaggaggaggaggcggcgg

SEQ ID NO: 35087 - DNA, 256 bp, Setaria italica
  Peptide Sequence Number=SeqID_101061
caattgccatgtaacaagcattcgtggtagctgctttttcctgaaagtagtgaaaattattgagcaaatgttctgactgttccaaagtgggaaaatgcatgagctcccgaaagacactttgtgcaacagaatcagattcctttcatattttctaaataaaaggttcaaatatggagaaggttcatgctagccaatagaaaatacaatatctagttatttcttttcgtaagattcatctcacttttgtagaacagta

SEQ ID NO: 35088 - DNA, 310 bp, Setaria italica
  Peptide Sequence Number=SeqID_101062
gtactagaagacttatacagaggttgtccttgaaacctgtctaggtaatctacaaagggaaagatcatcccttgcttaacccatccatagtccctgttatgcccaccacccggagtaaccgaagaacatgacgcagagtgcgtcagcaacacaggagttaagcacgacctccggggcatgcagaagcgggtcaatcaccagcgcaggccacgctgggcacttcttccccgacttcgcccacacgacatccccaagcacgaaatcctcgggccagtacaaatcctctttcttttcgatgacgtccctcttg

SEQ ID NO: 35089 - DNA, 1528 bp, Setaria italica
  Peptide Sequence Number=SeqID_101063
tttttttttttttttttgattcgtgtaagaatctgtactactatattttctttaatatatcgtgtcgtcagcatatacacaatgcttctttatcatatacaagggctcacagagagaggcactctgtgcagcaacaatgatgcactggccatgtagcaaaactaggcctgaatgcatgtgcttctctatctctgtccgaatagactcctaaataatctctgtatccgtgtatggtcaccacctcatgccccaattccgacgaacttcagcaggttgttcttgggctccttccagtagaagccgtggatgaagatgggcaggatgttgcacgcgatgaggacgtagatcatcagtgcgtgcatccccatccactccatggcgacggtcggccgccggtaaccgtagaggtcgaccagcgtgtagattcctgcgaagaggagaccggcggcgccggcggtggccaaggtgtagctcagggtgtacaacggcttgttcatatgcatgccaaagaaatccatggcgaagcccaggactagcatactgaaggaagggatcaaccagttcatgatcctctccctgtgtttctggaaatgtacaatgacgtgtccgtactggagcccgatcaagcatgtcacaatggccatcacggaactgagaaggccttcagggtcaaaaggagcctggcaccaagagggagcgtcaggaggaaggggcccattttgtggtgaattgatgctacattgcttggatcgcgcgtaaaccggtcgaccatatagatgttcgatgcctaagattttgcggtcgatcatgccaactgcattacaacctgggctggtgtcacctcttactccgcatttcaccaagaaggacttttcagtggaaccagggcctgatgtctgatactcccagtcaggaacataggtaccatacaacagggccatgtatgtgatcgccacaattgcgcctacgaacagttggtagcggtatctcttgagcaaatcgaatccataatctacatcttcatctcctttgagccaaatttcacatagagcagtcagcagataagctattgcaattctctgcagtatacccatgagccgtatttcttgaaggtcaaccccaaaagttagactacgtacaccatggaagaatccaccttgtagaacaagaccaagacaaaagagcttcagggcacggagcaccgcctttttcgtggcgtccaacttgtccggtactctcttgtacgcgagcgccagcgcgactccgacgatgaagaggaagaaaggcatgacgaagtcggccactgttacgccatcccaaggggagtgattcatggccggaatgaatgctccagcgtcatcgacgatgatcatcagcagcacggtgatccctctgaagacatcgagggagacgagccgctgccgcgccggcgccgtcgacgccggagaggtccccgccgcagcgcgcttcgggggcccgccgctgctcttggggaagccgccgccgccggcctccagatccaccgcga

SEQ ID NO: 35090 - DNA, 470 bp, Setaria italica
  misc_feature (367)..(470): n is a, c, g, or t
  Peptide Sequence Number=SeqID_101064
gcagacgccctaaggaagattttcatattgcgagaaaggatcgtaatcgcatctatggaagacctgtggattccaccaatgcttcaccattctgtctcatatccagtagtttcgttttggtattgtgagagaagagaaccttgtcagtgtgtaccactcatcctttgatgtgagaggggactttgttctgatgcaatgtacgtaaagaggccagggcctgtttttaactgtttggttgttaagttaggaaatatggataacttgtctcttcttgtctgaagtctggattcacactggactgcactcatctgttgcttctgtctgtgacctatcttatctggatcgtcagtttattcaagttgaattnnnnnnnnnnnnnnnnnnnnnnnnnnnnnnnnnnnnnnnnnnnnnnnnnnnnnnnnnnnnnnnnnnnnnnnnnnnnnnnnnnnnnnnnnnnnnnnnnnnnnnnn

SEQ ID NO: 35091 - DNA, 622 bp, Setaria italica
  Peptide Sequence Number=SeqID_101065
ttagaaattcgttggccagaacaaggttcaggagaagctcaagaacttcaacgatctcaccagtgcatcagtttcctacatgggagtaagctcaatcggaccactggatgaactcaagaatttggttccaaatctcaggcttcttgatttaactggaaatctgttctctcaatggcaagatatatcggctctttgtcacgctctggcatctctggaagttcttaatctgacaaacaacaccatggagaatgatgtcatagaaagtccaatgctagagaatatccatattttggttctcaacaactgcggagtaacatgggaactggttgaaaaaatcaaagtctcatttacatgtctcaacgaactccatctgatgtcgaataagctgaagacgatcatgactccagatggaaattttgtgcaaggtttcaatacattgcggctcttaaatttggaagataatcatattgattcatgggatgaaattgtgaaactgtcttatttaaaaagtttggaacaactccatttgaacaaaaacaggatcaagcatgtaaagtatccatctaatcttccatcagctcttgatgatgcatctgccgtgccatttgaaaatctacaagtt

SEQ ID NO: 35092 - DNA, 1006 bp, Setaria italica
  misc_feature (998)..(1006): n is a, c, g, or t
  Peptide Sequence Number=SeqID_101066
tcctttcgttccggttagatgatttcctgttgtatggtatttagggcctctttgatttatatggctggtcaaccctgttgggggatcagatcggataaatgacaatctaaagttgcttttccccctccatgtgaactgcagatttttctctgggttttcagagaaagtgttactaaatacttttattcttttttaatataaacatgtccaatagcaattcctaaagtagaatttttcagttctgatacttgtggtgcaatgtgacatgcagatatattcgccttgttatgggaaaaacacaatcaaatgacatagaagagatcaaacggctgcaccctagatttgctgaactcaaggcctttcattgtatcgaagatgagaagccaacttcaagcacatcgggcccgcaaaagatggcttctggtcttataagcatcaccttgaaatgtgtggggccgtctatgggtgaaaagcaaccattgacaaagaagctgcctgctacgacaactgttgggaagttgaaatcgctgtgcgagagcttctttaaactgaaagacataagggtaaaactatttgtcgaggaagagggatgccccctgccgcaactcctggaggaggacacggcttctctgatggagcttgggatcggttcgggagcaagcattgttgtggacgaagagagctagccggtcgtcatcgccatcagagcagggaacccagcaaactctgtcacgcaaactgattgatcttcattgtcctgtatattttttcttgagcaaatgtgcacttgccacttggtgaatcttgctgtgtacgtgtatggctgaaaaacgcatcagcattatattgtaacaacactgccaaggcaatggtttgttttccctttctccccttcaatttattaagggcagaaagtccgtattaaacactgtatcatcatcaatgtctaaatcatggaaacatgctgttgctgataaagttaaaaaaaaaaaaaaaannnnnnnnn

SEQ ID NO: 35093 - DNA, 870 bp, Setaria italica
  Peptide Sequence Number=SeqID_101067
tttttttaggttttttaaaatttttttagtttagtactaaaggttttcaatacattgcggctcttaaatttggaagataatcatattgattcatgggatgaaattgtgaaactgtcttatttaaaaagtttggaacaactccatttgaacaaaaacaggatcaagcatgtaaagtatccatctaatcttccatcagctcttgatgatgcatctgccgtgccatttgaaaatctacaagtccttttgttaggatctaatgagatcgatgacttctcttcagttgattctcttaacctcttcccaagtttaagggacgtcaggctttctgataatcctatagccgatcctgccaagggtggcgctccccgatttgtgcttattgctcgactaggaaaagttaaaatacttaatggcagtgaggtaagcccacgtgaacggagggaatcagaaatacgatatattcgccttgttatgggaaaaacacaatcaaatgacatagaagagatcaaacggctgcaccctagatttgctgaactcaaggcctttcattgtatcgaagatgagaagccaacttcaagcacatcgggcccgcaaaagatggcttctggtcttataagcatcaccttgaaatgtgtggggccgtctatgggtgaaaagcaaccattgacaaagaagctgcctgctacgacaactgttgggaagttgaaatcgctgtgcgagagcttctttaaactgaaagacataagggtaaaactatttgtcgaggaagagggatgccccctgccgcaactcctggaggaggacacggcttctctgatggagcttgggatcggttcgggagcaagcatgctaagtcatttgtttgttggt

SEQ ID NO: 35094 - DNA, 247 bp, Setaria italica
  Peptide Sequence Number=SeqID_101068
agcgaatagaagaccattcatagctcgataggagggtggatgaagcaagagcctgggaggcaagccagcaaatttgaagcgtatccatactagactggatggatattgccacgctaaggctcattatagatgctgtgctagcaattgaaaaggcatcggataatgttgagcagaacggaaaggattgtgagagcatcaaaggccgcgctgagaaggtcttgaagaacctatcacgggtcgagagcaa

SEQ ID NO: 35095 - DNA, 314 bp, Setaria italica
  Peptide Sequence Number=SeqID_101069
tcttcgagccggaaatagccattaccaaagctgtaaagcaagcaattcggggggaggctttcaccgcgcgcgttccggcgattgatgcgcccgccatggcgtccgtgccgctgtccgcgtcgtcgcaggccggcctcctcctcctcccgttgcccctcctgcagccgcccggcgccggcgccggcgcaggagcatgcctgcgctactgcctgccgaggctgcctccagggctcgcgagcgtgaggaagggagggctcatgacgctgccgctgccgctgccgcttctggcgccgccccgggcgcggaggggaagg

SEQ ID NO: 35096 - DNA, 3376 bp, Setaria italica
  Peptide Sequence Number=SeqID_101070
acaaattaagaacaggtcacatcgaacaaaggcgtgcacgtcaattttgattttctattgatcgagatcatcttctgtacagcaataactaccgaggtatgtactgcgtaagcactaaaaaggccaaatatgtacagcaccaggggccttgttatcttacccgctggagcagctatttccacactttgacggcaccatctctgctggctgatatcaacctctggcttgacaagttgaaggatgccaatgcaagtatagtatcacggtggcacccagcggagtctgcagcagccaaagcgagctgtgtcttgggtgtcaaaccggacaccgtggttgtttgcttgtacatttcctgaacgacttgtactccaaaactggatcttatatcataacactcattgtttccaactgctttctccaaaatatctccttttgccgaacggacttctttggccgagggaccagcgatacagaagctttgctcaggtctggcttgatcccaataacgaattttcaagtctgttcctccagtcaatagatcaccgccgggtaagggaagcagagagcgtatgcctggatggcgtacaggtgggtcgttcaattcatcaattctgtacttataattgcctggtcgtcttacatctttggtagttgacttgttaagaggtcttgatggtgtctttggcatcacagcttcattctcagtgcttgccgttctaaacacctggtggcagcttccattctcagcattccatagggaaacttcgttgcagccggcggcaacaaaaaccaatggccttccagcagaagatattgaacttggtggaggtataagcaagcacaatttctctatagggcttactgttgaatagtaccacgagttaacaggcagcaaaaacctattatcccacagggtaagggcacctcgtgaagaacctgagatgaaccaatttccacactggccaacaacaagtgcggatatatagccctcctccggtgaggatttaaatgaccaagattctgagttggtccttgtatcccatttatggatgccacaatgttcagtgctgaaaaggacagttgggctaaagctgtcgcttgaacaatttacagcacttagaattgcaccttctttaatatcattcctttttacatcaacaattccagaatacctttccacaacactcccaacgccgcgtgcacaatcaacagaaaacaagtgcagtgttccatcgcttgcaccgacagccacctgtgaagtaccacgaaccattgtcgtacaaagagctcggctagtacccatgctgtacgttaacctggatctgaaggcaatgtccttttccaactttcttgtatcccatatcttgatacttgagtcgtcagaagcagtcacaaaaaaggtattatcatttgatacggcgatatcattgacagacaagcgatgctcctggagatgtgccactagtattccacgaggcttccatccagtctccaagttcactgctgatctggagaaggacggcaatcctccagtatcagagtttggaatgctatccccttgcaaagaggaactgctcttgatagaatcatttatgcttaactctcgccgcttgctactgaaataatcatctctagtatgcacgcctgggcggttgggttccaaccaaggtagccttattgatgctttatacactgaagaatcagggagcggctgtgtttctcctaaacctcgcttatcggtacaaacagaatatgatggtattcctttagataagccgtcataaaaggaactattcccagcagatgcatgtagtgcaaaaccagaatataatgatttgtcagaagaaactgaatctttgacatcaaaaggcatgttgctggaaatattagggcctttcaatcgcgcaacatcttcaagattgattgaggatccactttgcgctataccagggtatcttccaccaagtactgtcagttctttcttgccaccacccttcagtaaaatgtctcccatgtcctgagcatcctctaaagcttggtagaagatcgattttggcagtggaggcttaaggcatgaaagaagagcaggttcagaggacaatgaaggtggctccctgtgtaggaactgccttagatgaggagaaaggtacacataagtatctacagcccctaggctctcactgcaagcagcaacaaatcttacagcagaccgtttaacccaattgattggataccgaagcagggggagaacctttcccaatagaccaacaattactcttttcctcaaataaccacttttgcacatcatggtcaagcaatcaagtgcatttacaaggacagcctccataccatcacttagtgcctgttcaagatatggcaaaagatattcctcaacgctccttgaaccaatgaaatagcaaacaaagacaatctggccaaagaaaactgcacggagctgctcgtcatggtcatttagaaatgccggaagtataggaagaagaaaatcattactttgcttgtgcccaaagaagtaacacaaataacctatatcctgcagaagagctctgcggacattaggtgtctgcttttgtcccatagccaaatcttgcactatttcataaatatttttcctcagttctgcaagctgggcataaaattgatcttgcttctttgctggtgaatctgcagactgtgatctgggagctaccactgattcatccagaggtccaatatcggctatgctacgagaacgaagtaggaacctataagctgttaaagccagcttatgaatattgctagcatagcaaactctaacactctcctctgtatcatcaggaagcaaagagagcattgggaggatgtactcagggaatataacagcatcactgatagggaagtcttgcacaagacagaggacatcacataaggtttccaaagcagcgcagcggacaatggcagccggatctgaaagcatcgcaatcacatagggaaccactagctgtaagcgattgtcatcatctatgtatgtggacgaaaacttcagaagaatgagactggcccttcttagctcaggttttttcacactgcgtatgcatgagcagagtaatgaggcaagcaagaccatgccttcacagctctccttggagtctatctgttgaaaaatgtcaaagctataggtatctgattggccatcataaccagctaccaaggaacataaattactctttgagatcttctgcacatgggatacaacattgttccgggtcgtcaaaccacttcctgttccccttcctgctggattaaccagctgtgaggaccgaatatggtcctggtccatgtcttttgttatctttgtgcttgtgctgttgctcctgtt

SEQ ID NO: 35097 - DNA, 246 bp, Setaria italica
  Peptide Sequence Number=SeqID_101071
gcggtactggacggagacgacgaggcggccgagctgggtctcgacgggggcgaagcggttggtgcgcatggctgcctcctcggcgcgggagaagggcgcggcgaaggagccgacgcggtggcccatctcgtagttgtacacctggccagacgcgcagagcgtgcggaaggcgcggtaagctggaaggaagcggagcgcggcgtagagcgaccgcagcagcgtgatgcagcgcttgtacgcccggtt

SEQ ID NO: 35098 - DNA, 416 bp, Setaria italica
  Peptide Sequence Number=SeqID_101072
aaagccttttggacatcgaagtctttatcagccaggagtttacgtgattttgatggagcgatatccatggtatcacatggattttatactctagatgacttctattctgaaaatagcacaaggttatcaattgcccgtgtgaaaatacctctactgtttatacagagtgatgatgggactgtgccacttctttcagtaccgcgcagttcaatatcagaaaatccttttacaagccttctcctttgttcttgtgcacattccagtatctttacctttcagagatacacagtgttctggtgccagaatcttgctttagagtggttgtcagcagtagagtttgctcttctgaagggtcgccatccacttataaaagatgtagacatcacaattaacccatccaaaggtctagcatttgt

SEQ ID NO: 35099 - DNA, 546 bp, Setaria italica
  Peptide Sequence Number=SeqID_101073
gaggagaccgcaccatcgatggcggcggcggcggctggcggcgcgcggcgggccctcgcggcactgcgctccggttccccgccgaccctctccgcgacgctctcccgccaggcggcgtctcggtctacgggtctggcggccgcgtctcttccgcgcgcctctcgccggcgcctcgcgatctcgagggtgccggtggcggcgctcggcggcgtgcagggctcgctgatgccgatgcacagcgccacggcgtcggcgctgctcacctccatgctcgggcttaaacctggctcttggggctggctctccgaaggatttgctacgcctctataacaggaatggtgcttcggtcacaagagactgttttttagcctttctactagaagattccaataagacttgttacatgccttgcggaatacacccttggacttttgctgatggaatctgtactaaaattcgcaacctaaaacttatggtctcatgtgctagttatctcattttccatgatatcaatcaaattatccatgttacatagttaaaaaaaaa

SEQ ID NO: 35100 - DNA, 829 bp, Setaria italica
  misc_feature (754)..(829): n is a, c, g, or t
  Peptide Sequence Number=SeqID_101074
ttttttttttttttttttaaaaaaactaaaaaagaaaaaaaaagaaaaacaaaagaaaataactaagaacaacctaggacttacaattcattgatcaagtaactaacaagtaccaaatgactacattccactaaaacctagcacgacagactctattgatgccaagataaatgttcatagggcatttttaacacactactttggcacaatcttaaacaagaaacaggcactagtctttggtcaaggaaatatattcctcagatgctctgcatggaacttgtagatgatacccactctgtctcaaggaccaccattgaaaaggttccaatcatgcacattgaaattcatcacggcaagtttgaagatctcggacattggtaagcatccagcttgttcagcaggtatggccggaccagctgcaactgcggtggcgctttcactcaaggggtttatcaacagtggctcgtatgcggtgataagcacatcagttgctgcatttttgatacgtatgtttgccaggtaaagtcggacaatgttctgcgcttctcttccctgcctcccttttgagacagccagctggccaactgaagttccagccactgcaggtgcttctccaagacgcagaccagctagctcgagtgtcccagaatgctcaaccaccaagttgtccgcggcgtcttgctcgttggcgatgtcgcgcaggaaccagagcgcgctgcctgcatcgtccacctcgcccttgaggtacgaaagnnnnnnnnnnnnnnnnnnnnnnnnnnnnnnnnnnnnnnnnnnnnnnnnnnnnnnnnnnnnnnnnnnnnnnnnnnnn

SEQ ID NO: 35101 - DNA, 462 bp, Setaria italica
  Peptide Sequence Number=SeqID_101075
ctaatgcaactcccttggtacccacagcagtagactttcagcacataaccatttagcgaatactcctgcgtcaaccggtttaaacagtagtactgacctgcttcccaatactgaagggcacatatttgtacttgatcatatgcacaatctggcgcttcattgtaaggacgaagagaacaacccagtagcaaaggagtatgggccagaagacaggaacatcaaacacagagaagaaagtcatcacaaaagctataacaaaagcttttgtgattgcataccagaacttgaactcggggaggcgcctgatgaagggtttgaactcgtcggatcccctggtgggcagcgccggcccctcggcggcggcggagggatcgagctcggggtcgaccatgggggagaggaagccgatgaggaggtttgtaggtaggttagtattcccgtaggtccgttaggttgtacgta

SEQ ID NO: 35102 - DNA, 1045 bp, Setaria italica
  misc_feature (1)..(62): n is a, c, g, or t
  Peptide Sequence Number=SeqID_101076
nnnnnnnnnnnnnnnnnnnnnnnnnnnnnnnnnnnnnnnnnnnnnnnnnnnnnnnnnnnnnnacatagtaaagtcaaatgaattttagtttagtgctcaaagtttggcattctgctccggtttggtacaaagacaagctagtggcacgcctcccattgggacagagtttcgcgtgccacttatttctgggatcctgagatatggggtgccttaactaaacgaaataatttatcagagtgaaacacgctatacacgcacataaggaagcatttctaagcgcaatatcgaattaaaccgtgaacccaagtcagaaacaggagcgaatatccgtctacctctagatatgaatgaagtattacacttggtatttagcacatcaaatatcatcatccaccgtatcttgttcccctgccatgcttcctacgggtaggtacgggatcagtctcttggggaactgctgctcgagccgctcttcttcccaccatatttctgcttcccaatactgaagggcacatatttgtacttgatcatatgcacaatctggcgcttcattgtaaggacgaagagaacaacccagtagcaaaggagtatgggccagaagacaggaacatcaaacacagagaagaaagtcatcacaaaagctataacaaaagcttttgtgattgcataccagaacttgaactcggggaggcgcctgatgaagggtttgaactcgtcggatcccctggtgggcagcgccggcccctcggcggcggcggagggatcgagctcggggtcgaccatgggggagaggaagccgatgaggaggttgaggaggtagatcccgaggccgtaggtgacgatgtagaagccctgcaccatgtagacccgcagagcgtagatggcggcggcggcgagcgtccctagccaccgccccgtggcgtgcggcgtcgagcggtccaggtagtactggaacgcccgcgacgcgtcgctccgccacttggccgccgcggccacggcgccgccggcgccggcggcggaggagtcgccgccgtccatgggatcg

SEQ ID NO: 35103 - DNA, 583 bp, Setaria italica
  Peptide Sequence Number=SeqID_101077
catgactgcctcataaactgaccctgatacatctttgctcccaagctccacatatcctgcaggtgcctgttccctgctggcaatccacaagaggaacccagagatcaagaaacccggtaaaggcagcttcgggtagtacaccagctgaagaacaagagtgcacaagaacgtcattgcaaaatccacacttggcctaccactgccgccgtcgtgctcctgctgtcgtcccaaagccatgccaaagaaggcagcgttaagtagcaccaaccagagcgggccgattggcactgctccatcgagaccgtcgctggtgtctgtgtcaccgaaaaaggagagacccacaagcgccggcacggagaggatggcggcggcgagtgcaaaggctgccgctcgggcacgcctactgcgtgtggcatgccgcgcggtggccgagtgttctgtcgaggaaaggaagcccgaggcgaaggggatcggcgaggatcacggaaggggaagggacatgacaaaccagagataaggccgcgacggcgacggagaggacgcggcggcgggagggccggcggagggcgcgggcgaacgaggg

SEQ ID NO: 35104 - DNA, 1186 bp, Setaria italica
  Peptide Sequence Number=SeqID_101078
gtttgaaatcttcagggcctagtaaatctgatgcacttgaattcatctcttcagagagcttttgggctagttcaaactgtccagcctttttcacatcgctgatcagtgcacgatagacataaactgaaggtttgtgggacatcttcatcttgtcaagcatttccagggcttcagtaatatgaccagcccgtccaaaactatcaatgagtgctgtgtatgttctaagatctggattgatgcctctctcaagcatttcccctgcaaatcttttgcacagacctaatctcccaagccttcgcaagcagtttattacagtattgtaagtcacaatgtcaggataatggccaagttcttccattagcttcacctcatgaagcatttgatccactcgaccagctttccccagcatgtccaagatagtgttgaacgtgacaacatccaaggttcgatctttcttcaactcttcaaagatgatcaaacttttatcaatgtctccatatttagccgtggcaaaaatatgcgattcattactgtagggtctctattctgtgttatttccaaaatttctcttacaaacttgagtatcaattcacattcatccaacttctggagggccttggcaacattcatatatgaagtagaatcaggagcaagttttgaaagcagcaagtacctgaataccttggcaaaaagatcaaagccatctgcttcagctgcttgctgcagtaacacattaaacgtgtccaggccaacatggatctgctggtgatgcagatgccgcagaacacgaacagcatcaacaaggttgccagatctgctgagtttgtcaatataagcagtagatgctgaggcatctgaagcactactgcttgctgtgatcgagcaatcatgcttaaatgcctcaatggcctcatcatcgtcatcatcatctgaaccacaccattggaggtaacgcacagtcatgtgtggattagcgcgtgcagtgtgctgctcctcgtggagcaaggcacgcaccaaacaccccggaacggagagacgggcggtggcgccgagcgagcgtcggaggagtcggagcgccgctgccggggggagccggccacatctgaatgggaagaggagtcgcgcgggccctcgtctacctcgcgccgccgaggccatccgacgggggcgagcgggcatccgcggg

SEQ ID NO: 35105 - DNA, 346 bp, Setaria italica
  Peptide Sequence Number=SeqID_101079
cccattagtatcttgaataaaccccaaagcaatccattgctggatcaaacaatcatgatctatatcatggttcctagggaagatagagcaatacatgaaacaaagttgaagttgtggaggcatgtggtaatagcttagcagcaagcccttcagaattcctttgtcatcatccttaatatccagtatgttactatttttaatttctaaccattcttctcttgtgcactgcttctgcatcacataaccaagagccttagcaaccagaggtactccactgcatcgctgtgcaatatcctttccaatgtctacaaggtcagtaagttgaccatttctgagattacgaggc

SEQ ID NO: 35106 - DNA, 653 bp, Setaria italica
  Peptide Sequence Number=SeqID_101080
cccatgtgttagccaccgactgcttgctgggatcaaagctgcgcaaagtgtggagacatttcatgttgccaattccaatgggataagacgcggctgggggaaattgcaagtataacaaagcaggcaaagaaacaatatcccgtggaacattggacaagtctgacaatatgattactgcctctagatgctgtagaccgataatttcttcaggtagctgcagccgtttgtagttgccacgaacgcataaacatctgagctggaacaatttgctgatcagagtgaggtcaagttcattggtggcacgctcaatatacagagctcggataaacttgagctcaagcagttcaaggctaccatgaggccatccaaaaatgatcagtgatcgaacatgcggcaggctaacgcggcctgcactttcaactaggcttctgtcctgaaactgtagggagagccggcgagccttgtactgccgttgtcttgtgctgattgcctgtaggttctccactgcacacaagaagttctcttctgtggacttggacaaaattaagatccagaaccatatcatgcactctatagatgatgcgatcccctctagcgccatattttacgtgttggatgatcatgctcctgttcacaagctcattcaagtaact

SEQ ID NO: 35107 - DNA, 411 bp, Setaria italica
  Peptide Sequence Number=SeqID_101081
acgctgtacccgctcacctccatgttcctcatactctactgcgtcttcccggcgatccctcttctgtcgtccgggaatgccacggccggcgccttattgtccctgggcacgccgccgtcggccacgtacgtcgccttcctcacggcgctgatgctgacgctcgcaatggtggcggtcctggaggtgaggtggtcaggcatcacgctgggcgagtggtggaggaacgagcagttctggatggtgtccgccacgagcgcctacctggctgcagtgttgcaggtggcgctcaaggtcgtggccgggaaggagatatcgttcaagctgacgtctaagaagacggcgacgacgagctctggcgtcagcgtcaaggaaaggttcgcggagctgtacgccgtgaggtgctgagacacg

SEQ ID NO: 35108 - DNA, 259 bp, Setaria italica
  misc_feature (229)..(229): n is a, c, g, or t
  Peptide Sequence Number=SeqID_101082
ttctctccctcctgctgccactgccaccatctcaagtgaggaggcgatccctccctcccccctccccctcctcccaccctcctcccctccccgcctcctcactgcaatgctcccgagaaggcagagcatcttccacctcggggaggagggtggcgccgccgtccaccaccaccgcgtcggcgtcgtcggcgcggccgccatggccggagccaacggccggcgcgcccgngagcgtgagcgcctcgtcgtcgggctccag

SEQ ID NO: 35109 - DNA, 865 bp, Setaria italica
  Peptide Sequence Number=SeqID_101083
tcccagactgcacaagtatcatgacaacaccaagtgtcaaccctctcttctcaaagatctggatcttcttgcaacagaacaaagggctatctagtgatcctgacattgactgccatgaaagtggggcaacgcaagcaaatgttagctgaaaagtagtgccttcatcaccacctcctctgccatgaatttcctcaatgttcactgcaggctgatcctcaccagtcgcttgctctacaaggcgggcatgcaagaggacatctttcatgtcaaatcctgcctgtgcatagctattggggagagcgtcgaagtggcggcggaggtcggcaacgagcttctccggcagctgctggttgctgttgccgcgggagtagagctgcgcgagtccacggaggaggagcggtggcggcttctcggcgcgcggtgaagggtcgcgggggaggccgccgccatccaggcttagcgtgttcttgaacgcggcgatggcgccggcgaagttgcggcccagcttctgccacttcttggggggcgccggcgccgacgttggctcgccggtgtaggcagagtccgcgcaggttgggagggagtcgtctgagcggccgtggggcttcatgagaacctgctccaccatctcctcgtcggtgctcggccgccccgaccagcactccagcgccgccgccatcgctggagactgggcttttccttctgctgctgaaacttcaacttcctgaagaaggcagctggagggctcctaaagatgggaatcttgctggctcaagttcggatcgattctacacagctgaactgatgcaaatgaaacagaaccaagatcttgctatggtagttctccgttctctagcttctgctt

SEQ ID NO: 35110 - DNA, 915 bp, Setaria italica
  Peptide Sequence Number=SeqID_101084
ttttgtacaagatgagagtatgtacagagactgttgcataccccagtaatacacagtataccatttgcactgcttccttcctatcctacctgctacaaatattttgggagctaaatcaatattttcctcccctaatttttctactttgtaaacctcaatccatctacacccataaccgatcatgaccgtatttacagtgatctttaaaggatcaataatcaaccaaaatctatgtacagaacctgtggctagctgaagtggtttacgagtagagcttgacgaggctgaagccctggaacggccggtagaacttgaacaggtttccgaagatgaacgccgtcgtgccggcgccggcgacgtcggcgtccttccttgccgcgtcgtccccggcggcgaaggggttgttcttgaccctcagcgtggcctcgccgatctgcgcgcggatggcctcgatcgtcttggcctccacggggtgcccctgcgtgtccgacaggtagaacgtgtccacggcctcgccgccggcggacgagatctcggcgcggcggatggtgagcccgttctcccggaagatgcgggtgatgtcggagagcaggccggcgcggtccccagtgcgcacctccagctccaggccctcggcggtgcgccgctcgatggcggcctcgaggcaccgcaccagccgccgccgctcggcctcgcaccggacggcgtgcccgtcgacgcgccggatgtagtactcctggtacgcgccgccgccgggctcggcgctgacagtgccgtggtgcaccacgtactccatgtccgtgatggtgcacacggtgtcgaacagaagcttgggccggtcccggcaccggaccaccacggcggagtacccgcgctcggcgcacgccgtcacggacacctccgtccgcgccgggc

SEQ ID NO: 35111 - DNA, 403 bp, Setaria italica
  Peptide Sequence Number=SeqID_101085
ctttctaactactccacttgtctagtactgtagtttttttatttccaggcttgtgtaaacataggcttcaacaaaaaagggagtttctttggttcagaacatggtagggaaattacaggaagttcaggtttctgttccactggtttcctttaatcaattcaaagctatttttgaatgagttgctggatatgtttgactatgaagctgaaatgaacccaaatgatctgtaaattttattgtctctgcagctgaatatcattctaaaacctcaattgatgctttactgtgcataggtcaggaggattatcatgatgttttgtttgaatgctcaattacagtattgtgaacgtaaatgctattattatttccgtcttgcactgttcccttgcagcatctaccacac

SEQ ID NO: 35112 - DNA, 548 bp, Setaria italica
  Peptide Sequence Number=SeqID_101086
acaaacgaccaaggaccggaggccgcgagccccgcgacgccggatgcgtccctgggcagccgcgccaggagcttcttcggggcgcacgccgccatggcccggacggagacctgccgcagcgggttcttgccgtcggtggtgttggcgacgagcctggtgtggatcaggctcgcggcggcgcaccgccccgtgaccgggttgtacgggtacgccgtgcaccggtgcttgcaggtctggccggcgtcgcggcagcccggctggcggtaggcattggcgagcttgcagaccgggtcctggcacgtgatgtttgccggcaggtggtcagcggcgcacgtggaccagaggagcgggccggcgaggtcgatgacgtggttcgcgccgtccctgacggggatggtgtagagggaggtggcggcgtccttggccaccgggaagagcacgggttcggcgcatgaggctggccacgccagcacgagcgccgagacggccaagaggagcgaggggcgtgcgccgccgtggcatatccatccgcggtgaggtgagctggc

SEQ ID NO: 35113 - DNA, 254 bp, Setaria italica
  Peptide Sequence Number=SeqID_101087
ttcccggttcttttggcttatctagaatttgaggtcgtgtccgccaccgaccgtgaaaaccattttcacaatgtagtatagtcggtacactcgatcaacacgcacgcacactgagacacgcaataccgacacacgcattgacgcatcgcctgtcatgtctcgaatacaggctactgtttctcgccctgcgttagggtctcggcgatgcccttggagaggcagtaggcgatggactggatggtgatcatggggtt

SEQ ID NO: 35114 - DNA, 468 bp, Setaria italica
  Peptide Sequence Number=SeqID_101088
tgatcatggggttcacgcccaccgccgtgggcagcaggctgccgtcgcacacgtacaggccttcggcttcccagctctcgccgcggccgtccacggcgccgtcacgggggctcgaccccatccggcagctgcccatctggtgcgccgagcagtggagcgcccacttgtcggccgtcgagtgcatgggccccttctcgatggtcacctcgtccaggaacgcctccaggtcctcgtcgcggaggcccttgcaccgcagccggagcccgtcgctgcggtgggtgccgacctcggcggcgcccgcggccaccaggatgcgcagcacgcggcgcaggccgttgcggagctcctcgacgtcctcgcggctcggggtgaagcgcacgcggccttcgccgtccacgaacccggcgccgcggtcgcggaccaacgcgaacgcatgcgcagtgcgggagtaccggcgcatccgctcct

SEQ ID NO: 35115 - DNA, 480 bp, Setaria italica
  Peptide Sequence Number=SeqID_101089
aaataacattggatacaatacaatacaagccaaatagaaggcctttattatgcaagttacaaagatgacacacatccgcagcgcacaccaccgtacacggggacaacatgcacaccctgacatcccccggcaccgttctcatcaagcacaagccagcacggtcccaactccccacctggctacggcttcttcacgcgcgccgccaaggactcggcgatgcccttggagacgtagtacgcggtggactgtatggtgatcatggggttcacgcccaccgccgtcggcagcaggctgccgtcgcacacgtacagcccctcggcctcccagctctcgccgcggccgtccacggcgccgtcacggggcctggaccccatccggcagctgcccatctggtgcgccgagcacaggagcgcccacgtatccgacccaggaatcatcggccctttcgcgacggtcacctcgttcacgaacgcacgtcta

SEQ ID NO: 35116 - DNA, 910 bp, Setaria italica
  Peptide Sequence Number=SeqID_101090
gtttccgatcagtaactgcagattccattaccattaaaaattcataacaaggtcatcagtgaccatcaccatccaagaaattaaactctgcaggacgaacagaaaggtaaacatgtcgcctcagacatcaggcacgagacaacaccatcaccaaaaagaaacgcctccccctcttgttcgcaatctctctccatcagcaaagactactccagtaaactactactagggcactgcaacagcaactacgatagggactgcaactacgagacctggacgaaccgattcgaaccccacccctactcgaccttgatctggaacacgtccttgcgctcctcgtccttgatcttgggaatggtcaccttgagcacgccgttgttcatctccgccttgatctggtccatcttgaaggcctctgcggggagctggaagcggcggctgtacttcgccaggcccttgtcgtcgccgtcctcggggttcttgtcgccctcgcccttgaccaccaggatgttcttctccgccgataccttgacgtgctccttccccagccccggcatcaccaccttcagctgcagcgcgtcgtcgtcctccttcgacacccaccacccgtgcccggagtagccggtcctggacgccgcaccgccgttctccatcagcgacagcagctgggtcagcttcatcggctcgcggaacacgtccagcgcgtctccggagaagagcttggggacggagaagctgagcgcgcggcggctgtagtcggcgccgctgggctcctcggtggtggtgctctcgtcgtcgtcgtagtggcccttggtgttgaggaggcggcgggcggagaagtcggagttcctgggcacggacacggacggcaagacggggagatccttgaggccggtcctagcgggtaccccct

SEQ ID NO: 35117 - DNA, 1079 bp, Setaria italica
  Peptide Sequence Number=SeqID_101091
ccaatctctcgacgaaatcctctaggctctagcgatcgaagcgaagccaaggagcctccctcgatcctctcaaagtatgcggattctcgatcccttcctcagatatgtctcgtatgatttccctgttcgtgttcgtcgttgatctgttgcatagggttaggttatttggcgatacctgtccctgcttctacaatctgtagtcgattcgcgggtagagatgcagatgtgcgggttgttgttgaagtatttggtgtaaatctattctgcgcgccgagttcaagctctatatgattgccgctctagggttggattgctgttaacaagctcctgtttacggctcgattgtgcatgtgtttctggttagatttttggttatcatctaggtagtggttttctttataattatctagatctagatagattggtgtctattgatcatatggttgacgagaaacaggaattggcgagaaattaattaattaattcattgttgatctatgtcatggctcacggctcacatatataccgctgcaagattccttaattggttctcaatatgtaactatggtaaattaaactgtaccactgatgctagcctgatttttgtcatatcatgtctttgttcttaattgtcagtattcaaaatttcaacgaagccatatcatttgttagcaaattttcagtgcaattgtaatattgaatgttaccctgttctattgctactcaacagcatgttgacatgtggttgtatattttgttcgacatgagtgtgaaactgcttatattaacggagtgagatgtttagtaatacttttctgttcagaattgtttgtgttctttgctgtactgtttatggtggcttactcagcttctgttccttaatgatcgcagatgcagatctttgtcaagacccctcaccggcaagaccatcaccctcgaggtcgagtcctcggacaccattgacaacgtcaaggctaagatccaggacaaggaaggcattcccccggaccagcagaggctcatctttgctggaaagcagctcgaggatggccgcactcttgcggactacaacatccaga

SEQ ID NO: 35118 - DNA, 324 bp, Setaria italica
  Peptide Sequence Number=SeqID_101092
gtccccaatctctcgacgaaatcctctaggctctagcgatcgaagcgaagccaaggagcctccctcgatcctctcaaaatgcagatctttgtcaagaccctcaccggcaagaccatcaccctcgaggtcgagtcctcggacaccattgacaacgtcaaggctaagatccaggacaaggaaggcattcccccggaccagcagaggctcatctttgctggaaagcagctcgaggatggccgcactcttgcggactacaacatccagaaggagtcgaccctccacttggtgctcaggctcaggggaggcatgcagatcttcgtcaag

SEQ ID NO: 35119 - DNA, 183 bp, Setaria italica
  misc_feature (172)..(172): n is a, c, g, or t
  Peptide Sequence Number=SeqID_101093
ctgctcttcctgtgttacgtttctatttgggaagctgtactttgtgctgtggctgatgcagtgttatatttggggtcatggagagacattgcaaggttgaatttgggctcaattttcgccatttggttttccgtttggtctaattttgacttcatcggactgactcgccctnaatgtgttcct

SEQ ID NO: 35120 - DNA, 724 bp, Setaria italica
  Peptide Sequence Number=SeqID_101094
ctcttcggttccaaaacccctccgagccagacgcggggcacctagttgtgcagttttcgattcgtttgttcgttcgattcgcgcatctgcagtgatttgataaacctgaatgaaacgtcatggacagagtccagtgatgagtgtgtggagttcagtgttctgggtggcgacgccactagttgggttctctgtgtgttggtgattccttattggtttgattgtgacataaaaccgaatccaatgtcgtggacccggtccagactatattcttcaaatatgtgaagtgggctggattatttcaaattccaagtacagacctgccaaggcgtttagacatatcaccttactgtgcagatactaatttataggtagaatgtggcatcactagcaatatcaagttgaagtatttggttctgtgctctatcagtggttggaagactatttgtcgaatagattgttttcttctattatttaccgggctaaggacaaagcgataaaccagacatccttttcattgaggcagtgccttgaaaactagctgccctttggtattgtgctcccactaacatcaagataggatttccaagcaggattgagatatgatttgtttgtttatgcagaaaacagtggatggtaacattattgctgaaatgcttccacttatccaatcattcctgttgctttcttttcaatgctctgtttgctttataaggcaacaacttta

SEQ ID NO: 35121 - DNA, 251 bp, Setaria italica
  Peptide Sequence Number=SeqID_101095
acgacattaacccttcaggaactgttggttatgttgcaccggagtatcttctagacggtattgcctatgcataggtgcttatcttgatagctctaaagtctgtgagttaaagtgtgttatttatccatctacaggtcaattaactgagaagagcgatgtatatgcttttggagtggttctttttgagctgttactcggaaggaagccagtagaaatgattggagaatctcattgtcaatctattgtttcag

SEQ ID NO: 35122 - DNA, 471 bp, Setaria italica
  Peptide Sequence Number=SeqID_101096
acctacctatgattatacatagagatataaaatcatccaacatacttcttgactcggacttcaatgcaaagatatcagattttggccttgcaatatatggtggtaaccacaataaagacgacattaacccttcaggaactgttggttatgttgcaccggagtatcttctagacggtcaattaactgagaagagcgatgtatatgcttttggagtggttctttttgagctgttactcggaaggaagccagtagaaatgattggagaatctcattgtcaatctattgtttcatgggccatgcctcagataactgatagaacaaagctgcccagtattattgatccagccatcagaaacaccatggatttgagacatctttatcaagttgctgccgtagctgtattatgcgtccagccagagccaagctacagaccactgatcaccgatgttctccactcgctcgttccacttg

SEQ ID NO: 35123 - DNA, 348 bp, Setaria italica
  Peptide Sequence Number=SeqID_101097
ttatgaggatgagccatggagtaattaagaaaatatagcatcaaagtaaaggtatggagggaaatatgggactgcgatcggcttcatatggtggaagcacaggagtgcacagctcctgacatggttacaaacctcggagggggtgaaagcaccctttgaagaaagatatggaaaatatgtataaaagtagttacacgattgcttaactgcacaaccaatgtgatgcagaatgaactaaagttgagctgaaatcaacttcttccaaaacagccagctgattttatttatatgttctataaatatcatacgatatttgacaaagtgttgttggcatttggactacctata

SEQ ID NO: 35124 - DNA, 581 bp, Setaria italica
  Peptide Sequence Number=SeqID_101098
cccacctgcaacatatcacttttcctgttttcgcagtcccatgcttcaatgcaaggcaccaagcatcaaagatggtcataatccattgatatgaactagaataagagactgaatagaagccaaaaaaagattcatgacatcaaaacacaggatcttttaccttgcattgttcccatctatgagcctaaggtaatggaaaatttgaaactacaggaccttacacaacactgaaacaatatgcacctcaaaaacactgctccttttagtaggaacacttaaattgcaccaaacccatgatcactgacgattttacgtgcagcatcgtacaaaagggaaataaaagtttttaaattcattacaccacaccttatgacaactctacaagtaacgatgcacaggattttaacaatatacagaaatcaaggatacaaaaaaaccgcatcaattgatattatcgggagtaaatttcccaggctagacagacacatggctgattgttctgccaggccagacagtcacatgattgcacacaaataatggaatgtttagtgattagtctaaatacttctcatggtccaaag

SEQ ID NO: 35125 - DNA, 348 bp, Setaria italica
  misc_feature (317)..(317): n is a, c, g, or t
  Peptide Sequence Number=SeqID_101099
tgctctgccgttgtggtactatacggctctgatatcatcaggctatactttgggtatccctgtccacacagccggctgctatcagcgtcccaccagcagcagcagtgaccacagggaccgggcataggcataggatgccttgtcgtccagtgtatacaaaggaagtctacagaaaaaactttatttttcgtcgagcacttattcgacgacttgacatttcatgtatatcgctttcttcagtaccgtggaatcgagacatcgcgtaaatggcgtacgcctgccattgacaaagcttgaaaggtaagcagacgtttccncttgttagttgtgaataaagctactactttt

SEQ ID NO: 35126 - DNA, 476 bp, Setaria italica
  Peptide Sequence Number=SeqID_101100
agatgagggaggcagttgcaagaaaagccgactggttgtctctgatttcaccgagctgatggcctacttggcataatgttattcctagcaacactgataccgatccttacagtgtcaagtgtcgaccgatgaataattaactaccaatggagctcctttggtttaacactgggttctagtaacccagaggtggggcaagaactgtgagcgggttcttgtgtttatccccaccactgatttcaagagcctcaataaaggagttccatgatgggtgaaccatttcttttttacctccatcttttttatgtggatgttgagggtttgagggagccaatgttatgtcctgtgaatccagtacaatgtgatgtctatctgataattttgtgacttccatgtgatcttttatcggtcacggacaacatgaaccaaagagaatgtttgcaccacaccaggtcaacccaataaaaaaaaaaaaa

SEQ ID NO: 35127 - DNA, 240 bp, Setaria italica
  Peptide Sequence Number=SeqID_101101
ggaggaggagggaggattccagaagaagaaggcgagtgctgcttcggtgagcttgtatttcgaggcttcatccgtcctgctcgcttcagcgatgccggcacggtcaagagctgtgtgatggagaagccagtccgcgagttcattctcagcatcactggaagcgagaacttcgaggtctcgttgccagctcacctcgaccgccaggtcaggatccgagagatagttcgacgtcttccaccg

SEQ ID NO: 35128 - DNA, 263 bp, Setaria italica
  Peptide Sequence Number=SeqID_101102
gtttcaatgcagagaacaccaaatgaacagcttagaccatagggtagggcaaaattcatcatataggttaagcccaacttcagggtaatacgttgaaataacgttgtacctccacaacttctgtgccaccattctgaatgcggttagtcaaatatttgatctcttcctgagtgaatgagcttggagggttgacctgggagaggaggggtaatatagttacccctgcatgcccgccaacaacaggaacactgacatctcttgga

SEQ ID NO: 35129 - DNA, 1314 bp, Setaria italica
  misc_feature (1)..(25): n is a, c, g, or t
  Peptide Sequence Number=SeqID_101103
nnnnnnnnnnnnnnnnnnnnnnnnnagggttccgtaagaagcagctccatgaagatggaagatttccacgcccaggaagatgttacagttgctatagggtaattagcattttactactgtcttgcaaaagtgatattacatgtacaggagtactatacatctatgtatggtccagatcttggggatgatcccttggctcgtaccgcttcacttcttcatgaaagcgatgcccttctggatgctctcgttcagttccttctttgccgcttccagaccaactctctcgaagtcgttcaaaggtccaagaggaaggatctcctcagctcctccgcgacccagcctcacttttgttgcaaagaacggcagctctgtcacctcagaggcaacatatgaacattcaatgatgccagcttcaccgcgcattgctcgcaagcatgcatcaccaaatttcgcagcagcaaaagccattgacagagttgcagaccctgctccagcctttgcctccacaacttctgtgccaccattctgaatgcggttagtcaaatatttgatctcttcctgagtgaatgagcttggagggttgacctgggagaggaggggtaatatagttacccctgcatgcccgccaacaacaggaacactgacatctcttggatcaactccaagcacctcagccacaaaggtgttagccctcacaacatcaagtgttgtgactccaaggagacgcttgggattataagttccagctttcttgaaaacctcagcagcaatggggacagttgagtttactgggttgctgatcaaattcacaattgcatcaggacagcatctggcaacgccttcacaaagcgtgcgaacaatcccggcgttcttgttaaataaatcatcccttgtcattcctggtttcctagggaggccagcgggtatgataacaaggtccattcctgtaagtgctgcatcaagctgctgagcccccaaggaagccacgaaccacagcgctggtgtccatgtggctgacatcggcggtgaccccgggcgtgttgacgacatcgtagaggtgcagcacggagacgagcgggttcatcttcatgagcagcgacagcggctggccgatcccgcccgccgcgcccaggatcgcgaccttgaaccccggcgcgccgcccttggcgcggcacgccgcgggcctcagcgccggcgcgccttcctccatctgcgggttgaggtgcgcggcgacgcgggcgaggcggtgcgagggggcgttggcgtcgggctgcatggctcctcgtgctgctggctgctgctactggtgggggg

SEQ ID NO: 35130 - DNA, 1042 bp, Setaria italica
  Peptide Sequence Number=SeqID_101104
gatttcaaaccagcatggggagaagcttgttggtttattacatcaaacatgctcaaagaaacttgtgatcctttgtcatggattccgagccacaaaggcaagtctgtaccatctctaggaaacttttgcatttaagtatattaagatattgagtatagccatctaaagattattatatgtttaatgttgttttccccctacttgtgcagttgtgttactgtcatataatatattgttggaacaacaagggtacctaattctctttgatactaattccctgtgagtgtactttatgaggatgtgagtgaagtgataaataggagtataaatatagttgttttgaatatcaaagatccaaagttgtatggcttcatatttggtctgctaagattattcttttgagtgggattgaggtgctgttgctttatttttattcttctctttgaagatataacattctagatgcttcaacagccttggcccaactgtttttctatctccctttctctttcttttttttggaaaactttttctcgtgcaaatttgttccacctgtgatgtacagtatatcttcttatatcaatgtgatacagatcaaaagtgcgatatggtgttgctattcttactgtaaagaaaggatatattctcaatttaaggcaacaataataacatgcaatgtatggcaacaataataacatgaagcttttgatccaagcaggttgcggtaggttagatatgaaatcccatgggaatcacaaaatagagcagaaaggattgtgaaagaataaaagttaatatgtttcttcttgagcactgtacattaccatcacgattaatagtctggcacttttcaataaaacttgcaggatgacagcatcttggttgaccttgctgttgccatcacaatggaaggaattagtgcttttcggtttgatttttctggaaatgggtaagccatctgtaaacaccttgtggtgcccatagcatatggcatgatatcacgtcattgcagacttttactgttagcgttgaattaaattgt

SEQ ID NO: 35131 - DNA, 1601 bp, Setaria italica
  Peptide Sequence Number=SeqID_101105
tgggctcctggcctcttctccctccgcgcgcgcccctccggcgagccacgcatctcgtaggagactgggctttgaggcaaggcaagctggtcgggactcggggttcgagactctcacctgacgtcctcgtccatgccgccggagaaacacccgcagtccccagttctttatgaacaaagagttctgatttcaaaccagcatggggagaagcttgttggtttattacatcaaacatgctcaaagaaacttgtgatcctttgtcatggattccgagccacaaaggcaagtctgtaccatctctaggaaacttttgcatttaagtatattaagatattgagtatagccatctaaagattattatatgtttaatgttgttttccccctattgtgcagtactgagattttgttgcttcatggaaggtcgagttgaggaacattcactacaactgaaagtaatcattttagtagtttagtgtgccatacctgccatgtatatgtattctgatatcccttaaattttggtgccactattgcttgcaggagaataatttcagacttgacattattcctattgttcaaaatacttggccaagtttgcatgacattccttttctcatgatgtgttttcatctttgtgagtaattgacaacgcaattgacattatatggtcttattagttgtattccttaccttcatgaacaaagagttctgatttcaaaccagcatggggagaagcttgttggtttattacatcaaacatgctcaaagaaacttgtgatcctttgtcatggattccgagccacaaaggatgacagcatcttggttgaccttgctgttgccatcacaatggaaggaattagtgctttcggtttgatttttctggaaatggggaaagtgaaggtgaattccaatatggaagctacagaaaagaggcagctgatttgcgctctgtagtattatatttctcaaaacaaaaatatgacataattgcacttattgggcatagcaaaggaggaaatgctgtgcttctgtatgcttccaagtaccatgatgtccccattattgtgaacatttctggccgatttgcattagagcgaggtattgacggccgccttgggaagaatttcatgcagagaataaataaagatgggtacatagatgtcaagaataaaaaaggggagttcgagtaccgggtgtcgaaagcgagtctggaagatcggctgagcaccgatacccttctttctagtcgtgccatcagcaaagactgcagggtgctcacggtccacggcgccagagacgagatcgtcccggcggaggacgcccggcagttcgcggcttacatccccaaccacgagctgcgcatcctcgccgaggccaaccaccggtacgccggacacgagcaggagctgacctcgctcgtgctgggcttcgtcaggaggtcccatctccagagcacgtcgccgttgcgtccgaaattgtagagcgctgcggccgttcgtgtgaacaagcctgttgaaattccttcttgttccaatccgaatggatatggcgttatcaagaactcgagttgctcgacgatctggtgtccgaatcagactctc

SEQ ID NO: 35132 - DNA, 312 bp, Setaria italica
  Peptide Sequence Number=SeqID_101106
cgccgggcggcgcgcggcaagtgacgttgcggagcacctggcggacgccgccgccattgagctgctggtggtgatcttgggcggcgtcgtcgtcggacctgctccagaccttgagaggaggatggtgtcgcgatcggccggtggagacggcgatgcggtagctgatgcccctggcctcgatgtcgcagccgccgccggcgcaggctttcttcgccttcatggctatggttgatgtgttgatggggatgctctcaggctaggacatggagagagcagctcgcgagtggccgaggaaggagggagctgacgacg

SEQ ID NO: 35133 - DNA, 327 bp, Setaria italica
  Peptide Sequence Number=SeqID_101107
tgactggatcgcatcaagctgcttggagagatggctttcctcaattcttcactgagcagaaattatttagctggctgcactcagaactgctgctgttcaaagtttgctgccctccttttcttgtggattagggataatgattcgccatttgttctggtttgcataaactcttggcacgatctggaagaacaggacgttgctgtcgagtcatatgatttcccttggcagtattttctgttagttcgatgaaaaaaaaatccgtcgagaataaattaagtaaaccatgcacacacagataataaaattgctaataaggccagagacaat

SEQ ID NO: 35134 - DNA, 410 bp, Setaria italica
  Peptide Sequence Number=SeqID_101108
ggtgagtgtcgcggtgaaccttgctgcagctgaaaggaatggcccagccgggatgccacgacgcctactggaagatccgggatgacatgcaagccgaagatggctgagacattttccaggacaccttcttttagaacgaaataggccccagcatacccctcttctgctggctggaacacaagcttgatagtacccttcaagtcatccttccgtgattgaagtaatctagcagctccaagtagcatcgtgacatgggcatcatgcccacaagcatgcatctttccatcttcctgactcttgtactcccaatccaccatttcctgaacgggtagcgcgtccatgtccgctcggagcgcgacgacggggccggcgccgccgccgccggcgattgtggccaagacgcctgtccg

SEQ ID NO: 35135 - DNA, 463 bp, Setaria italica
  Peptide Sequence Number=SeqID_101109
aatgccttcgatccgttgcctctgcctagtggtgttccagtgcctatgtgcttttgcggcgatccttgcaaggtagccaagtccgatgaacatgccacgtataggcagaggtattggatatgttacaactttgcgtttgaacctacacttcgccagggctgcattaacatgttggtaaagtaattgttgttgtcttataattattgaccataatttttttattttataacaattgcatttgttgtagacccctccaccgctatgtgattttgagcagtggatcaacaccgagatcaatcatgaagacaaggagtttttggagtgtatgatgcgctgggatgcagagaggaaggaggtgtacgagaagaggctcagagaggaggctgcggaaaaggagaacaaggaagaggaggaaaggaggcgggttgctgcgaacagggagagggagaagaagctgagactt

SEQ ID NO: 35136 - DNA, 207 bp, Setaria italica
  Peptide Sequence Number=SeqID_101110
cgacgccgggctacgtcgccaacatgcacttctccgagctgcagcgcctgcccgccaacgccgggcgccagttctacatcaacctcaatggcaagccgtggtacccaaaggcctacaagccaatatacctcatctccgatgccatctacaaccacaacccgcccggggcttcccccactacaacatctccatcaactccaccgccaa

SEQ ID NO: 35137 - DNA, 266 bp, Setaria italica
  Peptide Sequence Number=SeqID_101111
agaaaccaagaactctccacaaagggtagtagcagcccgcagctaatcgctgggcaagctagccacacgatctcggtggctttcggactgcaggcggcggccatgtcttcctcccctgacctcgcccgcgtcctcccccgcgtgctcatcgtctcccgccgcaccgtccgcaagaacaagttcgtcgacttcgtcggtgagtaccacctggacctcatcgtggggtacggcgcggtgccggtgatcgtgccgcgcgtggccggcgt

SEQ ID NO: 35138 - DNA, 797 bp, Setaria italica
  Peptide Sequence Number=SeqID_101112
ttttttttactggaacataactcgttgttatttttcttcttccaattttacaaattaagcacacacaatttccccaaacagtacaaaatgatcaataattttggcttaataatctcttgtacacaacccaattatgaaaccatgcaaaaactccagatcaagcacaaaaagtacttgaaaaaatatgtaccggggagtgatcgaaggagctagctagcgatgaagagccgatggatcgatgaaaccggcccaagcgtgcgtgcatggtgtcgttgtctgacgagagaatgaatttcagaagaatacccacttggacgccgtcttctccttcatggtcttggagtggaagagctcgccgccgtcgccgtcgccgggctgccgccgcttctccgcccgaccgagcctcgacaggaacctgccgatcttcttcttcttgccgcttttcttcttcgtcttcacctcccccttattattactccccttcgccgattcttgcctccctgcggcctgcttcctggcagctgttggcatcagcggctgcgagaaggcggcgacgttgacgaaggaggcgccgtcggaggccgcgccgccgacgacgtggaccgagctgacgtcggccgagagcgcggcgtggtgcggcggcggggagcagccgccgccggaggagtacggggaagtggtcgccgaggaggaggaggcgcgcgtggtggtggtcgcggacgaggaggccgagaggtgcgcgaggcggtcgcggaggcagtaggggcagacgcccttggacacccggtgctccgggt

SEQ ID NO: 35139 - DNA, 269 bp, Setaria italica
  Peptide Sequence Number=SeqID_101113
aagaaagggaaggaggcggcgcgggagcggcgcgagcagcgccgccgcgaggtcaccctgctccgcgccctcccctacgagccccaccagcgatggtgggaccacctggagccgcgggctgtggcggtggtcacgggtgccaaccgcgggatggggttcgaagccgcccgccagctcgcgctccacggcctccacgtcgtgctcacctcccgcgacgccgccaaaggccaggacgctgccgggaggatcatggcggaggctcccggaga

SEQ ID NO: 35140 - DNA, 406 bp, Setaria italica
  Peptide Sequence Number=SeqID_101114
tttctttccccgttccgttacgttccttaagtccgttcgtcgtaggttcttactaaccttctttccgcgacttccccggatacgtctcctcccatctccgcacgggcaaatcctcccaggcgtatgcgtttgctgtatttgcagatcaaccatctgcgttagctgccttgaatgccacaaatggaatggtatttgaccttgagaagaactgttctcttcatgtggatcttgcaaaatccaattccagatcaaagcgcttgagatcagatgatgcttcaccttattctcctgagaaaagaactaggaaacctatgggatttcctgattcagctacacaaaccttgaatctagtacttctgtcaggaaggatccatccacatttgcccctcaaaataatcctccatgt

SEQ ID NO: 35141 - DNA, 542 bp, Setaria italica
  Peptide Sequence Number=SeqID_101115
ttaaatcaaatcccaggaagcagagcaggagtttaaactggctcagagcaaggtatctgatgctagagaacaattaacaaagcttcgaaaagatttggatgggaatgttgcaccttgaagaccgtgaaaaatcggtgtcagcaaagagaagattcctggactcgaagcttcaatctatttcacagatttctgctgacattgacatgtttcccaaagttctgcaagatgccaaggacaaaagagatgaacagaaaagattagagatatatgcaaatggaatgcggcagatgtttgtaccttttgaacaagtggctcgtgatcgtcatgtatgcccatgctgtgaacgtgcttttacacctgatgaggaagacgagttcgtaaagaaacaaaggatgcagaatgcaagcactgcagagagagttaaagctctggcaatggaatactcagaagccgaaaccttttttcagttgctggataaacttcgtactgtctatgatgattacatgaagctggtagaagagactatacctctagcagagaag

SEQ ID NO: 35142 - DNA, 564 bp, Setaria italica
  misc_feature (551)..(551): n is a, c, g, or t
  Peptide Sequence Number=SeqID_101116
atggcggcggcggacgtggagtaccgttgcttcgtcggcggcctcgcatgggccaccgacagcgagtccctccagcttgccttcgcctcctacggcgacgttgtcgactccaaggtcatcaccgaccgggagactgggaggtcccgcgggttcggcttcgtcaccttctccactgagcagtcgatgctcgaagccatcgagaacatgaacggcaaggagctcgacggtgggtcgccgccgccgccgtggccgccgccgccgccttctactgagatgggatctccaccgtcccgtcccgtgctgtaatttattgttatcctccgtgttgagctgttgattttttgtttccttcgccattttttttgttctctcttccatattccattcggcattcgattcagtaggactcccggcatctatatgtgtaggattgtgggttggacagattggttggtcggtcggttggcccggtggtgttgtgatcctctccatttgtataatcccccgttaatttatttcacatcttaaccccaaaaaaaaaaaaaaaaaanaaaaaacaaaaaa

SEQ ID NO: 35143 - DNA, 302 bp, Setaria italica
  Peptide Sequence Number=SeqID_101117
gacagcgcagcggacgctccatggcctgcagacgccggagctcgccgggatcctcaacgagcgcagcagctaccgcgagctctcggagatcgcggagcaggccaagcgccgcgccgaggtggccaggctgcgggagctcagtacgctcaagggccaggtcgagtcggtcgtcaagctcaaggggctcgacatggagggcatccagcagcactacaccgtgtgatggcggcctggtcgccagattcggccgccggctggccgccgctccgtgcccgtcgtgcattttcagcgacggcgccgaa

SEQ ID NO: 35144 - DNA, 540 bp, Setaria italica
  Peptide Sequence Number=SeqID_101118
tgcgagtcctccgattcggcgccggagctggtcgcggccgtgctcggggcctccttgccctcgaccctcttcttgaggtacgagttccagtagttcttgacctcgttgtcggtcctgccaggcaggtgccgtgcgatcctcgaccacttgttgccgagcgtggcgtggaggctcatcaccgtctcctcctcctccggcgagaacatgccatgcttcagccccggccgcaggtagttgatccaccgcagcctgcagctcttgccgttccggtggagcccggctttggcggggagcgcgctccagcagccgtggccgtggcggaggatgtagtcgcggagcttctggtcctcctccggcgaccacaggcccttgcggtagttgggcttgggcttgtcgcacgccttgcaccccattgccggaggatgcccaccgccacgagctcgcgcgactccgagcagggaggcagggaggatagagagagggagggaaagcagctgccgctacaggaggggcttctgctacacgccttcggaatggagc

SEQ ID NO: 35145 - DNA, 575 bp, Setaria italica
  Peptide Sequence Number=SeqID_101119
agggacacatcgtcgacaccggatggcccatccacctgcacggacccctgactcatcacctggtggtggcgatggttgcgatcgccgcccgtgctggggccgtggttggtgcgagccgcagcgtccagaccaggtgccgccgcgaccgggccaccaacgatgcagtccatgtccatgtccagccagtccgcgaacatcaccttgggcggcgccacgggcgcgtggggcctgcaggcagcgggcgggcccgtgaggcagctcgagtcggccgacgacgactcgcgcggctccgacgagccggagtccgccggcgcctcctgcgccgcgccgtccccgggcttggcgcactgcgagtcctccgaatcggcgccggagctggtcgcggccgtgctcggggcctccttgccctcgaccctcttcttgaggtacgagttccagtagttcttgacctcgttgtcggtcctgccaggcaggtgccgtgcgatcctcgaccacctgcagtagagcccgaaaatcggcgtcaacaaaccaagccaagccgctcctgtcgtcttttctgtcggtggggattagtg

SEQ ID NO: 35146 - DNA, 594 bp, Setaria italica
  Peptide Sequence Number=SeqID_101120
tttgtttttttttttttttgttgatagcagaggcatcaaaccataagcaattgcgacacaaatcaatactacaccaattacatgccagcaattgcaattctgtcttatacgatcaaagaaagaaacaaacgtacaatgctcgaatatacaccacgccccataacccccaattacaccaccttgcttgcagtagataacaccacccacacaaccccggatcagacactaatccatatcactgaggcacacaggtacaagccacacacttttggtctagtcttcggcagcatgcatccgcctgctgtttgaattgcacacatgctcccccgcccaagactgcctctgcaaccacctcacgccaccagcacgtacagcgcgtagatgatccccggtatgtaccccagtatggtcagcaacaggtcgatccagaactccatgccgcagccgtagcgcaggaagacgccgaccggcggcaggaagatggcgaggagcacttccacgaacgtcgccgtcgccatggctcactgccgatgcttcccagctcccctctctctctctctctctctctctctctctctctctctctctcgtacc

SEQ ID NO: 35147 - DNA, 279 bp, Setaria italica
  Peptide Sequence Number=SeqID_101121
gtcgacgacgcggacgttgtccgctgcggcgatgacggggtgggcggcgagggcggcggcgaggtccctccggtcggagtcgggggcctcggcatcgaggtgcaggatgtagcggttcctggggtggtagagcgcgaggaggacgcggcggagcgcggaggcgtctttggcggagccggagatgaggaaggcgatgcggggcagcgaggcgccggcgggggacggcgggggtgggggagagcttgtgctcgacgaagagggcggaggatggcgtggagg

SEQ ID NO: 35148 - DNA, 750 bp, Setaria italica
  Peptide Sequence Number=SeqID_101122
tgtccgagaagctttgcctcgtctagcttaaacatgcttcatcatccttgctttctgcacttgcagtatctcatcctcgtgcttctcctgctgtctgtgtgctgggccactgacgccgccgtagctgacggcggcgagttcatcgtcgatggtttctccagttacgactaccttaccatggacggtgacgcttcagtcgccgacggcctcttgatgctaaccagcggccgactcgcgcactcaaaaggtcacgctttctacccttaccctctccatttcacagatgtctcaaatggctcctccctggcatccttctctacaacatttcttttctccattatggggccttacattgacattagctccgatggtcttgcatttgtgctttgttccaataaagatttctttagcgcctctcctgcccagtatcttggccttctcaatcccttgaataacggtaacgcaacaaatcatatcgttgctatcgagattgataccatacagaacgatgagttacaagacattgacagcaaccacataggggttgacataaacggcctgatttcagttgggtcggcaacggcaggaacggaagcccatgctggattttcctcagcgactggcccaattcccagcagacattacattctgggttggagcttcaagctcaacggagaacctgcagcactcaactaccccgccttatccatcaagactatccaagaacttgcagcgcagcttcaatatcag

SEQ ID NO: 35149 - DNA, 682 bp, Setaria italica
  Peptide Sequence Number=SeqID_101123
caaaggtgatgaagaaggcgacggcagtgagcgtggtggtgaccactgtgatctacctgctgtgcgggtgcgtggggtacgcggcgttcggcagaacggcccccgacaacatgctcaccggcttcggcttctatgagcccttctggctgctggacgtggcgaacgctttcgtcgtggtgcacctggtggggacctaccaggtcatgacccagccagtcttcgcctacgtcgagcgccgggctgccgccgcgtggcccggcagcgcgctggtccgcgagagggacgtcagggtgggccgaaccatggcgttctccgtgagcccgatccgactggcgtggcgcacggcatatgtgtgcgtgaccacagcggtggccatgctgctgcccttcttcggctccgtggtgggattcatcggggcagtctccttctggccgctcacagtgtacttccccgtggagatgtacatcgcgcagcgcagggtgccacggaggagcacgcggtggctactcctacatgcgctcagcgccgggtgcctcgtcgtgtcgatcgctgccgcggctgggtcaatcgccggcgtcgtggaagagctcaaggcgcacaacccgttctgctggtcgtgctgaccgaaccaactccgtctcctaaggctctatgagcgacctgaattcccatcgcgataaat

SEQ ID NO: 35150 - DNA, 629 bp, Setaria italica
  Peptide Sequence Number=SeqID_101124
ggcgtacagacgaacacctcgcagggacaatcagccactcgtcgccgcgctctcctcgactcgggaagcttcctgcggacggaatgtgcgggtgctcggccctcgtcgctggaggccgtctgccactgctcgccatcccccgccggctccgtcgccgccgagggagctccgtcagggcagaggcctcaccaggcggcgagtcccagcggaagaaggtcgccgtcgcgggcgccggctgggccggccttgccgccgcgcaccacctcgtcaaacaggggtacgatgtcacgcttctcgccgcggagagtggcccaaccgaggaggttggccttagaggattctggtacccgtaccgcaatatcttcgctttagtcgatgagctggggatctcgcctttcacgggctggaatagagcagcctactattctccagagggcctttcagtcgaattccctatatttcataaccagccacggttaccagctccctttggagtctttgcatatccagagttccctaaccttcctttgattgataggttgacttcaattcctgtcatagctgcagtaattgactttgacaacactgacactgcttggaggaaatatgatgcaatgactgacaaagaa

SEQ ID NO: 35151 - DNA, 1583 bp, Setaria italica
  Peptide Sequence Number=SeqID_101125
taccattagaatcgttcaggcccagcgaagattcaagaatacgccgaaaaggcaacttgcgagccacagtataacaatttgtcatgaatttgatctaaaaatgtaatttacagttgatctttctgctctacagctacaacagcaggcaaaaggcgcagaccgcagttacacacactggctgcaggctcgttacaaggcttacagccccatgaataggaagcagtctatgccgtttatgcctaatgatcaagtttacacccgtgtccagctaccagatctgtttgtcacctcatgctctaacccgtgtacaacagcacgacagaggaattggccgtcgacagagcatagcaatggtcaatggaaggtgtgtcaattgagaaatctgatgaatggtgatgacaatggcgaaatagtctcttcttccctactccaggatgtctgttggccacagctgcctccacttggagatgtcatccttgctgcggagcttccttatcccaccgtagaacccgtcaccctcgttgccctcttccctgtggtccttccggttcaccaatgcttgcctccatcttgagccgggtgtgtattgattgaactccagcagaacggtatcactaagatgacaccgacaaaagtgttcatttccatcacatgactccaagtggccaacaactccataccaccagccatatgggaattctttgttccttctccactgaatctcaatgtggtcgccaggccgcagttcatgtaggcagtctgaggcatgtagatcatgtgcaagagtgtcgacaggcggtgccctgaccctgtcccattgcactccatcctccaagaccacagttcgccgcccgtgtggtggataccttgcacggaatgtgtcggtatggaaatcatagctgagctctgcatcatagcatgacatcatgaacccaacatgtccatgctcgcggttgtaaacctgagccggaaaccagaacttgccactctccatggacagataccacgacatgatggaatcatccagcacagggccggacgacttggcgccgtcggccttgggccgcatccaggacaccaccgggcagacgcaggacagcgcggcaagccacctccggcgcttaccgccgccgcccgtggcggagcccgcgccgccggactcgctggcggacgccaggtgggccctccactcgtccctggcggcgtgccccaggacgcggccccacttctccgacatgtggcgctcccagaggtggtcgccgcggcagcgctcccgcatggagcggcagacggcggccatgttccgcagctccgccggcggcagcctctcgagaatgcaatcgatggcgagctcgggcaggtcgagcaccgatggctcgccgccgccgccgccggccgcctccacattctccaccgttgccaccgcccgcttcctcttgaaagaaggcatgagcggcatggtctccgaggccgcggacgctgccgcgacgccgccgattaggcggaggccggccaggaacccgagcagcgagagcgcgagttgctggcacagggaggctaggcacagtctcatgtcacgcgcg

SEQ ID NO: 35152 - DNA, 461 bp, Setaria italica
  Peptide Sequence Number=SeqID_101126
aagaacgctgggaccattattgccaagttacctccatcctgaagggatttcgccacttctctcaaacacaagaggacagaaatttctatttcagacttgatccgtctcttgatgttgaggagaaagctcgggctaaagatggacgatctaatgctgttgagggtcagaccagtgccaatatggtgcaccaatcacatcacaatggcaatggtggcaagggcaagggcaagaacaataagcctaagcagtccactaccttcaagaaaaagaagaataaggagaacgagggatgcttcgtgtgcggttctactgaccattgggcaaagaagtgcccaaaccgcaaaggaagaaaacctccacagcagaagtctgtgagcatggtgaccagcactggagacgaaaatagtggttgtacctagtcttactttggttagttacgtttaaaattttagttttgttta

SEQ ID NO: 35153 - DNA, 362 bp, Setaria italica
  misc_feature (6)..(6): n is a, c, g, or t
  misc_feature (23)..(23): n is a, c, g, or t
  Peptide Sequence Number=SeqID_101127
gaaggngccgcgaggcgcgcgcnggatcgaggcggcgcgggcgagggtggcggaggccaaggccaaggcggagcgggagagacagtgcgagcactggaaggagcgcgcggtggaggaggggctcaagctggccgacgcggtcagcaagaagaaggaggtgatcgccacggccgtcgccgccttcacgctcggcgtcttcgtctcccacaagctcttctccaggagctaatcgatcaaaccattcacgaacatagtgatggatgatcaaacgacagagagatcgagcacgtcgggtaaaatcatttgcggggcttcaagccttcttcattcttcgtgtgcgttgcacaagatcgatcacgccg

SEQ ID NO: 35154 - DNA, 337 bp, Setaria italica
  Peptide Sequence Number=SeqID_101128
gcatcatccacggcgagggcactgggaagtgacgctgtaccagaagctcgacatcaccatggacgacgtgcttcgcgggctgacgtccgcgaacgtgatcggcaccggcagctccggggtggtgtacaaggtggacaccccgagcggctacaccctggccgtgaagaagatgtggtcgtcgccggatgacgaggcggcgtcggcggcgttccggagcgagatcgcggcgctgggctccatccggcaccgcaacatcgtgcggctcctggggtgggccgcgaacggcggcacccggctgcttgtttcttacggtcttaccttcccctaacggtctagt

SEQ ID NO: 35155 - DNA, 325 bp, Setaria italica
  Peptide Sequence Number=SeqID_101129
actggcggcgccaccgctccgaccgcgccgagaacggccgcctcgccgccgtcctctccccggggcgccaattcctcccgaccaagtggaaggacgtccgcgtcggcgacgtcgtgcgggtcgtctccgacgagtcgctccccgcggacatggtcctcctcgccaccagcgaaaccaccggcgtggcgtacgtgcagacgctcaaccttgacggcgagtccaacctcaagacccgctacgccaagcaagagaccctgtccacgccacccgagcggctcgccggcgccgtcatccgctgcgagcgccccagccggaacatctacgg

SEQ ID NO: 35156 - DNA, 410 bp, Setaria italica
  misc_feature (22)..(22): n is a, c, g, or t
  Peptide Sequence Number=SeqID_101130
tctattgtccaagacgctgccncaaatgctcaacaaggtcgtcgcggagttgatcatgtgtctctcggtcttcaatcttgcgatgcacttcgagaaatctcttgatacggtctttatccttctctgggtccacagttgttcccacatgctcataaagtcttccggctgacctctctcatcctctgttatcatgttgtgcataatcacgcaggctgtcatgatacgccatagggtcttttggtcccaaaatcgtgcaggcatgcgaacaattgcaaaccttggttgcagcaccccaaatgctctctcaatgtccatcctagctgcttcttgagcctgggcaaaataaactctcttgttaccctgaggtttactaattatcttgacaaatgtggaccatgaaggatatatcg

SEQ ID NO: 35157 - DNA, 334 bp, Setaria italica
  Peptide Sequence Number=SeqID_101131
ctcttcttctcgtagatctctcggggctcgccgtctccggccaccgcggccggcactcggaggagcggcggggctcggggcggaggtcggcggccatgtacaagaaccagctccaggagctggcgcagcggagctgcttcaacctgccggcgtacacgtgcctgcgggaggggccggaccacgcgccgcggttcaaggcggcggtgaacttcaacggggagcagttcgagagccccgggttcttcaccacgctccgccaggcggagcacgccgccgcggaggtcgcgctcgccgcgctcgcgcggcgcggcccgtcctactcgctcgccgcccg

SEQ ID NO: 35158 - DNA, 301 bp, Setaria italica
  Peptide Sequence Number=SeqID_101132
tttttttttgttttgaagactgggtactgcttatttggaactggagtgagcattatacgtgttttctttatgaataatgtactataagaacaaaacaaaaacttgttcaaactaaccaaataaaagttcgtagtagaaaactattgctacagttatatcagttccttgttgcgcagcatccatctttggcgacaatggatggtaatgtgttcaaattttattccgttggggtgcaagtctactgttgaatggcttggcttcaaaactttgccgcccagttgtgccttgcggacttgcagtt

SEQ ID NO: 35159 - DNA, 790 bp, Setaria italica
  Peptide Sequence Number=SeqID_101133
acttttagtttgattttgatgctcctggttgccttggactagccatgctgcttagatccttgggtacagatgtatggagtttttaatggatagtggttaccacagtatatggtattaactgtataaaaaagcaggcacatatatacataatgtctgatctctgatgcatgcatgtactgcaccagttgtctggctaccaagtatgaatttatagtctagatgaataagaaccctgcaagaatagtagttttgatagagtcatgagtgaccataaactgagttagggaaaaaatgttattaatcacagttgcttcctgtatacccaaaccaagataaacctagaattggaaaaataaagaggcttaggaatgtcttatgccagataatcacataatcaggggatggatgagggataagccctgtgaatttgcaggcagaggatcagtgctgcaaagactggtggaagaagctcaggcaagctgtttcttgctggaagcttggatttacccatcaaaaagttcttggagagagggaggaaagtaagagatatttcggaaatccaacttacatggcttcttcagggaatttgtgttttgcttgcactgtcatgcatgagtggtgagtgttccccagcccaacctgggaaaagttcagtttcttttgggctgaatggtgctccacaagctatctgggctgggacactggaaggttttcacactgaaaaggatcgaaacgaaaatttgaacaaggtgcagtttgcttaatgtcggcgtgtttgcttgtccagggc

SEQ ID NO: 35160 - DNA, 583 bp, Setaria italica
  Peptide Sequence Number=SeqID_101134
tgagcgccactgcttgcgagggttcccgagagaaaacatccgcacgatattcgggctaatccaaaagttcagcttgcacaggccaataggtttgcaacgggtgtcttggagcactacaacaaaaagaagatcaaatttgagctcttggatgccaagcctgtgatcagtatatacctgagcaacgatgttgttacacacatattaacttcagcgcaaggcccatcaaggagggtttgcaggaacaacttttcttcgctgagatttaccactgtggcaaaaggcgggctccaagtggctttattgtcacttgctgtgaaccattggggagcgggacaaaaatttcgcgagcttgatggtacctcggtggtgaggaagaatgctgattttaagtactgctttgcctgcaccaagaggatgttgcatccaaagggcggaaactgtgtcgctgtgcactgcaacatcccgcgcgtctgcgacaatgcttaacctcacctttccaatcgataaggagcccggttggtgataggctgatagcccattctaggggtgctgttctaaatcaattttctgaatgaatcattcg

SEQ ID NO: 35161 - DNA, 298 bp, Setaria italica
  Peptide Sequence Number=SeqID_101135
tgagcagtcagcagctcgcctcgacgacctgcggcgatgccgatgaacgcggggctgcgcgcgtaccgcgaggtgctccgcctggtgcggcggctgccggcggagacgcggccctactacgccaaatacgcccgcgagaacttcgtcaactaccgcgacctctccgccgacgacgacctcgccgccctcctccgccgcgcctacacccactcgtcatgggtcctctccaagtactcaatagacggggagaaggctgcggcgcggctcaaggatctcggcggcggccaccccgcgggca

SEQ ID NO: 35162 - DNA, 316 bp, Setaria italica
  Peptide Sequence Number=SeqID_101136
ctgctgctgtccgcgccgccgccgacgcggccgctcgcggacagcgcgatggtcgccgagtccgtgcccaccacgccgcgcgccgccgagccgtccttgtaccggtagtcgtaggcgcaggggctggccggcgacgagcagttggcgagggagaagggcacgtaggacgtgcacgtgtcggaggagcacgcgatgggcgaccacgacttggatgcggcgggccggaactcgcgcgccggctgggcggacggcggcgatcctgcggcggcgccgcggcggcacttgacccaggtgaggtcgctgccggtgtccgcca

SEQ ID NO: 35163 - DNA, 2031 bp, Setaria italica
  Peptide Sequence Number=SeqID_101137
gccacaggccacggacacccaaggaaggaggagagaggaacctgcctttcagataagatggcgttgctccttcggcttcttgccctctcgctgctcctcgctgtggccactccaatcagggatgtcaccgatgcttgctcgtctcaagtaaaggatttcccgcacctcaacagctccgggatccacctgacgctgcaccacccgcggagcccctgctcgccggcgccgctccccgccgacctccccttctccgcggtgctcacccacgacgacgcgcgcatcgcctccctcgccgcgcgcctcgccaagacgccgtcctcgcggcccaccgcgctcgacgagtcgtcgtctcccgacgagtccctcgcgtccgtgccgctgggcccgggcacctcggtgggcgtgggcaactacgtcacccgcatgggcctcggcacgccggccaagtcctacgtcatggtcgtggacacggggtcctccctcacctggctccagtgctccccctgcgtggtgtcgtgccaccgccagtcgggccccgtgttcaaccccaaggcgtccagctcctacgcctccgtctcctgctccgagccccagtgcagcgacctcacctccgccacgctcaaccccgccgcctgctccacctccaacgtctgcgtctaccaggccagctacggggacagctccttctccatggggtacctgagcaaggacaccgtgtcgctgggctccagcagcatgcccaacttctactatgggtgcgggcaggacaacgaggggctcttcggccgctcggcggggctcatcggcctggcgcgcaacaagctgtcgctgctgtaccagctcgcacccaccctgggctactccttctcctactgcctgccgacgtcgtcgtcgtcgtccgggtacctgtccatcggctcctacaacccggggcagtactcgtacacgcccatggcgtcgaactcgctggacgactcgctctacttcatcaagctgacggggatcaccgtcgcggggaagccgctctccgtgtcgtcgtcggcctactccagcctgccgaccatcatcgactccggcacggtgatcacgcgcctgcccacgggggtgtactcggcgctcagcaaggccgtggcggcggccatgaaggggaccccccgcgcgtcggccttctccatcctcgacacgtgcttccagggccaggcgtcgcggctgcgcgcgccggcggtcagcatggccttcgccggcggcgcggccctgaagctggcggcgccgaacctgctcgtggacgtggacagcgccacgacgtgcctggcgttcgcgcccgcacggagcgccgccatcatcgggaacacgcagcagcagaccttcagcgtcgtctatgacgtcaagagcaaaaggatcgggttcgccgccggcggctgcagctgagaaggaagctacgcacacggacgggctcgcactggtaactaaattaattaaatgagcagcgcatctaccgcttgctttcgtctgaactcatcatttcgaccacgcaagctcagctccttacagtgcatgcatgtggtgtggataaaatacacgcatgagaaaggtgaggtacaggaaagctgattaaaggaagtacgcgttgctcaagcacctagcttggtgtacattacatgtttattaattacctcttcgttacataaaagaaacgcataaaacagtattacaggagcactaggatatttatgatgttgttcaggccaggtatgtgagaagtgaaaagcacaatagccaacagatagcatgtagcatgtgattctttggcaaaaaaaaaactttgtgtaggtaaattaaaggactatgtatatttctgatttccttcttacaacttccaaggatcattcctcccttgtacacagtgggagtatattgtaaccgggaggtatatgatatgtatgctgtatgcattttacttatgtgatatattaacaaaatgaaaaatatcttgttcctgaactttaaaaaaaaaaaagaaaaaataaaaaa

SEQ ID NO: 35164 - DNA, 1201 bp, Setaria italica
  misc_feature (1)..(37): n is a, c, g, or t
  Peptide Sequence Number=SeqID_101138
nnnnnnnnnnnnnnnnnnnnnnnnnnnnnnnnnnnnngttaagtaattgtagagtgatcaataggaccataagcctgttccagtgttccacatatatactaaccatgaacgtaaaccaatccctgaagcgactcacattaccaattcaggcaagatgaaaagaatggaacaaacagtattagaccattactacgaagcactgccaagtaaggattcacaatctacaaaggtaaaaacaaataaaaaataaagaaaccaatttatccaaaggccatgcctctgtgcagacacatgtatatatcatcatggtattgctaacacatgcagagaaaatctacctcatttcgatcagtgaagccgcgacatttcacacgatgttgaatcaagcggcgtcacaacaagcattcccacttcgcctccctatctcatctcatatcatcacatcactctgcgccatgcggcctactcaagcagtcaaggatttctgtgcgggtgcgcacaatcaggtggaacatctccctgacctgccgctcaagagggtcgaggccgtccttgagcgattggcacacctgcactagctcctgcgcggcctcctgcgcataagcatccttgtccttgggcaatgggaactcggcggtgtcagtgacgtgcatgaggtgcctggagcagagctcgatctggtggatctccttgagcaggccgcacgagttcttgcggtccttcttcttggactcctcgacgatgcggtcgtagagtgtggtggcggggtcagaccaggggaagttcctgggcacggagaaatgcgcctggaggccgcggtcctggcaggggatcgcggccacaagcgcaaaggacacgataaagagcacggcgcccatggtgtagactgccgaggcaaggccccccgtggcggtgatgtcctgcgggcggggcacgggtagtcctccgccgatcgcctgcagctgtcgtgccgcggaccaggcccgggacacgctccaggacaaggaccttagatgggagccggagccggagccagagctcccgccgctgctgctccggcggtggtgtccctggccgtggccgtggggccgggcgtccttgctggcgcgcccgaaggagcggttgcgctggccgacgactcccccgccgccgtccctgtcgtcgagcatgaggatggtgaggtcggtgagcgccttgcgcg

SEQ ID NO: 35165 - DNA, 353 bp, Setaria italica
  misc_feature (347)..(347): n is a, c, g, or t
  Peptide Sequence Number=SeqID_101139
ttaactaaagttagactttaaacaaacaaaatcacaccaatcaagctgtgccactgaacttatatcaaccaaggaaggaaaacaacgtggactgatgcgacaactggttgtggggcaaaggaaacatgacatagcaagtaaaagaaatgtccttaagaaacgatcatccgccttcctcatttcggaaagttgctcaccaatacttgtaattctagctggtagaccatcagaataatagtcctgtttcatcaaggcagtactttgcgcatccatttcatacttaaccgttcctggtttccccattaaagggaatgcctagaatgagttggacgctcttggctgtaacnggaatg

SEQ ID NO: 35166 - DNA, 524 bp, Setaria italica
  Peptide Sequence Number=SeqID_101140
ggctactagcagatatgtggacatgtaatgagtgaaaaatcagtcagaaaaatgaagcagtagttgtcttttgactcaattatgaggcctatcaaacatattcaacaagttactagaaatccaggagttttggcaccattacaaatacagctgcttttagcgcaattatgccactaaaattttgaccacaatggcttttgagacaagaaatacctattacttttgtagaataaattagtactgcatttcatgccctttagttgcattctatccttttccccctttttttcaacttacaaagacacagatattaatatcagaataccagaaattttctgggtcaatttaactagataagttttttgcgctcacatttaacagctgaaaggaggacgagactctatttacatttactcaatcatgatggtaactattgtaacaaacttttgtttttaaaccaattaagacaaacttagtaggtagaacaaagtagaagtaagaccggaaactactttacaagaata

SEQ ID NO: 35167 - DNA, 440 bp, Setaria italica
  Peptide Sequence Number=SeqID_101141
tagtacgtaaacttccgcgcggacggcggcgaggaggtcgtcgacgtagaggaggcggagcacgcgccggtacaccgccacgaagacgaggccgagcccgttgtggaaggcccacttgaacgctcgcttgccgtcctgggaggcgccggtgccgtcggcggaccggtcctcgaggaggcaggagcggatgagtgcatcgatgggggagccttgacggcagcgccgccgctgccgctgagcgcccacaggatcaggccgccgcgcgtgaagatgagcagctcctccagcatcttgcccggccggcgaaccttcgggtcgatgcggatcccttctcgtctcacggagggcgaaaaatttgggcggtagttcgcggcggcgaggcggcggttatatcggagagtcaccgtctccgatcggatcggactctcctatcctcccgg

SEQ ID NO: 35168 - DNA, 294 bp, Setaria italica
  Peptide Sequence Number=SeqID_101142
ggcgttgcagggtgcatcgagttcattttcaatcacatcgagaatttgagatggtccagatgggcgacgggataggagtggttgccgctgcgctcgccgtggtgctgctcccgtggctgtgggcggcgctggcgcacctggtgtggcggccgtacgccgtggcgcgggcgttcgcgcggcagggcgtccgcgggcggccgtaccggttcttcgtcggcaacaccggggaggtcagggcgatgcgtgcggcgacgagcggtctgacgctggaccgcagctcccagacatcgtccc

SEQ ID NO: 35169 - DNA, 477 bp, Setaria italica
  Peptide Sequence Number=SeqID_101143
atggcggcgaggagctgctccattggcagcagcggcgcggttgtctcggcgatcacctccaccaccttgcagtaggccgccctcctattgttggccatgcatccgatgagctccgccacctggaggttggagacgaggccacccacgtaggtgtcctccattgccaccaccaggttgtgtgtctccttaaaagtgtctgtcggcctctccattcctccgggccttatgatctacttacaccattattaattaattggcagcattccttacaccgtgtaatgtaatataaatttcatgctccgtccgtcccagaatatagctatgtttagatttttttcaaagtcaaatataaaagaaaaataattggcagcattatattattggcaaatcgacaacgacacgtacaagctaaggtaaggtaggaattaattagagcaggagggagtgcctgcctataccgtgtatgggatgccactg

SEQ ID NO: 35170 - DNA, 1641 bp, Setaria italica
  Peptide Sequence Number=SeqID_101144
caaattaacctagatgcatggtaaagttatatctctagccaagttaaaataatttacaatttgcgaactaagcgtagctcagctgataaggtttcttgtggtggaacttgtccaccagggttcgagctctcaactcggcactggtgctcatattttcctagatttattctaggatgtaaccggcgctattctttcagtggtaggcggtatgccgtcgacagcgagaccctagtggtgacttcatcgatctcgaggatttgtcggctcagtctttcggaggagcttgtatgagtagggttgtgtgcgtgtgttcgtaggagcaagtatacgtgcgtgtatgtgagtgtctacgtctgtgctgtgtgattcgaaaaaaacttataatttggaacggatggagtaccaagtagaaaaacatataagaatgaacaaaaaatttatatctatatcttgggcgccgatagggttgatgagcttggagccttcaggtccttgtacgatgtgtacggtgagagtggtcgctctgctttcgccggctctctgctggagggtctggctttggctcacccattggctattgacttcaccttctccgtttcgtcctcggcggggggttccctcttggaagggatggcggcgaggagctgctccattggcagcagcggcgcggttgtctcggcgatcacctccaccaccttgcagtaggccgccctcctattgttggccatgcatccgatgagctccgccacctggaggttggagacgaggccacccacgtaggtgtcctccattgccaccaccaggttgtgtgtctccttaaaagtgtctgtcggcctctccattcctccgggccttatgatcgtgtatgggatgccactggcgatgagtgcttcttcagctcgtctcttccagagcagaacgccccagaacaagttgaggaggaacgcagggaagccgatcctgttggtgcccagggatgtaaccaggacgaagtgctcgacctgtgcagcagtggctgcttgtacaagcttggtggtggccatgtagtcgatgcggtacggccccgtgacatccaagatctccttctcgctggcaccaatggagcacaccaccagtgaagcattgccgatggcctcaacgatgccgtcctgcggctgcttctccagatcacactccacgatctcaagcttctccgagggcgaaatcgcagctgctgcgttgccgtctagtttcagctgctggacgctctgcaccagggacgacgccctctccgcgttcctgacggcagcgcggacacggaagccaagcttgatgagctcccttacggctcgggagccaactcttccggtggcgccggccacgaagacgaggtctttctctttctgctgctgctgcggcggcggcggcgtcgcggcactagaagcggaagcagaagcacgaggcggccatgcccttggccgggctggtagtgagttactgctactgatcaagctcctctgcttgagcttgagcagccacggactagggcgactggtattgcatgacgccggcgacgaagaagatgggtggccgtggcgcagaggcgacagggaggcgacggtgtccatgcccactcccagctcttctcgaagaacacgacaa

SEQ ID NO: 35171 - DNA, 254 bp, Setaria italica
  Peptide Sequence Number=SeqID_101145
caattaagctgactctgaaggcgccggcgccggtgaaggagcagcagcatccaaccgcaccgtggtggaagcaccatgtgccttaccggagctctggagctgtgccatggcacggcgagggttcgcacggtgtacctcgcacaattctgaaaaagctacgccctctccggcggcgaggttggcgtagaggttgacgatgttggggcacccctggaggcaggccggcgagcagaccgcgccggcgacgcgcgggg

SEQ ID NO: 35172 - DNA, 419 bp, Setaria italica
  Peptide Sequence Number=SeqID_101146
ccccgcagtggggcctttctaacgcactgcgggtggaactcgacgctggagagcatattgggaggcgtgccgatgatatgcaggccactggggggagaccagctgtgcaacgccaggtacgtgtgccaagtgtggaaggttggggtcagattggtggaggtggagaaccagctgacgagaggacactccagttggctgtagagagactgatgggccgagaggaaggagacaggatcagagaaaggattagagatttgagggatgcagcagtgaaatgcacttccaaaggtggatctaccgatgcatccttgcaacgtctagtggatttcattgtctcaccgtagtgtgtaccgagacttttgcatacttccaaaggtggatctaccgatgataggaacttaattgttttgctccttgtt

SEQ ID NO: 35173 - DNA, 282 bp, Setaria italica
  Peptide Sequence Number=SeqID_101147
ggttttggtcaactaggtaatataaccttcctgcttcatttatttgttagtgcttgtgttcgtaagttgttttaatcttgtaacctaaaactgtactactctgtttatgccctcttcttgatgttctcgctttgttttagcatttctgtgagatgcattgccactttttgtactgcttaccttttgttttgacttggtcatggcagttcacaaaaagatggaatatatctgtactgaactttcaatttattatggacatttatttttagtaatctaaaaaaa

SEQ ID NO: 35174 - DNA, 342 bp, Setaria italica
  Peptide Sequence Number=SeqID_101148
aagcaaaagccaaagagatgcaggagcaacgagaatctgcatggagacaattggaagctgttgttgctgccaaggctgctggagatgatatggttttggtcaactaggtaatataaccttcctgcttcatttatttgttagtgcttgtgttcgtaagttgtttttaatcttgtaacctaaaactgtactactctgtttatgccctcttcttgatgttctcgctttgttttagcatttctgtgagatgcattgccactttttgtactgcttaccttttgttttgacttggtcattggtctaagtttctaactaaaaaagttaatttaggttaaatttaattta

SEQ ID NO: 35175 - DNA, 1281 bp, Setaria italica
  Peptide Sequence Number=SeqID_101149
ttttttttgggtaagtatttgtctaccttgtgtggattattaattatgcatactaaaatttatgcatctagaaaagctaaaatgacctacaatctgagtatttgagtaatcactggaagatgctgctgacggagcagtcgtcgtgaacccgccagatggtctcgccgaggaggttggcgacggagaggacggtgagctgggggaagctctggtgctgcaccaccggcacggtgttagtgatgatcacctcctggaagaggccgccggagagcctctccagcgccggggggctgagcacggcgtgggtgctgcaggcgtacacggcgcgggcgccctcgtcgtgcagcagctgggcgcccttggtgatggtgccggcggtgtcgatcatgtcgtccaccatgatggccaccttgcccctcacgtcgccgatgaggttgaccacctcggcctggttgtggccttgccgcctcttgtcgacgatggccaggggcgcgtcggagagcttcttggcgaaggcgcgcgccctggccacccctccgacatccggcgacacgaccacgacgtcgctggggcggatggtcttgctggccaggtagtcgaggatgacgggctggccgtggacgtggtcgacggggatgtcgaagtagccgatggactggccggagtggaggtcgcaggccagcacgcggtgggcgccggcctcggtgatgaggttggccacgagcttggcagcgatggactcgcggccctgcatcttgcggtcggcgcgggcgtagccgaagtaggggatgacggcggtgatggtcttggcggaggctcgccggcaggcgtcgatcatgatgaggagctccatgaggttctcgttcgccggcgggcacgtcggctgcaccaggaacacgtcgcacccgcgcacgctctcctgtagctgcacgtagatctcgccgtcggcgaaccgcttgatcttcacccggccgagctccatccccaggtagcaagcgatctcctgcgccagcacggggttggcgctcccggagaagatgcgcagccggccgccaccgccgcgggacgggactgcggctgcgaactgcggcagcggcgacaaaagagagctgtcgtagaacatgctgctgctgcaagcgacgaccatgcgccgccgcataggacggtgggaaagcgaggtggatggcgacgggcaggcgcagcaggctgcgccggcggccatggccatgacgacaccctgactgctgggaaggaatgggattgacgatcagctcgatcgcc

SEQ ID NO: 35176 - DNA, 182 bp, Setaria italica
  Peptide Sequence Number=SeqID_101150
gcagcctccgcctcgccgaggccgacgagcgcgagcaccgccatggcctccgcctcgagctcctcgctggccccggagccggagccgaaggccacctcgacgagcgcggccctggtctcgcgcgtggccatgacgagcctgttcttgtcggactctctggcgagcgccctgagccggcggag

SEQ ID NO: 35177 - DNA, 2507 bp, Setaria italica
  misc_feature (2469)..(2507): n is a, c, g, or t
  Peptide Sequence Number=SeqID_101151
aaaccgaaactaaagaaactaaaaagtaacgaaattagcttaaagttcgtattcctaccggtaaactgcaatggccatggggcgtggaacctgggtgaccgtcctgtgtagaaagctgaaggattggtggcattgggttgcagaaggtgatcttccaatagttgcatcccatggaactgaaattgaaacgtacaagacactagagccggcgactcgtttagtgattttgaaagctatatgtgatattcgtgttgagcaagatgatattcggaatttcatcgacagttccctcaagcaaggccatgacctatctaccttccgtaaagaacggattggtggagattcccttggaatctcatactggtatgaagatgatgagattctcggacatagattgtatcgtgagattagacgggtggaacaggtcaagaaggagccaggaaagagatccaggggaaaaggaggatcttcagctatttcagttgtgtcctatcagtgggaaactgtcgcgtcaaactttgatgagtttgatgatgttgcagaaaaactcttttcaagccggaacaggacagaggtttcccttggaaagaagctgaagatcgaatatcttccagagatagaaaagatccataaaaagaaagagaggttgctcaaaaagcaacaaagagaagccctcctccttgatagctacttgacatcagatggtcttacgactggtcgctctctccgtgatagaaagcctgtgacttacacatttgatgattttgatcgctcaataaatgaagccatcaaaattacaaagaaaagagaggagaactcagctgagcctgtcactactactactaccaccaatagaagggtgcttcctctgagatcagaggcaccaagcaatggaaagttaaatggtccctcaccaacagccaacgattcatttgacgggaattcttcgaagtcggatgactaccgagacagtgatggtgaacaagaaaatgaggcacttgatcgcagcaaccgccggaggaaaagatctcagaggtacacacaagattttgttgaagctgtctcggatattgatccaaattttgacagcgatgatgatatcatgggagaggcagtgtatgatgaggaatacctgagaagtcgtaaacagcagaaggcatcgagtgcttctgaagaggatgaagagttccggttggaagaagatgctgaagatgatgatgaagaagaagaggaatattcgttgagtaccagtgaagatattgagccacaacagcataaaaaattggaaacacgtggccggcgaggttccaagttgagatctgttgatgaaatccagagcggtctcagacgcagcaagcgctcttcacgtcctcgtattaactatcggcaatatgatttttcagactcggatacagagccaggaaaggcaaggaaatctgatgcatcagatcctgatgctggctctgatgcagagaatgatatggaactctcgacgtcaagtcaagagcaagaggaggaagaagaggatgatagtcctgatgagcaaaacggtaataatgtgaatgataaaatggaggaggaccatgctgtagcagaaaataaagtagaaccagatgagcagcaggagcagcaacagcagcagcctgtagagaagatggaccatgctcccagcagggaaagtgaaagtgtagggagaacattcctagatctaaatcagcttgcacctggaggtggctttgatgatgggccaagcctgacagtgaaagatgacatggataacagttaggacataagttttttgatacatttgaatgctggtggctggtattccgacttccgagtatggacagatcaatgggcttgtaatgaatggtgcgagaatatattggtggtttgagctgatagcttcattgatttgcagtaacaggagaggcgaggttccactggaagtgggtttgagcttcttcaaatgttatccgagtgctatttcatacttggaagccatgaggaagttttgcttttggttatgtacactacatgaagggcgcgcatcaatggaccgctgctgtattatggccagactaattgatgctgcattgcggccagttctgtaggctataactttattgcctccgtttatttagttttaggcgcgtgatgccaatgagaatatggaggaaatctgtacactgagtgcagtccatcggcatttgtgaaactttttccacatgtagattgtagctttaaggttgaacaggattagttctgtatctatatctgacaacctgatttgtttggtcacctgtgtagctgactttgaactgcccctctcagatgcatcggctcttctcattcgccctagatggagaaggcactgcatgtattaagctgatgttgcctttggatgcatccattgcattgtatcgctggtctggacaatgctatatggccactaaattttggaggggnnnnnnnnnnnnnnnnnnnnnnnnnnnnnnnnnnnnnnn

SEQ ID NO: 35178 - DNA, 245 bp, Setaria italica
  Peptide Sequence Number=SeqID_101152
gaggcgtcgagcatcgagacggcgtggaggcgcgcgagcgcgaggagctccgactcgcggtctcggcggtccaggtccagcgtggtgagcaccatctgctcgcacgcctggcggcgccgcgcggcccattgggcgatgatcctggacgccgcggcggccgaggtctcgccgccggcgcaggaccgggtcttggcgtggacgtcgtcgtccatggagaggccgctcggcgacggaacgccagacga

SEQ ID NO: 35179 - DNA, 387 bp, Setaria italica
  Peptide Sequence Number=SeqID_101153
cacaaacaccactggcgtcagagctctgctgccgccgctcccgacttgcccctcgccgatgccaccgctctccctcctcgccgacgccgcagccgcagctgccgcccccaacccacgccctttggtgcttcgtccctctcttctggcgcacgcggcggcatacccgcgacccgcgacctaaccctagaggccggccaccgcccgccaagaatgccgagcagcttagagggaggtcaggcgcaggaacaggagaacaagatcaccatgggcacatactcggagggagacatcgccggtggctgccggggcagcgggacggaccgcatctgcggcctcccggacaacctcctccacagcatcgtgctccgactcccgggcaccgccgac

SEQ ID NO: 35180 - DNA, 246 bp, Setaria italica
  misc_feature (212)..(212): n is a, c, g, or t
  misc_feature (232)..(246): n is a, c, g, or t
  Peptide Sequence Number=SeqID_101154
ggggaagaaaggagaagaggaagaggaatgtagaggggcgacgagttcggtccgggcgagcggcgcgagcaggaggcgacaacggggaaatttgtgggatcatcaaaagggttactgtactgtaatcttgtacatatgcttcctgtagatatcgaatggaactagggaaaaagaaaaaaaaatctttcggcttaaaaaaaaaaaaaaaaaanaaaaaaaaaaaaaacaaaannnnnnnnnnnnnnn

SEQ ID NO: 35181 - DNA, 399 bp, Setaria italica
  misc_feature (340)..(399): n is a, c, g, or t
  Peptide Sequence Number=SeqID_101155
gcaaggccatgtacctcagctgctggggccccagctgagaggataaggccgttttgtgaatgtgacggggcggcggatgggtgggacaggcggtcggtgtaggggcctcggcctttgcggatgctcaatggccggaccgggcctgctggggcctttgatgaactcgcgatcgcgagatgcgttgaggggttcggtgatttgggattaacatctgggaaatttgtgggatcatcaaaagggttactgtactgtaatcttgtacatatgcttcctgtagatatcgaatggaactagggaaaaaaaaaaaaaatctttcggactaaaaaaaaaaaaaaaaaannnnnnnnnnnnnnnnnnnnnnnnnnnnnnnnnnnnnnnnnnnnnnnnnnnnnnnnnnnn

SEQ ID NO: 35182 - DNA, 628 bp, Setaria italica
  Peptide Sequence Number=SeqID_101156
tgagcgaggtcggccgtgcgcgcgacgcccgccgccagcgcgctcgaggagcgcccctgtcgtcctcggcggtcttgagcaggtcggagttggacatcaccacggggccgaccctgccgggtcccgctgcgcgcgccagggcgtaggccacgaagccgccgtagctggtgccgatcgcggcgacgcgcgcgtccgcggtgaggcccgggagcgcgtccagtagcgcggcgagcgcggcggcctgcgccaactcagagggcgccgccggggagccgcgggaggaggcgccgaagccgaggaggtccgggacgatgacgtggaagtggcgggacagagggcccacctgccggcgccactgccacgtggccatgggcccgaagccgtggatgagcagcagcggcgggaggcgcggctcccccgggggcgcccagtagtggatgacggtgcgcggttgcccgccatcgctgccgtcgtcggacgggagagcggcggtgtggggctggaggccagcgccgaggaacgcgcggcgcgcgatgaattccatcagcgggaggatgctgaagcccatggcggcgagagagcggtggctcggagacggtcgcgttcgcgtcacggcttcttgaccggc

SEQ ID NO: 35183 - DNA, 889 bp, Setaria italica
  misc_feature (859)..(889): n is a, c, g, or t
  Peptide Sequence Number=SeqID_101157
caaaacacattccgacgatccaacacagaacataaagctatcagcagcatcagctcgctagctcgaccagatggcttcgtccctgaccgtgtcgacgacgacggcgaccggggcggcggccggcaccgccgcggccaacaagcagcgcgagggcgcggaggtcatcacaggcgcggaggcgtgcttcgcgcactccaaggagatgctcaaggcgctggggttcccgggcggggtgatgccgctgcgggggctggaggagtgcgggtgggtgaaggagaccgggttcgtgtggatgcggcagaaggcgccctacgagcactacttccggggcacgggcacccgggtgcgctacgacgccgaggtcaccgcgtacgtggaggagggccggatgaagcgcatgacgggggtgcgcagcaagcaggtcctgctctgggtgcccatcgtcgagatgagcctcgacggcgagaagcgcgacaagatctacttcaagtccaacgtcgggatcggccgatcgttccccgcctccgcgttcgccgacgaggaggagaaggaagagaagaaggaggagggcggcgacaagcccgccggtgccgacgaggagaagaagggggaggtgggcggcgacaagcccgctgatgccgacgccgccaccaagtgagagcgcggggcgtacgcacccgtgcgggtgttgtgacgcacgcgcggggcgtgcgcgatcacgcgtgaagatgcatgtatctttctatgcgagtttgttgtttgcgtcattctctatattcgccaatgtttaattatctggttgatatataaatgaagaacaataattgcattgagaaaaaaaaaaaactcgcatagaaannnnnnnnnnnnnnnnnnnnnnnnnnnnnnn

SEQ ID NO: 35184 - DNA, 524 bp, Setaria italica
  Peptide Sequence Number=SeqID_101158
aacccaagaacaaggcttcaggcgactctgctaccgcagcggacacaacggtgacgccacatggggacagccaagctccttctgaagaacctgcagctccaccggtggtggcgaacgacaagttctgggagcagttcctgacggagaggccggggtgttccgaagccgaggaagcaagctccaccttgaggagggatccgtacgaggacacgaggagtgacaggagagatatgggacagctgaaactctgaccccttcagtcaggttagcatggccacttcccatatgcgatacagacgtaagtacagggttagaatcggacacctccggtgaaaccgtgacatgagttgcgtaccattgtagttttagacaagggagtgattggtaggctgcatatgggctaccgaggcttgtgtaatgcagtctgctggtgttggtagccgcataggaggggtagccaggcttgggctgtgcaaaggaccctgtacagcctgcataatgggaaactaaaatcagttgacgtt

SEQ ID NO: 35185 - DNA, 380 bp, Setaria italica
  Peptide Sequence Number=SeqID_101159
tttctttggttcggtttttcgttatttcggttctacggtcgtaatttcaccttggtcctgccgtaggggttcgcggcctgcaggttggcgtcctcgacgcacgggatcacctccggccagccgtacacggtcgccgacgacgagaacaccatctgcacgtgcgccgtgcgcgcggggtcgtcagagatcgtgcaggaaagaggcggatcgatcatgcagcacgtacttaccttcatgcagccgtgcttcttcatggtcttgtagaggttgatggtgccgacgaggttgttgtcgtagtacatgtccgggtgcgcgacgctctcccccaggccttcagcccggcgaagtggatgacggcgtcgtacctggtgggacacggg

SEQ ID NO: 35186 - DNA, 269 bp, Setaria italica
  Peptide Sequence Number=SeqID_101160
agcgcagcaggacgatgctccaccccgggtccgcgcggtggtagtcccgcgccatatcctccaggataagcttggtcctgccgtaggggttcgcggcctgcaggttggcgtcctcgacgcacgggatcacctccggccagccgtacacggtcgccgacgacgagaacaccatcttcatgcagccgtgcttcttcatggtcttgtagaggttgatggtgccgacgaggttgttgtcgtagtacatgtccgggtgcgcgacgctctccccc

SEQ ID NO: 35187 - DNA, 499 bp, Setaria italica
  Peptide Sequence Number=SeqID_101161
tagctttcactgaattgagctgttgcctttgcacctcgagtaatctcgccatcctccgcaggttcaatgcctttaacctcagctggactatctactcccatgggtgccatggcagcagcgttttttgcttgtgtcactatcggtggtgctgattctgcctctacattggcttccatggactttgagctctttcctagcacctcatcacccccggtggaaaggacagatgcatccttcttgttgtttcgtacagcaagtctcatcttgtgcttgtgcttcttcccagtaaggtgcgaccgcatgatgatctcagatggtgccttagcgttgcagcaagggcagacgaggaagccatccacccgctgtataggatggcatacattatctacttccatggtcagagagtcaaaacgacagaaattattttcctcagccacagcagcacttgcactggccttcatctctttatctccatgagtctcggtactgtccccagtgg

SEQ ID NO: 35188 - DNA, 701 bp, Setaria italica
  Peptide Sequence Number=SeqID_101162
cgcctgctgcgcggagccattgccgccgtggccgtgcgaccggtcctgctgctgctggaacatggggtctgggtgagactgcagcgacagccggagctcctggctgtggctgccggtgcgcgacaggaggtcaggcgtgtagctctggaagcccatggccgacgactgcgccgccgccgtcgacgaggacgcctccccgcctgccgtgccggccatgggaaagaacgacttgatcgtgtccgcgatggaatcggagtcgagcgacgccggaaggaagcccgtgccgccggcgccaccgctggctccgcccgcgccggggaagtcgaaggacgtgtgcgcgacggtgatggcctgcgcctggtcgtcggagttctcggcggagtcggggtgcgtcgaggaggacggcggcgcggcggcattggctacggtggccgtgggctgccacgcgggcagcacctcgagcttgtcgatggcgtccttggcgttcttgatgagccagtcgacggccttgctggggcggtcgtagcccaggcggtcctgcacgtcgtagaactggatggccgtgtgcgccgacaggcggacgcggcggtcgcgcggcccgcgcgccgtacagaccttgctgtgccggtccttgcgccccgtggagcgcacactgcaaatagtagacccgaccctagacaaccgaccaacgaatactacca

SEQ ID NO: 35189 - DNA, 553 bp, Setaria italica
  Peptide Sequence Number=SeqID_101163
tcgccggcgcctcggccgccttctcggcgtcggcgtcggcagcggcggcgatggccccgaccttgggcacggtgaccgtgagcacgccggcgtccatcgcggccctgacgccgtccacggcggcgtccccgggcaggtggaacctgccgaggaacgtggcggagctgcgctcgatgtggtgccacccgtcggtgcgctcctcccggcggaggctgcgctccccggtgatgacgagcacgttgccctcgtccacctccacccgcacctcctccttcttcacaccgggcggcagcgccgcgctgaacacgtacgcgcccgccgtgtcccggctctcgatgtaggtgttggcgaacgccgaggtgtcgctcgcctgccacgcgtcggcggccaccgccgtgccgaagatgctgaaggggttcctccacgagtccagggccagcgtgtccaggagcctcactagcgacatcctcgatcgcaggctcttggttggcagcctcaagccaatgttatgttgctagagctagtagctttatcaagtgtacgtgtatgcttg

SEQ ID NO: 35190 - DNA, 197 bp, Setaria italica
  Peptide Sequence Number=SeqID_101164
gatgagttttattttcgagtctcaactcagaacaccaacagcagctacatggagttattaatcgatgaacactgatgagggtgtgataaaaataaaagcagttcatcacaacgcaagcacagaagcacatcttgacaaagagccgttggatgatcgatcaaccgatgggtcggaggcgagcgcgctctagctttctt

SEQ ID NO: 35191 - DNA, 262 bp, Setaria italica
  Peptide Sequence Number=SeqID_101165
gcagatcacataatacctgtttataaaggaggaggttcagtatatccgcacaagttttggtgtagttgactcttgaacggcataatgatttttctgattttttcaggggaatgtaaagttgagaacatgagaacactatgtgtggcttgtcattatgaggtcaccagagctcagcacaaggaactaaaggaaataagaaagaaggctaaagagcacctgaaaaatgccttgaatcaacaaaaggataaagcaagtgaggcaa

SEQ ID NO: 35192 - DNA, 269 bp, Setaria italica
  Peptide Sequence Number=SeqID_101166
ggccgtcgaaaaggtggggttttattccccgggttctcttcgttcgctcgcgtgagcccgagccagagctgatctatttagcacgcgacgggagcatctcgctcgattcgcacctcgcgaatcacccagcacagcgagggagcgagcggccggtggcggagctcgtcgaattcgaattggatttcggttttgatttgcggctgctccggtgtggggtgggaattctcgccgcctcccccgtgaggcgaggagagggcggcggcgcggca

SEQ ID NO: 35193 - DNA, 1132 bp, Setaria italica
  Peptide Sequence Number=SeqID_101167
tttttttttttttagaataatgaatcttcctttggttagacaaaacatcgtcagcagaagctagctcatcacataatgaaagttaaagcgcaaaaggcgataaaaggatactcccagaaaatgacaccaatgatacataaggtagagctttcagacaaggctaaagtaagtttgggtacaagcaacctggacgggcaaacctaaaggacgctaagcacaacatggggattcaagcagatcaacagaatgaggcaggaacaggagagaataaacataggccgcgccaaacagcctagaagaacttgttgaactggccactcagggtgtccttgaggttggagtagagcccgtacagggagtattgccgcaggttggacacctcgtaccatgagttcagaaccgactcgtgcctgtcggtgcctgagaaagccagctggatgccgatgctgcagtcaacaggcccttgggtcttgcagctttgtgttctgatagcgcaagtttgtttcccgaggcaaacaaagtttgacttgcctgtacaagcaccacagccatccttcttccagtgcaagttttgaagtctgccttttttgaactcaagtaccagggtgaagctggacactgtaaacgaggtgttggagacaaatattggagcagatctggctgcatacttcctaccagcaaatgctaccatgaatcctccagccgaagccgggttgaatccagtggtggtgttgatggtgaggagggagatctcgtcgaccttggggcggaacacggcgagctgcgcggaggaggcgaggttgagacggcggtcgcagggggagagctgcgtgttgccggagaagaaggcgttgtagcccgcgaagacgacgccaaaggagaagccgtccccgcgctggatccacgcgtcgctgcacggctcgtagacgccgttcgtgtcccccgccgccagctgcgcgaggcacgcgatggacagcgttagggcgagaagcgctcgggacgacgaaggagccgaggcggaggcggcggccatggcggcgacgagattcgcggagcttgctggcttggttacctttttttttttcctcccttattttgaagaggaggggaggaaagggaagctcgttgctcg

SEQ ID NO: 35194 - DNA, 285 bp, Setaria italica
  Peptide Sequence Number=SeqID_101168
gcgcacaggtacagcgccgccgccgagcaggcggccgagatcgcggcggccgccacgaagcacttgagagcgttgtactggctgtaagagacggcgtagctcgaggatcgccggtcgccgtcgacgatgaccacctgatcactggcggtgcccatcacgacggcggccgccacggacaggcagagcgcagcgatgcgcaagaggagactcagggccatcttgtcatccccgtcggccatctcgatcggaagaggaagggagtgacaacaagtcttgttgagcgac

SEQ ID NO: 35195 - DNA, 596 bp, Setaria italica
  Peptide Sequence Number=SeqID_101169
tgctgtctcttgcattctctcatagaatttgagttttgaggtctgtgaccattgtggcgctcatttgtaaatagtatcatagttctgtcatctttgaagcttgatattgcctaacgcaacgttggagcagcaccaagtgtgacagcagatacatatcataatcttcattaccatagcctgtaggtgatgatctggccttttcttgataattagaaaggaaaagtcatcatgaaacgaccggtatggaatgatgttctgcacataatacagctcatctagcttgacatgaatcatgataccggtctcatactagtgtcagttacattgtctaattgttctggttgttccagcatttgatattttagtgttctttaacttgtgccaatgacgaagtttcagttaatttcttaacaaatgtattttaaagggtgccatgtccttttgcaccagttaccatagcagggatggtgtgaaatcactatgcccgtttctaagcatagatagaagttcagatagcatattcagtagttaatgtgcgcagtcctaaactattgtgtaagtattgaaggctgaaacgccatgaattttgttccggt

SEQ ID NO: 35196 - DNA, 269 bp, Setaria italica
  Peptide Sequence Number=SeqID_101170
ttctgacaggaataaactgaggcaaagtagcttgctagcttcttttcttgtacgtaggagctagtgagtgagagagatggcctttgatgtgtgatttcctcttctttttagatgttttgttgtaactttactgcaatggtgcgtgcgtctactgatcgatcgccctttttcgatgggcttgtatatgaataatgtcagcaatatatgtgcatgggagtttaataataagtaaacagtatgatggcatgtgttatgtaataaaaaaaaaa

SEQ ID NO: 35197 - DNA, 264 bp, Setaria italica
  Peptide Sequence Number=SeqID_101171
cctcctctcaccttcttgcgccggaagaagggaacgccggcgaggcggcgactccacacccaccaggcaccagggcgggaaatggcggagcagccggcgccatccaccgcggccgcgcccgccgccgcggagcagacggaagcggagaggctggatgccctggaccggatgctcacgcggctggccctcgccgacgacgcccgcctcgcgccggtgctcgcccgcgtcctcccctacgccatcacctcgctcgcctcccccgcg

SEQ ID NO: 35198 - DNA, 242 bp, Setaria italica
  Peptide Sequence Number=SeqID_101172
aagggggaaatgttttgattccgaggaagcacgagctcgtacagcgatctgagatggcggccgtcctctcctctcctctcctctctaggaggactgcgtcttcgacgtggtgttggggccgggggagcaggatgaccggaaggcgtcgatgtgcgcctggcacttgacgcggtcgcccttgttctcctccaggcacctccgcagcgcctccacgtcgcacgccggcgccctaggctgctttg

SEQ ID NO: 35199 - DNA, 331 bp, Setaria italica
  Peptide Sequence Number=SeqID_101173
gtgctctctacatcacaattaatttctgacaaaagaagaagaatcaaatcgaacaagtataccgcggcatttcatgcttacacatgcacgacacaaaacactgttcacattgcacctcccaccaacaccatcagttcatcagaagagcagatcatcgttcgtcgagctgaacccgccgtagatgtcccccatgttgagcagatcgaagtacccgctgcctgcaattccggtggccgcgccatggccggcggcggcagcgccgattcttggtggtcctggtgcagcggcagcgcaccgtagctgccgctcatccggtccccgaaggcgccgc

SEQ ID NO: 35200 - DNA, 279 bp, Setaria italica
  Peptide Sequence Number=SeqID_101174
ctttcttttcttttgttttttttttgtcaagtatgctattgaagaaatactgggtccagataattaataggagactttagacacagcagagatttcttgttttagaagtgccgtggaagattagtgattgtatcatatatgttgtttagactaatagtatgtactacgtaaaacagatgccgagtttccaacttatttttataaaaaaaatctaaactatgtataacagcagtttgaacctttagggagtaatacatacagtgccagtgctcaagcctt

SEQ ID NO: 35201 - DNA, 344 bp, Setaria italica
  Peptide Sequence Number=SeqID_101175
ttaccttgctggtacaggaggtggtgagctcgaatttgttgcaattgaggaacctattgtcaaggttaggcttacgggtccagctgctggtgtgatgactgttcgagttgcccttactcagaagctccgagaaaagattcctaaaatcgcagctgtccagctattgtcgtaagcagcctagaacatttagaagccagccacaaccacaacaatgtaaatgttctaggcagctgtccagctattgtcgtaagcagcctagaacatttagaagccagccacaaccacaacaatgtaaatgtatttgcaataatcataatgtgtagccaaacacacattaggaggct

SEQ ID NO: 35202 - DNA, 1089 bp, Setaria italica
  Peptide Sequence Number=SeqID_101176
cttttttcctggaaaataaaagacaagaacaaggcaaaacagccacgaagagagctccacgattccacccaccccgaatcttcccacggggctccagccaagaaccgcgcggaacaagacacaccacgcttctcttctccaacgatgcagacggcggcggcggctgtggcgtgggcgccgggcccatcgccatccacctctacctcctcctcctcgccttcccccttcagggtggggtttgcgtcgacggccgtgccggcttcttccgcgcccaggcttgtcgccgcgtccgcttccctggcccgtcggcggcggcggcggcaagtggttcaagctattgccaacccagaccccgcgatcgagctgtcgttgactgctgaaaatgttgagatggtattggatgaagtaaggccataccttatggccgatggaggcaatgttgcgttgcatgagattgatggaaacgtggtgaggttaaagctgcaaggagcatgtgggtcatgcccggcttcagtaacaacgatgaagatgggtatcgagcgacgcttgatggagaaaataccagagattgtagcagttgaacccatcgctgatgaggagactgggcttgagttaaaccaagagaacattgaaaaggtacttgaagagattaggccttaccttgctggtacaggaggtggtgagctcgaatttgttgcaattgaggaacctattgtcaaggttaggcttacgggtccagctgctggtgtgatgactgttcgagttgcccttactcagaagctccgagaaaagattcctaaaatcgcagctgtccagctattgtcgtaagcagcctagaacatttagaagccagccacaaccacaacaatgtaaatgtatttgcaataatcataatgtgtagcctcctaatgtgtgtttggctccacctcagctattaacaatgatcgttacagaatgttgtaaggattcttttgctggatggatttataatagagttttatttcagtctgcaaaatctgtgcttcgtttttttccatgttgtaaacacgagggaatataaactatgcccagttggagcctaatgaagtt

SEQ ID NO: 35203 - DNA, 309 bp, Setaria italica
  Peptide Sequence Number=SeqID_101177
gggccggccgccgccccccgccagcacgcggccaacggggcgtcgctcaagccgtatctggccggcgaggtgacggcgctgacgatgggactgtagatgtcgccgtagaggaaggacctgcccgggtgggcgcgccggatctcgtcgagcgtccgcctcagctcgcggttgtgcagctcggcgatcccgttgagccgagtgttgcagccggtgacgcggtcgtagtcgcccggcgcgcccgggaacagggcgagctggtacggcgcgcagcctaacggcggcatccctgtggccaccaccgccctcgcg

SEQ ID NO: 35204 - DNA, 479 bp, Setaria italica
  Peptide Sequence Number=SeqID_101178
cctcgacaaggcaaaggagctctgcgcgcaggtgcaggtggccgacgtcgagttcgaggcgttggagggggacgccaggaacgtgctctgcgacgcggcggagaggcaccacgccgagatgctcgtcgtcggcagccacggctacggagcgatcaaaagggctgttcttggaagcgtgagcgattactgcgcccatcatgcgcactgcaccgtgatgatagtaaagaagccaaagcacaagcactgatcaatgcaacgatctgatcgaccggtatttcgcaaatatatgttttgccaaattgtgtgtgtgcgttggggtgtgaacaattcgatcatcaaccatcacatctccggtcggttactccaagtatccgaggcaatcattcgacgtgtggtttgagtatagtacaaataactgttgtctattgcctcaaacattgtgttttgttattcatgcaactgctatggatgtattttgt

SEQ ID NO: 35205 - DNA, 403 bp, Setaria italica
  Peptide Sequence Number=SeqID_101179
cgcgtcatcgagaaagccaaggagctctgcgcgcaggtggccgacgccgagtacgaggcgatggagggggacgcacgtaacgtcctctgcgacgccgtcgagaggcaccacgccgagatgctcgtcgtcggcagccacggctacggagccatcaaaagggctgttcttggaagcgtgagcgattattgtgcccaccatgcacactgcaccgtgatgatagtgaagaagccgaagcccaagcattaagcgcgatgcggcaatctgctgactgatgggtattccacaagcaaatatatgcgtgtcgtcaaatcctgctgtatttatctgtttgtgaataataattgggtcatcaacgatggcatccctggttacttggcacatattgcattgcacgaaccaaaag

SEQ ID NO: 35206 - DNA, 709 bp, Setaria italica
  Peptide Sequence Number=SeqID_101180
ctagttggtgcgctcgcgtgtcgccggttaccgccaggcgccagcgtccgttccccgcaagcgctttccgtgctagtctctacggtttcgtgccgtttctaccgtttcttccaggctctcgtctggccgtctgggggcctttcttctaggctcgtctggggagcagagggccagtcggccagacccagaggtcactgcgagagagcgtgtcgcgcgacgaagccaagcgagctagtagctatccgaacaaggggtcgaggcatggcggaggaggcgcctgcgctggcggctgcggcggggacgaagatgacgatggtggcgggggtcgacgagagcgagcacagcttctacgcgctgcagtgggcgctgcagcacttcttcccgccgggccagccgcagcagtaccgcctcgccgtcgtcaccgccatgccctccgccgccgtcgggctcgccggcacaggcgccttgatggatgtgcggtcgttcgtggaggcggacctcaagcgcgccgcgcggcgtgtcctcgacaaggcaaaggagctctgcgcgcaggtgcaggtggccgacgtcgagttcgaggcgttggagggggacgccaggaacgtgctctgcgacgcggcggagaggcaccacgccgagatgctcgtcgtcgttcgttcggtctagtcctacggtcttacggtagtcgtattctaaagggttctttgtt

SEQ ID NO: 35207 - DNA, 991 bp, Setaria italica
  misc_feature (935)..(991): n is a, c, g, or t
  Peptide Sequence Number=SeqID_101181
ctggcacctgctgccaagtgcgatccgttgcttcttctaggcgcttcgtccggggagcgggagcggagcgcgtgcttgttgcgggaaggaacccaggggagctgctacccgagagggaggagatctagctaggagccatggcggaggaggcgtcgtccgcgccggcggccgccgctgcggcggggaagatgacgatggtggcgggggtggacgagagcgaccacagcttctacgcgctgcagtgggcgctccagcacttcttcccggcggggcagccgcagcagtaccgcctcgtcgtcgtcaccgcaaagccatccgccgcttccgccgtcggcctcgccggaccaggcgcggcggacgtgctgccgttcgtggaggcggacctcaagcgcacggcgctgcgcgtcatcgagaaagccaaggagctctgcgcgcaggtggccgacgccgagtacgaggcgatggagggggacgcacgtaacgtcctctgcgacgccgtcgagaggcaccacgccgagatgctcgtcgtcggcagccacggctacggagccatcaaaagggctgttcttggaagcgtgagcgattattgtgcccaccatgcacactgcaccgtgatgatagtgaagaagccgaagcccaagcattaagcgcgatgcggcaatctgctgactgatgggtattccacaagcaaatatatgcgtgtcgtcaaatcctgctgtatttatctgtttgtgaataataattgggtcatcaacgatggcatccctggttacttgttcaatctacatgcggattgagaagcgcataataattgttgtccagaacctcaaaagtgtgtttcttttggttcgtgcaatgcaatatgtgccaagtatatgtgattgcaaaatatgttgtacaatgttttagctatgagatatttggtaaatttaaannnnnnnnnnnnnnnnnnnnnnnnnnnnnnnnnnnnnnnnnnnnnnnnnnnnnnnnn

SEQ ID NO: 35208 - DNA, 1006 bp, Setaria italica
  Peptide Sequence Number=SeqID_101182
taatagaataatagttagggttacccccttagaaccaagaaacttttgcaagttccaaagtcacatagtttaagctggtgagtgtgtgggttcaccagaaggttttgtggcttgatatctctgtggcaaacaccaatactaccatgaatgtaagccagtgccctacatatctggtacatatacagcttcacataaataagtggcatacgttggttcatcttgttgtgatgtttcacgactcgatgaacagtctcaggcacatactcaagaaccaagtttagatacagttcatccttctcggtagttgaaaagaagcaatgcttcaaagcgacaacattagggtggtcaagaaggcgcatggtctgcagctcacggttcttgtaacgcttatcctgaagaaccttctttatggcaacagtctcacccgtctccaagcatttagcctggaagacaatcccaaaagaaccttggcctacaatgcgctcagccatgtagctcaccgtctgtttcggttgaccattcttgccaccagtagtagtcacaattatgtgcccagtttctgttcctttcccattaattatggttgcttcaacttccttatcatctctaatctttagctcgttcatgtgatcctgcaacttatcagcaccaacgttggtgctgctgctgtgcttgtacccagatggggctacacctgctgaagccatctctgaagaagaaggggcttacaccaatgccaactcagctttgcatcaactcacaacagctgtagtagatctaatgcgctacctctccaacctcctcttccgctgctcttcctcctccgccacgggaatctctgggctcccctccaagatttgcttcccccttctctcttcctcctctcccccctctggctgctctcgctcccgcgtcctccccctttcctcccctttctacctccctcccccgcctcttctttccgcttgtcgggacgcaagcaaagcagaatactgcttccctaact

SEQ ID NO: 35209 - DNA, 1341 bp, Setaria italica
  misc_feature (1)..(40): n is a, c, g, or t
  Peptide Sequence Number=SeqID_101183
nnnnnnnnnnnnnnnnnnnnnnnnnnnnnnnnnnnnnnnncttaagaaatcatcgcaagagcaaagccgataggccaacaggtagcaagtggttcagaaacataaaacaaggtagtagcagtctggatctggagacgaagggactaggaaaaacgaagtgaatccatacatagatcaagctacaataaatacattcatactgctctagaacatattacaagatcagctatggcaatctcaggtgagcgtcagttagtaagaggtggggtgccgttacatgtcattgcgacatacactactcagctacgtacacaggccacggctgtcgtacaagcaggtaacctagcatcttcaacgacggacaggcgtgcatgccaccaatcatccaacatcccaagggaaaatgcacacttgcagagttccggtctcaaggcacgatcatctcacaatccaacataggggcattgcttctttgcgtgttctgggatcaatttcgcgacaatgtctgctgggactcctttcagttcatgcggcttgaagttgaaaaggggtggtagaaagcggccatttggaagacgggtattagggtctcgaagctcatcaaagaatgggtgaacaagtgcctcaacagcagtgcatctcagattgggggagtactggagcagccgggagaccagatcaacagcttctggtggcatccttttgtgaaacaccttgtgccatgggtgtgctttgatttgtgggaatttaaactctgtgtagttcgggttcatgcatttaatttcttcccttgtaggggtaccaaggaccttgatgatttcaacaagttggtccacaccactttcaccgggaaacaaaggctgccctagcataagctcagcaagaacacatccagcagaccaaatgtcaattgctgtagtgtactcagtggcaccaaatatgagctcaggtgccctgtagtatcgggaacagatgtatgatatgttgggttcccccttgaccagaacttttgcacttccaaagtcacatagtttaagctggtgagtgtgtgggttcaccagaaggttttgtggcttgatatctctgtggcaaacaccaatactaccatgaatgtaagccagtgccctacatatctggtacatatacagcttcacataaataagtggcatacgttggttcatcttgttgtgatgtttcacgactcgatgaacagtctcaggcacatactcaagaaccaagtttagatacagttcatccttctcggtagttgaaaagaagcaatgcttcaaaagcgcaacaactatgtgggcaaggaggcgcatggtctgcagctcacggttc

SEQ ID NO: 35210 - DNA, 344 bp, Setaria italica
  Peptide Sequence Number=SeqID_101184
gactcccataaaaagttatgctcatttctagactgtgggggtaagaacatactgtcaaacttctgcaatagaatatgaggattcaaaatttgtttcatgttatccaaatggtgcaaatagaaaatgaaaaacgcggacaccacacaccttattccaaataaacatgtaaacaacgaaccagtgaccagcctaagttacaggacttctagtaccgctgagctttcaaaaatttgcatctgaatgtatgggtagttctgcaagtactctctggtgtaattagtagaagcaggccaatatgggccacagaatagcacccgtgtaacagcaccatggctattgctccc

SEQ ID NO: 35211 - DNA, 523 bp, Setaria italica
  Peptide Sequence Number=SeqID_101185
tccaaagggtttgagcctcttggcaacttcaatgccaatggctccaaatcctaggataaggactgttttgccaaataatgtatctccaacaggaacaccaaggtctttccgattcacagcagtatccatctccttttgcttacgcagaacaccaagagtaaggtagattgccatttctgcacaagacaccgcatttcctgtcgtacttccaggtatccgtgctactttgattttgtgttctgtagcagcgtttacatcgacaccttctaacccaacaccatactgcataataatcttcatctgagttgccttggcaatgatatctgaatctatacgcttattttttactacacatatatgatagttttgaataacatcaagtacttgttcaagacctacttcatcaacctgaatgtatgggtagttctgcaagtactctctggtgtaattagtagaagcaggccaatatgggccacagaatagcacccgtgtaacagcaccatggctattgctcccacatgaa

SEQ ID NO: 35212 - DNA, 541 bp, Setaria italica
  Peptide Sequence Number=SeqID_101186
attaaaaacaaagcttcttgttaatataagaacataaagaaattaggatttgcagaagcatgggtaaaaaatatggtgcttggtgtactttttcctgtgcttcaacatgggaaaacatgagacagtatggaaacaaaggggatacaattcttcaacgaggcacatctggcagtgtataagtactggcacatagtagtaaccataaggtaatattaacaataaataaatgcaggatatttgtcaaaggaaaaggaaaaaaaggaagtagtttagttgtgtttgtttttctaagtttagcacataaaaaatctgagacagaagtgagaaataaagggtaccatctgaaaggcaggacactttgagtctttctatatactatagcaattacaataagaagtagtggcccagagaaatcccccacaacccccccaaaaaaaacagagtataaacttcttaggttctctgcagatatttgaaaatattgagtgtttggattacaattcatcgatctcactacagcattctgtgtcagatctaggca

SEQ ID NO: 35213 - DNA, 274 bp, Setaria italica
  Peptide Sequence Number=SeqID_101187
ttgtaaggggtcaatgccgcccaagcacccaacgtacaggacggcatcttgtcattcagagctgctgggacagggacaggatcgtttttgatagcatcgacttctcaaggctaaggtcactaacagtatttgggaaatgggaatcatttttcgtctcccaaagtatgaaggtgcttagggtgcttgatttggaggatgcttctaatgtgacagataaagcctgaggagattgtaaagcagcttcctcgcctgaagttcttgtctctgcgaggaa

SEQ ID NO: 35214 - DNA, 267 bp, Setaria italica
  Peptide Sequence Number=SeqID_101188
gacgcagctgcggtccgcgccgcgggcgccggtgcccgagcgcagccaccacggtcgccacacccatgagcatggccacgagcagcacctcacccccaccgacgagtccgcctggatgtcgctcatgccacggcgggctctgcggcgcgaggaggcgttcgactggctcatgctctaccgcaagctccggggcgccaccgccggcgcgccgcggcccgggttgcggccggggcgttcctctccgagggccctccctgcacgacgtgc

SEQ ID NO: 35215 - DNA, 206 bp, Setaria italica
  Peptide Sequence Number=SeqID_101189
acatcccccggtcggcgtagccccatatgagcaggttccatgggaacgcccgcgccttccatgccgcgcgctcgacggcggctcgcgcggcggggaggtcgccgagcgcgatgtagaaggaggcgagcctggggagcaccgaggggtgcgcgcccaggccgagcgcgacggcgcgcgcgtgcacctgctcgccggggaagcgggcg

SEQ ID NO: 35216 - DNA, 1007 bp, Setaria italica
  Peptide Sequence Number=SeqID_101190
cttcccgctctgtgaacgccctttcagtcatcatcaaccggtcgttgatgtctctgaccttcaatggacagcttctccattgtgcccaaattttccatgtccgtagagccttcaattcagaatccactttcagaactgcccttctgaattctttgattgacttgtgcaggggagataaactgacaggcattcccagtactctctcatttatacccattactccattctcaagctctgtggcataatagctgtagttgaagggtaggatctcctcatctgacagccgcagagcaacaagcccccacatgcttgccgctgcgacatgcctctggaacaagggatctccaaacttctccatccatatgaagtcatcatacaagctatgatagactggatagtctgacccaatagacatgtccactgagggaataccaatgtgttgaacaaatgcactatgatcggaccctccaccgcctaatcttccgatcaagggagaggtgttagaggccatccacaagtcatacagactctcagttctgttatccggattttgtacctgtttactagcttctttaagcaattcatcaagttgaggagttgctgatgcataaaatccacgaccaaacaccgcagaatcaacattcaggtaagcaacggtccttgaagttagcattgctctgttctcctcgacccattcggtggatcctatcaatgcatactcttcagcatcccagttgcacaagatgatggttcgtcgaggtctccagcccttcttttgcagctcggataaccgttgagctagctcaagcaaggctgctgtcccactgtttggatcaactccccaaatgtccatgcatcacggtgatttccaaggattacataccgttcaggttcttctttcccttcaatcaccgaaataacattctgaatggtagccattgtctcattacctatgtaggtcaggttgagcaccgctggcccgggccaagcagaccgaccggcgcgcc

SEQ ID NO: 35217 - DNA, 788 bp, Setaria italica
  Peptide Sequence Number=SeqID_101191
cctgcttatacattcacttttcttgtactcttagaaacattggttccttgcttttggtcggatggtaaaattgcctgagcagacgaactctaccatcttgaacagctaagatacgggtcgcttatatattccttgttacaagattcactgtatcattcatccagtattgctgctgcgttcacttatatagcaagttctacagcaaaaaggaggtggtatcaagcataacttttcatgttagccctccagttagaactaatgctgcctgatttatgactctggcgaccctgtgaatctcattctgtacagcctgccaggattctaatgtgcttgttctctttgctgtctgaatggcatcatcaatacctggatatatttcagctccataatcgttgtgcagtgaaggcccgtaaatcaggtgtttgtaccatggtcttccagacaacccttcccgctctgtgaacgccctttcagtcatcatcaaccggtcgttgatgtctctgaccttcaatggacagcttctccattgtgcccaaattttccatgtccgtagagccttcaattcagaatccactttcagaactgcccttctgaattctttgattgacttgtgcaggggagataaactgacaggcattcccagtactctctcatttatacccattactccattctcaagctctgtggcataatagctgtagttgaagggtaggatctcctcatctgacagccgccgacaagaagacaaacaaagacccccaacaatagactttagaccgtacttagta

SEQ ID NO: 35218 - DNA, 1758 bp, Setaria italica
  misc_feature (1)..(24): n is a, c, g, or t
  Peptide Sequence Number=SeqID_101192
nnnnnnnnnnnnnnnnnnnnnnnngttttagtatcaaaagaggttaaactgaagcatcaattcacataatggcatgtcgagctcaagcagcaattaatggtggtacatgtacacataaagctagcgctagctggctcatcaatcgcccaaattaactaatcaattgtataccccctgcagtgcactgcatctggcatctgcagatgcagcaccacccctaatctgcacccattcattaatcctatcaataacttgccactactgacacaatcagagaagtagtactatgtacatagatcaagacaaggaacctaggatggggggaattaattaacaaggaggccctaatcccctggcggcctggacggataataatctagtcagacccgaggaaggagaggccagacttggcgggggcggtgacgatcgacgacgcatcagcgaactgtcaccaacccaagcgagaagagaccaagataatcaatcaaatcaagcaattaatcaaccaaaccatgtgatcggcgcgggtgagcagacccggcacccgatcgcatgttcaggcttcagtgcttccagaagtcggcgacgtagaggagcgggtcgtcgagatcgtgcaggaactggtgcgacgccgacggcgtcaccgccgacgagatctccgcgcacccgccgccggcgttgcggtcggtgctgagcccggtctcgcgggacgggctgagcaccgacgtcgtctgcccggaggccacctgctccgccttgcagtacctccggatggccggggtcaggtcgccggagttcaccgccggcagcgagaagtactggccggagtagaacatcggcggctgctgctggtactgcagcggcgcgtgctcctccatcttgaccggcaggtagctagtgcccggcgccgcggcggcgtggcccgaggtggacgcgacgcccttgaagtcgatcacctcgtccacctcgccgccgaaggaagggtccatgaggggaggcagctcggcgctgtcgaggagctcgctgatgaagcccaacgagccgatgcgctcgagctccgcgccggccgccgccattgcgggctccgtcctcgccgccagctccttgttgaacaccttgcacacggcccactcgtccttggcggagcgcggcagcgcgtggggaagcttgccctcgaggcggaactcgtgcatgacccagccggtcttctccccgcgcggggcgcggccgcggtagaagacgagggtcttcttcatgccgacgaggatgccgcggcccctgaagatctccttgtccttgccggtggccttccagtagccggtctccgtggcgcggttggtccgcgtccccgtcgggtacttgcgatccttgtggcagaagaagaaccactccttctcccccatcttggcccggcctgggagatcccacggctcgcacttgttgaggtcgacctcgccgatgacgccggagacgaagcggtggtcgagggccttgtgggtgaggtagtgcgtgatgatctcctcgtcggtggggtggaagcggaaccccggcggcaggtcgagctgcccggcgtcctccacctccgcctggtttatcacggacacctcagacatctccgccgcaccgaacaacaccagcagcagcctccctttctctcttccgctccaagcctcgacgagaggaagcggagatggctgcctcacagggaaagagagaggagaggtagaggcgtgtgtgaaagagagaggtgggttgggg

SEQ ID NO: 35219 - DNA, 290 bp, Setaria italica
  Peptide Sequence Number=SeqID_101193
ggccttcagagtattgctggagaggatctgaagaacggcggagttggaccggggcacgcagcgcggcaacttgaactggttcaccggcgcaccgagggagaggtaatggcggagcacctcctcaaaggtgccccgccgcagcacccgcaactccagtggcccgatggcgcgcgttatcctcgagcccaagtacccggcgtcgacgaagcccctgtccagctcgtcgcagcagctctgcagtagtagcttgccatcatcactgacctcaccgtcgttgagctcccagaacg

SEQ ID NO: 35220 - DNA, 522 bp, Setaria italica
  Peptide Sequence Number=SeqID_101194
gtgtggctgtcggcggcggtcggggaggaggcgggccggcccgtggcgttcgcgcgcgcggccggggacggcgtgttcaacgcggtggtgtgggacgtggtggtggagccgtcgtgccagggcctcgggctggggcgcgccgtcatggagcggctggtgcaggacctgcgcagcgacggcgtgggcaacatcgtgctctacgcggaggcgcgggtggtgggcttctaccgcctcctcgacttcgccatggatcccgacggcatcagggggatggcgtactaccgatccaagcaacctaccgctactagttctcaatgatgatgaaatcatgcatggaaataaagcacactgttggtgttggaacttggaaggggaggaatcaccacaccagcggaaacaagcaagaattgcttgcttcctagactagtgcctgcgtcgtcggatggagcaggcggccatgaggatgagcacgagcaggacgaggacggcgaggaaggtggcgacgacggcgccgctggtgcg

SEQ ID NO: 35221 - DNA, 228 bp, Setaria italica
  Peptide Sequence Number=SeqID_101195
agacgttttggaaaataccatcaacatgatcaacatagtaggcattagcaaagggctggaagtggtctgggatccctgtgatttttccatcctcaaatgtggagatgtgataggagactgcaggagactcaagcagatactggataacgtactcggcaattctgtgaagttcactcaagaagggcatatcattcttcgtgcttgggcaaacaggcccattacaagaag

SEQ ID NO: 35222 - DNA, 930 bp, Setaria italica
  misc_feature (1)..(22): n is a, c, g, or t
  Peptide Sequence Number=SeqID_101196
nnnnnnnnnnnnnnnnnnnnnnatcgtaatccaaccaactttattcataccgtaaaccagcctattacacccaaagcaatcactctacagacaacagatggtccgaattggtaacaaacgttctgaattgccatactctgacgatagtctgtcgatactactgggaattatcttggatacaccacagatcatatggttcagaaatacacagcaagtaggtcaccactcggcaagcgctgatttcacagtagtagctccagatcataagactacttcatccgctaacagggagagacctctctcttggtgaggatctgcggtatcgctcctcataggggctcccgcttcttgatctgctgtcaacaggtgagcgtgagtaggacctctccctgagcctgtgttttggattcggaggtgaaggagacctcgagtagctgcgtgaaggagaacggcccctagaataaggaggggacctagagcgagaatatctccggtcataggaacgacctctgactctgtccctagctctcatctcctgaggcttcttcctattatcctccgcaaatacaacagttatttgcctgccaagaactatttgaccatccatgtagtactttgcatcagcagcatcttcaggatcataaaactgcacaaacccaaatcctcggggctccccagtgtaataatctcttgggagatatatatctttaactcgaccaaactgtgcgaatgggcgacgaaggtcttctggcctgcagtcccgacggagattcctgaccaaaagctggttggtagatctctaccacggtcaccattataatcacggggagtcgggctgcgagcccttctcctgtaaccccttggtggcgaaggactgtaactgtaaccccttctcatattgatcgcaaacgaggccggatcagtcgggag

SEQ ID NO: 35223 - DNA, 426 bp, Setaria italica
  Peptide Sequence Number=SeqID_101197
gtgagcaccagcaccattccaatctccctgcagtcacatgcgcaaaggttacatataagatcagcaggatgatttcagacacagaccaaaaacccgcgcatttggtaaagaaataatggtcaccggaatcggcttgggatcgaaggagacgaccacaccggcgatctcggtgatcctctcaagaatgtagcgagccacccagatctggtcgccggcggagatgccgacggcggggccaacctggaattcccactgtcctggcatgacctccccgttgatcccgctgatgtcgatgccggcgtagaggcaggccttgtagtgcgcgtccacgatgtccccgcccgtacgacttgttccgctccggcggcgcagtagtaaggtcccattaggcggctaccctggcactaactacaacaactagaagta

SEQ ID NO: 35224 - DNA, 499 bp, Setaria italica
  Peptide Sequence Number=SeqID_101198
cggcggtctcgtggcggccggtgaggcggcgctcgttgccgtcgccgtacgcggcgatgtgctcccggtggcggaggcccagcttctggatcgccttcttgatcacctcgtacccgccgtcgctcctcatcgacttggtgctgtagttggtgtgagcaccagcaccattccaatctcccggaatcggcttgggatcgaaggagacgaccacaccggcgatctcggtgatcctctcaagaatgtagcgagccacccagatctggtcgccggcggagatgccgacggcggggccaacctggaattcccactgtcctggcatgacctccccgttgatcccgctgatgtcgatgccggcgtagaggcaggccttgtagtgcacctccacttcgtcctccctcccttccccagttcagatctactccactgccacctcctccctccctcccgagccgcctcccatggcgtctcccaccggcaaccctaaccctaacccccccta

SEQ ID NO: 35225 - DNA, 1838 bp, Setaria italica
  Peptide Sequence Number=SeqID_101199
ggacgatattattgccaatttcatgttataagttcaatcccctgccttacagtggtagaagtaaattagagcagtaaacaatctgggcatggaaatcgctagctctgatacatgcgcggttcctgactcagtgatgatcagagtatcagacgctctgagcttcttcttgtccataattttgtttcttgaagacaaatcattatacgacattttagcttttctagatgtatagatacattgagctcctctaaatgcatagatatgataagagatcgtccaggacagaccagagccgaacacgcgcgaagctgattctgcacgtccaagcacgcaacgagaacgagcacacggcaatttattattgttattatctgaagatgtctgacagcgtcagtctcaatcgtcatctccgcagccgcgcggctcacacacacgcagacgcagagactcgggtacgaagaaacccgtggctcctccgcaggatcgcggaatcatcagggagccgcgacgccgttgccgttggagtggctggggttccacaggagggtggtctccgcgatcagcgaggtcaccacgtacgggtccatgttggacgccggcctccggtcctcgaagtagcctttgccttccttctcggtgtcgcggccgacccgcaccgacgcgccgcggttggcaacaccccagatgaaggtgttgatgtcggcggtctcgtggcggccggtgaggcggcgctcgttgccgtcgccgtacgcggcgatgtgctcccggtggcggaggcccagcttctggatcgccttcttgatcacctcgtacccgccgtcgctcctcatcgacttggtgctgtagttggtgtgagcaccagcaccattccaatctcccggaatcggcttgggatcgaaggagacgaccacaccggcgatctcggtgatcctctcaagaatgtagcgagccacccagatctggtcgccggcggagatgccgacggcggggccaacctggaattcccactgtcctggcatgacctccccgttgatcccgctgatgtcgatgccggcgtagaggcaggccttgtagtgcgcgtccacgatgtcccgcccgtacgacttgtccgctccggcggcgcagtagtaaggtccctgagggccagggtagccgcctaatggccagccaagaggccagttggtgtccttctgaagaagcgtgtactcttgctcaatcccaaaccatggttcttcagccttaacatcagggtggctgaagatcttcgccgccccgtgccgcttgttggtcggaatcggctctccgttcggcgcatagcagtcgcacataaccagtatgttcttccccttcctgaatgggtccctgaagatggcttgaggacgaaggatgacttcactgtcgtcacccgtagcttggccggtgctggagccgtcgaaattccatttcggaagcttgctagggtcatccacaggtccggacagtgtcctggctttgctcctcacatccatcccagaaccgccaacccagatgtactctgcgatgatcttctcggtgcagtccgagaggtcgaggttgacgaggtcggtgagcagagccatggcgacgacggggatgccttcctgatgatcccctctcctcctcctcggcaagggcgctaaggcagagcacgagcagtgactctaatggcagggacccctctctcttgcagtgtagctgcgcaggccgaggctcagagagtgtttgatctctgcgtttgtgtcacagccgtagctggctggttctctagaccaaagaaggaccaagtttaggtagtaccttacttagaaagaaagacgtta

SEQ ID NO: 35226 - DNA, 214 bp, Setaria italica
  Peptide Sequence Number=SeqID_101200
tcttatttgtgttgtgtttggtaggaagcttagctgagaacaaattgtgaggaagagtcaacttcaattggagtttgaacacgtagtgctgaaggtgaggatgcttaagcagttctgaagcacttggtctgtgatctggacttttgcgcaacatgcttttgacgagtcccctaaatgcaccagagtacatagttggtagaggagctacaacaga

SEQ ID NO: 35227 - DNA, 421 bp, Setaria italica
  Peptide Sequence Number=SeqID_101201
ctccaaaaaagttggaataacttataatttggaacagagggagtactacgtaagcattacagtgagagactggattctatctatataatcttatacattccgtaagccctacgaggaagacgtaaaaattgtagcagtggttaagttgatgtaatgttgaagcttctaactatattctatactcatggtaaattaaccatagctagttgggcacttttagttgtatttttggtttcaaccaatcagacacttctgtatatcatatcccaaaacgaaatacaaagagtcaaagactaatcgcaagcttccaattcgaatagacagggtatgcagatgccatgatcaatcttatagaatatttgcagaagtgcactcgtgtcgttctctgtgagtccttggtgcttacattctctctctctct

SEQ ID NO: 35228 - DNA, 343 bp, Setaria italica
  Peptide Sequence Number=SeqID_101202
cgatgtttcagttgattctgttaggtttattttttcctaattatattgtcttcacttagactgctctgagtaatatgccacattctttttgttcttttcctattataatgttggccttgtgccttctaaaagatactgaaccttaaaaaggagagtttaatgcatattatgaggtccacattgtattgcaggaattttaaccaaatcagaaaatctgtagttccaagaagatcctgcacgttgcagacattaaatacagtacgctcaattttatggctattttggaattcagttgtgcaccactgtaacagaaattggtggatcttgatgttctttttgtcag

SEQ ID NO: 35229 - DNA, 1103 bp, Setaria italica
  Peptide Sequence Number=SeqID_101203
ttttttttttttttttaattttttttttttattggtgaataataatatcctcatagtactaataaactgaaataccagtacatagtaatttactccatatcaaacgccggcttgatctgtctagacagacgaacagatctcagatcaattccgtcctcggcggaaaaactatttacacaaggttcctccgtctctcacaggctactaaacaaaaatacaggctagaggaccaaaaaaaaacaaaagtaatattcctcaaggcaaaaaggaaagaaactactaagtcgtcagctaaaccgccggtgtgcctagttctccgccggcggcggccagttcagatccagatcgaaggacacctccttctttgtggtcaccgggggcggcgaaggggtgtgatcgaccaccgacgaggagtcggagtcgctctgcgcgactgcggccacggtgaccggcggcggggcaaccttgagcatccggtagccggccgccgcggcggcggccgctgccgcctgttcgtagaagaagtacggatgcggcgtcgggcgcgcgacagggtagcccttgaacggaaaccgcatgccgccggaggagaccgcggtcacggccgccgcccggtggaagagatcgagatcgagggccgggggcagcggcatggcctgcataggcgcctggacgccgcaggcgctgccgcctccgctcgagtccacggtgctgttgctgctggggctgccggcgccggcggcgacggggcactgcgacgcgaacgggaagttggtcttggcctttgcgccgcggaactcgcgcgcggcggcgtcgtaggcgcgggcggcctcctcagccgtgtcgtacgtgcccagccacacgcggctcttcttggcagggtcgcggatctccgcggcgtaccgtccccacgggcgcttccggacgcccctgaagtgcgggcccatgccaacgcctccgactccaccgccgacgccgagaccgaggccggtcgccggcggcaccggcgacttgtccgccgcccggggcgccatggcgtacaagtggcgtgtgtgtgcgggtcttccggttcagggaggtgctgcggggcgggggtgtgtgtg

SEQ ID NO: 35230 - DNA, 332 bp, Setaria italica
  Peptide Sequence Number=SeqID_101204
tcctgggcggcgccgttgaagatgacgccgacgatgaagaagacgccggcgatgagcatggtgaggcggcgcccgaggcggcgcgtggtgtaggaggcgaagaaggtggccgtgagccccgcgaggtagagcgacgacgtgaacagctgcaggccctggttgtcgtacttgcagtagttgctctccttgtcctcgtgcttcttccgcagcaccgccgggaagaacttgcccaggaagtcgtccatcgacgtcacgccgcctgagatgccgacgtcgtagccgaacatgagaccgccggtggccgccatgatgcaggaaatgatcacgatcgg

SEQ ID NO: 35231 - DNA, 929 bp, Setaria italica
  Peptide Sequence Number=SeqID_101205
cataactccagagattgtacggtcatctgttgttgagaaatgcggcttccagccaagggcccaaaatactcaggtctattcaattgagaacagcgatcagtgtctcattggaactgctgaaattcctgttggaggcatccacatggactcaatacttctcgaatctgctttgcctttaaaatatgtagcctattcacactgtttccgcacggaagctggtgcagcaggtgctgctactaggggcctctatcgagtacatcaatttagcaaggttgagatgttcatattctgtcgaccagaggaaagtgacaaatggcatgaagaactaattacgattgaagaggatctttatgcatcacttggacttcatttcaaaactttggatatggcaactggggatttgggtgcaccagcttaccggaaatttgacattgaggcgtggatgccaggcctagagcgatatggtgagatctccagtgcatctaactgcacagactatcaaagtaggcggctaggcatccgttatcgtccagcacccacagagcctccaccggcgaacgccaagaaagtgaaggcagctggcgggccaactcaatttgtccatacactcaacgcaacagctgttgcagtgcctcgtctgatagtatgcattctggagaattttctaacaggacgacgggtcgattgtgattccagagcctctaagacccttcatgggtggactcgaggtgctcaccccaaaatctaagtgacctacagtcacctacagttgagcttgcggtatccgtgaaaaattgagctggatggataacgtagaaatgaactgagggtcatttgagttttgtgatttgggctcctgtttcataacatgccttaaatggtcttttttctttgcgttcttgaattcatgttaagcttagtctactagt

SEQ ID NO: 35232 - DNA, 840 bp, Setaria italica
  Peptide Sequence Number=SeqID_101206
tttggacttgaagaggatcttgttgagctgaccgataagcttcaacttgaagcacaaagtattcctaacgctacacatccagatgttcctgtaggcggtgaggaaagctctgttgtcaggaaggaggtaggaagtcagaggagcttcaatttcacaatcaaagatcaccttcagctgggaaaggaacttgatttatttgattttgatgcagcagctgaggtcagtggttcaaagttctactacttaaagaatgaagctgttttgttggagatggctcttgtaaattgggctatctcggaggtcgcaaagaagggtttcacaccactcataactccagagattgtacggtcatctgttgttgagaaatgcggcttccagccaagggcccaaaatactcaggtctattcaattgagaacagcgatcagtgtctcattggaactgctgaaattcctgttggaggcatccacatggactcaatacttctcgaatctgctttgcctttaaaatatgtagcctattcacactgtttccgcacggaagctggtgcagcaggtgctgctactaggggcctctatcgagtacatcccttaaagattatgactgattgagtttattgatttatgaaatttcagcatagcatgaaaaagtaggtgtagtgagattatgtggttcaatttttttgatttgatttatgaaatttcaccatagcatgaaaaagtaggtgtagtgagattatgtggtggttctattttttgatggcataaaacagtaattgataagcagtcttattttttgatggcataaaacagtaattgataagcagacttttcacttgctct

SEQ ID NO: 35233 - DNA, 532 bp, Setaria italica
  Peptide Sequence Number=SeqID_101207
ttacatgggagaaggaagatctcataactgaacttagggaggagctaagggtatctgacgaagcacatcagcagctattaaacatgatcaacaatgatgatctaactcacagcataagggaacggagaacaacaggagggattgaggaaagattgcccaataatcctagtcatgactctgtgtctaatcataccacctctgctcgcaagaggcaaaagacatctaaatctattactgcttcacttgctacaccaacacaaccatcatcttcaacagctataaaagcagtttctcttgggactaaaggcaaaaggacaaaaccatgccagaaggtatctgggggctctgcagtgaagcccacgtcatcttcagaaggtcctagtgcaagaggaccacttatgaatcgatattttcctggtggtccttctgctgaattttctgaagcacagaatgtcaacccgttaataggccgtaaagtcatgaatcgttggcctgatgataatagtttctatgaagtagttatatctgatta

SEQ ID NO: 35234 - DNA, 371 bp, Setaria italica
  Peptide Sequence Number=SeqID_101208
cccttacccccgacaaaccaaccgaccgaatacgacccaaaaccctaagcaagtcgcaacccaagcaagcggcgccgccgatcgccatggactcggaccaggaatcctccagcgacgattgggtcgtcctcgactcctgcacctcctccgacgacgacgaccgcgtcctcgcgctctcctccggctgcggcaccccctcctcgggctccgccaccgactccgactccgacgccgacaccaccaacatccccaaccccatcctcaccgaccgcggccgcaatcgccgccaccgccgccgccgacgacgccgagggcgtctacgcgctctcggacgccgaggacgacgacgcctaccccacccccctccccgc

SEQ ID NO: 35235 - DNA, 685 bp, Setaria italica
  Peptide Sequence Number=SeqID_101209
cacgtcgcaagcatctcatcacacagcagtcaagggggatcgtcgatcgggttgatggccgggaggaaggcgggcaacgcggcggcgctggtggcggtgctgatcgtggccgcaatggcggcggaggccggcgcgattaagctctgcggcgtggaccggacggcggtggacgcgtgccggtcgtactgcgccgtgggcagcgcggaggcgagccccagcaaggcctgctgcgacaaggtgaggcccgcgcagtgggactgcctctgcaagttcaagggcagcctccccgatggcatcgacggcgcgcgcgtcatggatctccagtacaagtgcaagtgcgactacccgccggccacgtgcggcgccaactaatcaagatcggcgccgcccggacggcgtgcagccgcttcagaaaacaagatgtcagcgagggcgacggctaatttgtgttggagtagccactaagccaccgtttcgtttcgtgtgttgtcatcgtgtatccgtggtgtcttgttgctttcagtgcttgtagcgattctgacgggctgcaggctcattgtgtgcaagcttgtgctcgtcgtcagtttatccgtcagcctcatgtgtacccttgtacgtccttcttgtgtgtgtccacgtcgcaacaataaactttacagattgttctggtccaaaaaaaaaaaaa

SEQ ID NO: 35236 - DNA, 308 bp, Setaria italica
  misc_feature (250)..(250): n is a, c, g, or t
  Peptide Sequence Number=SeqID_101210
cacacccacacacacacacaccccgcagatcatggagggcggcatggcaggagcgtctgcatggttcttgagagctgcgtaagcagtacagcagcacaaggatggaggacaatggctgcgctcagctgagctcctcctcctcatcaatgatcagtttgtatttgtccatacctctcatggccttcttccctggcttccagttccagatggcttggtgaggcttggacagaaaccggcagtcagaatcggnaatggtgagctcctaacgagggacgcccttaacctaaggtttttaaacgtttttcccc

SEQ ID NO: 35237 - DNA, 454 bp, Setaria italica
  Peptide Sequence Number=SeqID_101211
cagaacattgttagattttttgggttgcccctatctaatttccagagtttttttgcgatattcgaacgctggcaagttgcaggataattcaggttcaaaacttctttagaggtatagattaaatccctgttttttttccatgctcctactcagtcatgagttaacaaatagtttcatttatatgtaggttttggtgctttactctatgttgcattgattatgactcgtatggaactatttgcagtcaagatggttctgtttacccatagaattgtgaatctcagttgaccaccattaagttagtttgtataactgaagttgttcaggaacacaatactcatgattatccatattctggagctagcattagttatttagtggatgtttctctcacattgattttaccagaaccattttggcggatgctacagtagcatgcggcctgcatattatt

SEQ ID NO: 35238 - DNA, 1248 bp, Setaria italica
  Peptide Sequence Number=SeqID_101212
tctgatctctgtggttattagttgtgcttatgctgctggaatgaccatatatgcgagctatcagatgtggccctctgtcgatttcccaaacctagcatcatctcatcaatcaatgagttatatgaaaatattgttggaaattattactacagtagcaggctctgcattcttcttatccgcaaggggtctagttctggtatatctagcattcgctagtttatcagtcaatgccggtattagtgtattactgtgccagcagcttagttatatttatgaaggaaatacatatctcaaccatttaagttcaccaaatgccatgcatggagagagggggttgcagaacattgttagattttttgggtgcccctatctaatttccagagtttttttgcgatattcgaacgctggcaagttgcaggataattcaggttcaaaacttctttagaggttttggtgctttactctatgttgcagtgattatgactcgtatggaactatttgcagtcaagatggttctgttacccatagaattgtgaatctcagttgaccaccattaagttagtttgtataactgaagttgttcaggaacacaatactcatgattatccatattctggagctagcattagttatttagtggatgtttctctcacattgatttaccagaaccattttggcggatgctacagtagcatgcggcctgcatattattgccctgcagacaatcataaggcgctgatggtcttgcaataaattgcgatatctgaaattctgcggatcatcactatctttttcgatgaattgaagatcgcggcttcacgcttggttgctccagaagaaatggacatcaggattgaatttggcagtggcttgaatgacgctggaggtcgagagaaaaaaaacatggaccacgtgtccacgtccttttgatgtcaatacactgacatgtgcaggaaaacaaccccacagttgtttttgtaacattcactctgaactagacatcgtaaattggtcttctaaccatgtagatgcgtgtggtacatctattttccacctgttcttctgccattatgtactggtggcatacaaattcatctgggatttgggcctggttgaccaacaggaagtggctcttatattcagtttgctcttccaaccatttgactgcattttcttttgttccttgtggggttgcgtgaaatcagcattgaaatttcggagcctgaatgcatacaaaaaaaaaaaaaa

SEQ ID NO: 35239 - DNA, 1073 bp, Setaria italica
  Peptide Sequence Number=SeqID_101213
aaagaacattcttcttctcgcttgaagctgcaggcccgcccccctgcgaagtctccaaacgccgcccgcgccgatccggagaccccccagctctcaacccctcgccccgtggatctgcggggccacggcgatggtggagccggagcagcgcccgctgctcgaggtagagcaatgtgtcacatctataccagaagatcatgaagccacatgttggggctgtgggctccggcttgtttttgcaagttattcacctgtctataagtgtggctggtgcggagcaattacacaaagcaaccagactgcgagaaaacctgatagtatatgtttttcccactggaggcgattacgtgacaggttctttgtgactgtgctcgtgttcttcatgctctttgttatatgtggtggtgtctgggcggtatatccaattgttttctcaatcagcaaattttgtggtatccttcactgcatggtaacagctatgttggctgtatttaccatctcaagttattgtttggcctcttttaagtctgctggtgcaccgacaaacatacgatggggcagctatcccatggttgggaaaaatgatcttgagaactatacattttgtacatactgcaataaaccaaagcccccgagagcacatcactgccgatcttgtaaaatgtgtgtggtggacatggatcatcattgcccatttattggcaactgtgtgggagcatcgaatcatcaatttttttgtaatttttctgatctctgtggttattagttgtgcttatgctgctggaatgaccatatatgcgagctatcagatgtggccctctgtcgatttcccaaacctagcatcatctcatcaatcaatgagttatatgaaaatattgttggaaattattactacagtagcaggctctgcattcttcttatccgcaaggggtctagttctggtatatctagcattcgctagtttatcagtcaatgccggtattagtgtattataattaactaagtaagaaccaaagaacaaagaacttaaagttaaattaaatttaaataagaaaaggtaaaaattaaactta

SEQ ID NO: 35240 - DNA, 996 bp, Setaria italica
  misc_feature (972)..(996): n is a, c, g, or t
  Peptide Sequence Number=SeqID_101214
tgctaattcgcagcagcacggtgttccgctgaatcaaggaaatcttcaacgggctcattcttagatgttcatgatgtgtctcttgcgtaaacactccacaactaccaaggtataggttgttcttaccaacaactgttgtatggtgtggcgcatggaaatgtgccatttagtattccagaagagcaaaatccagtgacaaatactaatggtggagatgcaattggaccagattcagacaatgcaagtccgtctattgacactgctagtaacgaaaccgatgaacggcacatggacattggctacctggaaagtgaagaatgcatgtcagatactgatggagaatcttactgggattgaaacagatgactgggatgtattctattccactagtgaactagtgaaagttggagaaaataaaggacctggacaagtgaatcatgcgtgtagtaatgattcaggtgttggcaatgctgtggaaaatagtaccatcattccaaggggcgaagaaagtaacacgggaggatggaaaaaaaggtcagtacttattccaaggggcaaagaaaggaagttgggtcctcaacaacgagggctatcaaacaatgagagaagttgtttgccagagacagggcttcgacaaaaggaccaagagcaagacaaaaggctgtcactgcaaggcgatgattaggctgcaccgtacagaagatgatggttggttcatttcaacatatgtgaaggagcacaaccatgagttttcagaaacagatggcagagaaacgggaatggaattcacataagaagatagagcaaacaacaagggacatggtcaaatatttacagagtgctatgtttggattgggccagctattcaatttgcttccatgaatttatttatgtatctacttttaagcttttggttgaatttttgagcgtgcaaggactggccagcacttgctttgggtctttgacgaaacnnnnnnnnnnnnnnnnnnnnnnnnn

SEQ ID NO: 35241 - DNA, 643 bp, Setaria italica
  Peptide Sequence Number=SeqID_101215
attgttggcctatctgctaccctacctacctacttagaggttgcacaatttttgcgggttaatccggagactggcctttcttattgattcaagttaccgtccagttcctcttgctcagcaatacattgggatcagtgaaagggattacacgaagaaaagtgaactattcaatactttgtgctatgagaaggttgtggagtccattaagcaaggtcaccaagcattggttttgttcatactcgtaaggatactgggaaaactgccagaaccctgattgacctagctgcaaaagcaggggaattggaattattttcaagcgcagatcatccccagtttccattaatcaagaaagatgttggtaaagctaaaagtcgtgaagttgttgaatttttgtaatctggatttggcatacacaatgctggaatgatacgttctgacagaaatttgatggagcgcttgtttggtgacgggcttttgaaagtccttgtttgtacagcaactttggcttggggagtaaacttaccagctcacacagttgttataaagggcacgcagctatatgatcctaaagctggtgggtggcgagatctggggatgcttgatgtgatgcagatcttcggacgtgctggaaggccacagttta

SEQ ID NO: 35242 - DNA, 191 bp, Setaria italica
  Peptide Sequence Number=SeqID_101216
gcctctactgtaaacttcgttggaactttcggatatgtggcaccagaggtgtgtaaatttggcgccaataacagaggtaggagattaatgatctcaagagaggctgacagatatagtcttggcgttataatcatggatcttctcgtgggatgtgaataaaaaaaagattttctttggaaagaacaaggggg

SEQ ID NO: 35243 - DNA, 1933 bp, Setaria italica
  Peptide Sequence Number=SeqID_101217
cggacaggggcgcgccgccaggaggacgacggttgccgccgccgccgccgccgccgccatgggcgagtcgctgctcaccgcgctctccatggacaccgcaacggcccaccacccgcaccaggggcccaacaccatcctctccatggacaccgcctcccacgaagacttcgacctctacctccagccacaggggcccttccgccgctgcctgcatgccgcggcggtcgtcccccctgacatcaacctccccctcgccgctgacccttctccgccccctccggcgctgcaggactgcaacgtcgacatgctagacgtcggcctcggcggcccgcagcagtacgactcggattcgcctgctgccgccgtgcccgtctcggccccgccagcggccacgactgccacggtcgccgtggcgcacaccaagggctccggttccagcgccgcacgcaagtgcgtcaagaggaacgatagtatctggggggcgtggttcttcttcacccactacttcaagccggtcatgtccgccgacaagggtggcaaggcgaagtcagccactgccggcgggaacggtaatagtgccacactggatgcattcctggtgcagcacgacatggagaacatgtacatgtgggtgtttaaggagcgtccggagaatgccctagggaagatgcagctgaggagcttcatgaatgggcactcgcgccttggggaaccacagttccctttcagcgcagataaagggtttgtgcgctcgcaccgaatgcagcgcaagcattatcgtgggctctcgaacccacagtgtcttcatgggattgagatcgtcagggcgccaaacatgacaggtgtacctgaggctcatatgaagaggtggatggagctcactgggagggatgccaatttctcgatcccaaccgaggcgagtgattttgagtcgtggaggaatttgccaaccacagactttgagcttgagagagcagcaagtactgctcctgcaaagagcagctcacatgggcaccacaagaagttgctgaatggttctgggcttaacctctcgacacagccatccaatcatagttctggggatggtatggaaatcactgccacttgcaacaagcgcaggaaggattcctcacctgttgccatggaagaggactgcagcaattcaaattcagacaaggcccatgacatggatgtgagccacacttttgagccatcatggatcaatgacttcactggtgtgatgcgccatgcttctgggccagttactgctgcaaaaacaatatatgaggatagcaagggctacttgatcatcattagcctgcctttctctgattttcagaaggtgaaggtttcctggaagaatactcttacaaatggtattgttaaggtatcatgcactagtgttggtcgaatgccattcctgaaaagacatgatcgaactttcaagctggctgatccttcccctgagcattgtccacccggagagtttgtccgggaaattccactgcctacccggatccctgaagacgccactttggaagcataccgtgatgaaacagggacaggcctagagattattgtccctaaattccgtgttggccctgaagaacatgaagtgcatgtgtccatgaggccaccctcgtcatggtgccaatgaagacatgttcaaggtgtgtggtagatgttcttgtagcagctaggagtccattcttgttagctgctcttcgctgatgttttgttgtctgctaaccctctagcttacgaggagacatttggtgtggaggttccctattgtgaccataagactactgtacaacagcccagcacagttttgctaattttgatgggaaacaatcctagttgattgaagcattctggtagttggcaattgcagcatctggaacattttaggaatatgctacaggtcacaaga

SEQ ID NO: 35244 - DNA, 705 bp, Setaria italica
  Peptide Sequence Number=SeqID_101218
attagtctagagagttacagaaacaagaggtcatgcctccatggattcggtatcatgtcaaatcagtatgtcctgcacctgcaagtgtagccaggagcccaggacctgttgatgacttgaactagcccaccagaggataggcggccgcagaaaaaaaaaggatcaggatgtttccatcctgcgaagcaaattactagaagtggcagcatgccagcgtctgatcgctgacgtcttgctacgaatgtaactgagcagatgaagacaagacagtagcctgtcagtcggtggaatctgaggctagtcgcgcaggttcacaaatttgcttggctgtcgagaagcaaaagctgcttagcttcagcgacatggatccggacggcttcaagatccgttgccaccttttcaccaacaggcggcatggattgatccaagctgcaagaggttaagcttcttctgtcatgcagaagctcagctagctcccgcatcgcttgatttagcttcaagtgcagttcatccagacccctggcttgatgctgcaaggactcctcacacaccttgatctcttcctccttcaagttgacatggaaaacacagtcctggtagtcaatcagcaaggcctccatgttcttcacctcaccctcccaaacctctgccaatgtgttgtcacggataaacttctcaatgtcagcttccagcaaggagaggcag

SEQ ID NO: 35245 - DNA, 1196 bp, Setaria italica
  Peptide Sequence Number=SeqID_101219
tgccttcctcgcaaaagaaacatttctccagtgcccagatcgcttcattgggagtacatttcatcccaggtgtttcgtattcgttccagaaggtaatgacagcatgctacaacacatcaggcaactagcttcagaaaacatctacagctaagctacataggttcaggcaaatccacatttctctagcaaccaaagttctggacatgccacgctgacatgtttcacccgttgtgctacaaaagtggggacgccactgccagcctcattgcatcctgcttgtctgttgcacgaactcatcatctttcatgtatttctcctgaacttctgctgttctgtagtagtcccaatcaagaggcgctgccgcaattttgctgaattcaacagcactactgtcaatagaagaaaatatataaccattgctcttgtcaatcaacttcacaagattgccaacactttccttgtcctggatgtccaaagttgaaaaattgactaaaccaaaatcgtcaataacatcacagagctccttagtcagtttcctgtacttggcagaacgaggatcctgctcaagatggtgttgcagataagaaagatcttggacatcagtgtagaagtcaagattgaatgctaaatttccatagttctcaatgaggtcaatctttgacaagacattgatgtgtggcaattccaagtgtagcattgttgacagtgaaagaagtaaagcactcacatacttcccaggatcacagcataaatgggcatcaataaggtgcacagcagtcagcctcaagtttagctttttgatgagtttattgataacacttcttgcatttgagtgaaggaagaaaagttcaacttgtcccggaaaatcaaataacagatagtgatcttcaataagaggctgcaatttttgctcaagccagtcaatattcttctccaagtaatccatgcaataaacaagccctccatttgggccaagcgaatgctcagccatgacatcactgagttttatcaggtcctcaatgtttacagcacattcatatggcaatgcatcattggcagggtcaagattcacaactgcaactttccttccgaggagggagaggaactgcgacatgccgttgcagtaggtagtcttgccagagcccggcgggccgatcaccacctgcccgaacaccatccccgaggcctcctccgct

SEQ ID NO: 35246 - DNA, 582 bp, Setaria italica
  Peptide Sequence Number=SeqID_101220
acgctcccattgccacaaatgatgaatgttaggaggcagaaggcacaaactacaatgggaaacaagatgtagttggctaggaagaagaaagggttggacaacacgacgggtaggacggaatggtagtactcgcaaacgaactgggtctcatcgttgaaaacttggaacagtgcgacctcggcacctttctccgcctcctccttcaacatgcccttgaagatgaggttccggcagttccgggtctcctctcttgttgtgggaatgtcctcgaaccttcggcgcagcagcttgtagagagcaaaggagaggcagagtcttctgaggtgttctctccggaggaggctgtccggctcggctgctgcctgcgtccaaatgtcaccaacggtgacaacggctgccttgttcagctcgacctggtagccatgccggccagccgtcctctccaggttgtcttctcccatcacagtgtactcgcacttcttcaacagctccgacgacgatcccacgtgctcctcttgctcttgttggatgatctgggccatgtatgagttgagcagctggtgttccttccgtaggcgaagg

SEQ ID NO: 35247 - DNA, 395 bp, Setaria italica
  Peptide Sequence Number=SeqID_101221
tctcaggaggcatctggtcagcgtcgtcgcgccagtgtatatgatgtagttgtcacttgtgatgctccggtaggcgtagcggacgctcccattgccgcagatgatcagtgttaggaggcagaaggcagaaatcgcaaacgaactgggtctcatcgttgaagacttggaacagtgcgacctcggcaccttcttgctccttcaacaagcccttgaagatgaggttccggcagttccgggtctcctctcttgttgtggggatgtcctcgaacctccggcgcagcagcttgtagagagcaaaggagaggcagagccttctaagcttttctctccggaggaggctgtccggctacggactagactagacctagaacgtaaccaaaaataagtaacaaacc

SEQ ID NO: 35248 - DNA, 828 bp, Setaria italica
  Peptide Sequence Number=SeqID_101222
cagtgcgacctcggcacctttctccgcctcatccttcaacatgccttgaagatgaggttccggcagttccgggtctcctctcttgttgtgggaatgtcctcgaaccttcggcgcagcagcttgtagagagcaaaggagaggcagagtcttctgaggtgttctctccggaggaggctgtccggctcggctgctgcctgcgtccaaatgtcaccaacggtgacaacggctgccttgttcagctcgacctggtagccatgccggccagccgtcctctccaggttgtcttctcccatcacagtgtactcgcacttcttcaacagctccgacgacgatcccacgtgctcctcttgctcttgttggatgatctgggccatgtatgagttgagcagctgggtgttccttccgtaggcgaaggaacgctccagcaccatcttgaccacgaccctttgcaggaatttggcagcagtgaggacccataaggtgccgtagatcgccttcttgccagggcttttgacattgtagaagacgaggtagccgagccaaacaatgcgggcgaagcgatcgatggcgcctgagtaccactgcatgcccacgttgaccaggacggcctccaccttcttgcggaggagctccacaagaagcatccacatgaggatcgtcctagctcgaagcgacagctcgtcgccgagctcgccataactggagctagctagtagtagcagccatggtcgttgcaccttggttcttggcctcggagaagaggtaggacatgaccggcaggaagagggacagggaggtggagaggaagaggcggacgctagggttgag

SEQ ID NO: 35249 - DNA, 3384 bp, Setaria italica
  Peptide Sequence Number=SeqID_101223
ttttggggtggttatatatctatttttaatatacactacttgaaaaatgacatttcattcactctcttagtaccggtcaaattttaacccggtactaatattagtattagtacccggttcaaatttgaggctccggaagacttttttagcaccaggatgaagcacgtcagacgaaccatcccaagcaagctgtccttgaaaaatcggcacacacgggaagcgaatgctctatggttcaaacgcacgacgtgctacctcccacggtgcgagggccgtcctggtcatgccagtgtgcgtacacagcacccagagcacggtgatgaactcaccgccgcgcgccagcgcctccttgtgggccttcacgtggaggtcgccggccgatggcgccacatacaccatgacctccgtccaaaggtcgttcagcagctcccacacacgctcacgcgcctcattgttctcctcggccttctcgatcagtgctgtccctaacttggccccgttgtgcaccattgtcacggccttttgcttcgatttgccgatctccatcagcctcttgtacctggttccctgcagcgacaggtggtaccaccagcaccctccaagctccttattcatgtcctccttcatcttcttgtaagtgtgctctgtcccattcttgtcgtccggaagaagccccgggtaaaagcccaccaagtaggcgcagtacttggacagcgtcgtcgccaccttgctatgagatcccatttccttttcgtcctgtggatacctcacctccattaggccggtggcaatgtgacaggtgaggatgaactcagcaatgctcttgctctcacacactggcaagagcaggggacggtatgccctgtgcttctccagttgcagtgtggaggaccaggccgaattgagagggtcggcatggccatcgatgccatagacatccaagtgagccaccagataatccacgattgacttcattacttcctttggcactgccttggttggcaccatgaacggcgaaggcgacgacagttggaagaaccctagcacggagagctgcttgaagcagaagttagggtggcttagcatgcttcgcacccacaggatgccgcggatgagccggcacaggatgcggctctgccgccagtggagcttggcggtgtactcgcagaggagcgacacgatgagccaattggagaggataaagacgaggaactccatgacttcctcgtagacgaaggccaggatgagcagagtggtggtgcctaggtcgatgctggcgaacagcacctcgggtgaatgggcgatgtttctcaggaggcatctggccagcgtcgtcgcgccagtgtatatgatgtagttgtcacttacgatgctgtggtaggcgtagggcacgctcccattgccacaaatgatgaatgttaggaggcagaaggcacaaactacaatgggaaacaagatgtagttggctaggaagaagaaagggttggacaacacgacgggtaggacggaatggtagtactcgcaaacgaactgggtctcatcgttgaaaacttggaacagtgcgacctcggcacctttctccgcctcctccttcaacatgcccttgaagatgaggttccggcagttccgggtctcctctcttgttgtgggaatgtactccaactttggaaccgcatgcctccattgctcgaccttcagtaagcacagaaatgcccacaagtcggattcaaagctgtaaatcgcacaaagcaccttatttattgacggcgccacgaaagagcacgagcactgacagaggtcaacaacagagtctaactctagcaacgctcgtggcgcacgtgcttcttcaggactcttgtctgcgaaggaaacagagttgagcatcgatcgtcgatcgatcgtctgctcgatagaaggctcaagcagcttactccttggccacctgctcgatgaccagcggcgcctccctcctccccttccccttcccatgctcctcctcctccttccccttcctcccgtgcttctccttctccctcttccccgtgtccgggaacgacggcagtatcagggcctcctcctgcgcgagcaccagctccctgaactccttctcccgggcgccgaagccggcggcgacctccggccccagcatcgcgcggagcaccgaggtggcgcccaccaggaactgcggccggttgcgccgcgccgaggtcgtgaacccgaagaactcgaacggcccgccccgcgccgccacctggcagaaggcgaaaaagcgcgggatccagaacacgtcgccggcccgcaccaccgcgctcatcgccagcgacccgttcgggaacaccacctggatcttgccttccccgcctagcaccacgccgtactccgtcgcccgagggttcacgtgcggcgccagcatcgagccagcggttaggttgacgaggtagacgccgatgtcggagtgcttgaggggctcgtagtcgtgcttgtcgacggcgatggtccagccgtaggtgttccggaacccgggctcgctgtcatacaggttgtacggcttcggcgcgctgcccttcttcttgtccttcttgttcgcctccgcggtgacaccgcccgcccctccgatgaacctgttcaccagcttcctccacgaccacgtcggcagcgcatcttcgccggcctcgtcgtcctcctctcccctgcctcccggcctccacgcgccagcctccctgcgccgtgatcccttgtcgagcccgttaccctgcacacgctcttctttgccgccgctctcaggctcctccgcggtgtagtacacgatggggccgcgggtttgtgccagtatgactcttgccaactcgtcgtaggtggcgttgaaggccatggcaagcgtcttcggctcgaaaccggcgagcaccgatgcctggtgcccagcgccgccaaggaagaaggacagataaggaggtccaaagccgaggctatcggaggcgtcgatgctgcagatgatctgcagcctctggcccttgccggtgttgaccatgtagaaggtggagccggcgtcgatgtggagcacgtcgcccatcttgagcttcctctccaccagctcgtccttgtaaatgtacccaaccttcacttcccctcggcgcacgaagaggatgacgttggagccgaggtactgcggcacgaacagcgtcctgggctccatggtgatgaagccgaggtgcatgagcccctcgcggcacgcgaatgaggccggcggccacggctggccgcgcaccacgcgcacctgcccgccctccgactccaccaccttctccagccggtccagcacgaacagccccctccccttgcccttgccctcgccctcctcctgctccttctccttctccggccgcc

SEQ ID NO: 35250 - DNA, 286 bp, Setaria italica
  Peptide Sequence Number=SeqID_101224
cgccaccgcgagcgcaccacctgcgcatgccagcgccaccaccacctcctccggcggattagcagtctctctgagtgagcggttattaggtgcagcgcgatttcctctcgttcttgctcctctgttcatcgatcggcaagggaagcttgagccatcaatgcctcccaacgcacaggacacgcacggaaccaccggcgtcgccatgacgccggcccccgcggcaacggcggcggcgaccaagatggactgcttcctcacgaccgcctgcacgccgctcaacctccag

SEQ ID NO: 35251 - DNA, 1248 bp, Setaria italica
  Peptide Sequence Number=SeqID_101225
cagcagagcgctggaggagtgggggagggaaaaaaaataatcaggcgagctccgaactttgaccgctgctgccgccgccgtgcttgctgcgtagccccgcagccccaggccttctctccgcctccgctttccccgtcgcctcccggatcggagctcccctccccgggtcaccgccggccgcctcccctcggatcagctccacctccacaggataggcgagcaatgaggtgcctgcctttctggcatggagaggtcaaagaggaggatcctgtcaccatgtccgcgtctgtacggtccatcagcacaacatcaacagagcgcgatgtccgctctggttcagacttcacctccttgaatgtatccgacatgagtgccgagtcaataaggaggacacagtaccccagcttcaccgaccgaccatctaacctgagggtgttctccttcgctgaattgaagagtgccacacgcaacttcagccggtcactcatggttggcgagggtggctttggctgtgtgtacaggggcatcatcaagacctctgacgaacctaatgaacgaattgagatcgctgttaagcagttgaatcgtaaaggacttcaggggcagaaggagtggttaacagagatgaatgtgcttggaattgttgaccatccaaacctagttaaactaataggctactgtgctgaagatgatgagcggggagtacaacggcttctagtgtacgaatatatgcttaacggaagtgtggatgatcacttgtcgagcaggtcaacttcgactctatcatggccaatgagactaaaagtagctcttgattctgcccggggactgaagtatctgcatgaagaaatggaattccaggttattttccgagatctgaaaacatccaacatcctgttggatgagaactggaatgctaaattgtcagactttggtttggctaggcatggaccaacggaaggtctgacccatgtctccacagcggtcgttggaactctaggctatgcagcacctgagtacatgcaaaccgggcgccttactgcaaagagcgacatatggagctacggcgttctcctgtacgagctcatcaccgggcggcggcccatcgaccggaaccggccaaagagcgagcagaagctgctggagtgggtgaagccatacgtcggggacaagaagcggttccctatcatcatcgacccgcgcctggaggggcactacaacctcaagtccatgttgaagctgtccagc

SEQ ID NO: 35252 - DNA, 306 bp, Setaria italica
  Peptide Sequence Number=SeqID_101226
tatgctgcgacacaagctccttcaacaccttgtgacagtctgacagtatctcctccctagtaagaggcttgcttttcttactgttatcatccacatatttgcccttctggggcctcccccttgataaaaatggaactaagagcagcggacttgctggaattcgatggaacacatgttctcctgtgagggagggtaagacggaaagggaaaattcttgaagtagtttcttcaatccatttcttttccgaaattaacaaatgtaccagatgatgcagatctttctcaaagaggcctttcaaaggccaa

SEQ ID NO: 35253 - DNA, 326 bp, Setaria italica
  Peptide Sequence Number=SeqID_101227
ccttcaaactgttttttttgtttacccagtatgcgtatccattcaatttccttatgtaataatgttaatcttatatatgaggtgtctgaataggcaatggcatatgaacctatatgtattgtagcaaactctctttggcgatcagtacagtttgttgtgtttaaattcactggtggcatttattggcttctattaccgctatgcattaagctacaggcattttgctagctgtcaaatgagcaatgtcattgatacatgaacaggttgtaacatgggatggtcgcagctgcattagcatcattgttacattgcgcaagctaactgct

SEQ ID NO: 35254 - DNA, 591 bp, Setaria italica
  Peptide Sequence Number=SeqID_101228
actttaagttctactttatgtttctgtgtagagctctagcattttgcagtagattctgtgctgaagttgtagtgacagatttcctgatcttccttattattcagtcagcagactcagataactgatgtaccatgtccacaaatgaaatagagctttaagtgctctataaatggctgatatcatattgaccctttttaggtttaatgtttcaccatttgagtatgctcttggtgaatctggaggaagtctgcaacttgccattgtcaatgggcagttgaagtggccagcaggacccaaccctccttatcctgatgaacttcgccagtttgttatctggatgcttcagcctcaagctgccatgcgccctcacatcggcgatgtagttcttcatgttgacaagctcatcacaaaatacttgtcctaaaccatcttgagtttccattctgtctcatttctttgctatatatacaaagtgaatatggtgtaaaatgggttcatgcttgacatcattcgatccttggataggtgcaatattgattctttgtagatatagcaaagaaatgagacagaatggaaactcaaaatacttgt

SEQ ID NO: 35255 - DNA, 1453 bp, Setaria italica
  misc_feature (1409)..(1453): n is a, c, g, or t
  Peptide Sequence Number=SeqID_101229
gaagcaggagcctcaagtcactgtccgcgtggacacggctgacctgcgaaaccaccggaccaaccgcatcaggaattcagggacgcgcggcgtgggagttcgccggcggcgaggagccggggcgtaggccggatagcccggaagatgggttgctccatctccgggctcaacgccctctacgacgccgcgacgggcggcggcgacgtctggatcaacgagcgccgcttccgcgtcctccgccagatcggcgagggcggcttcgccttcgtctacctcgtcagggagcagcagcccgcctccaacgccgcgcccgccaggcgccacgacgcccacgtctcagaggatggaacgtatgccatgaagaaggtgctgatacagagcaaggagcagctggatctggtgagggaggagatccgtgtgtcgtcattgttcagtcaccccaacctgttgccgcttcttgatcatgccataatagccgtcaagagtccacaggagattggagtcatgaagcgtacctgctctttccagtccatttggatggtactttatttgacaactctaacatcatgctgtccagaaaggaatactattcaacagctgacgttctgcaaatattccggcagatgtgtgaaggactaaagcacatgcacagctttgatcctccatatgcccataatgatgtgaagcctggtaatgttcttataacccgacgtaaaggacaagcacctgttgcaactttaatggattttggaagtgcaaggcctgcaagaaagcaaatccgttctcgttctgaggcgttacagttgcaggaatgggctgctgagcattgctctgcaccttatcgtgcccctgaattatgggactgcccaagccatgctgatattgatgagaggacagacatctggtctctaggatgcaccctttatgcaatcatgtttaatgtttcaccatttgagtatgctcttggtgaatctggaggaagtctgcaacttgccattgtcaatgggcagttgaagtggccagcaggacccaaccctccttatcctgatgaacttcgccagtttgttatctggatgcttcagcctcaagctgccatgcgccctcacatcggcgatgtagttcttcatgttgacaagctcatcacaaaatacttgtcctaaaccatcttgagtttccattctgtctcatttctttgctatatatacaaagtgaatatggtgtaaaatgggttcatgcttgacatcattcgatccttggataggtgcaatattgattctttgtagaactttcagattgttatcgacattcattttgatgtttacctcagttatcatgtacaaatatgtcaagtgaacatcaaaagttgctataacatatgtaatagcatcaaaagcctgtgattgtggacnnnnnnnnnnnnnnnnnnnnnnnnnnnnnnnnnnnnnnnnnnnnn

SEQ ID NO: 35256 - DNA, 775 bp, Setaria italica
  misc_feature (768)..(768): n is a, c, g, or t
  Peptide Sequence Number=SeqID_101230
ctcctaactagcctcccaatattcgatgtgacacagactaaactctagctctgctcaggatccaaacggccgctaagctggtggcggttggagagcggtccttccatggaccccacgcctaatttctccaccccgcagaaggccttcagcggatggctctcccgcaacctgcgcccttcgtccgagtaacggaacgccctgtactcctcgtggttgcagggcttgtacatcagggggtggtcctcgtcgacgagctcgtccatggcgcgcagcacggggtcgccgtcatccttgcgccgccttgcaagcagcaccgagaagcgcccgcggccgctgcccgccggcgccctcacgcggtgcacgcacgagcaaacacggtcgtctaattatacagtgaactggtcgccggccatgaagacgagggtgcccggctcgggaggaacggcgagccagcgcccgtcgtctccggcgtcctgcacctcgaggcctcccacctcgtgctgcgcgatcaccgtggtcatgtgctcgtcgcggtgtgcgtgcagggacagggacacaccgccggcggcggcttcctcgccgggaggcggcggcgccccgtagagcgtggcccggacggcgtgggactgcgagccgagctgcgaggcgatgctctccccgcgggcacccaggccctccaggaccatcctctccaccgtctgctccagatccagcacgttcttggcgaacgacacgatggtgtcactgcaacaggaggtgagatgaacnttgttaa

SEQ ID NO: 35257 - DNA, 414 bp, Setaria italica
  Peptide Sequence Number=SeqID_101231
acagagtgaagttcaccttggtgggactggcaggctccctgatcctttgcattcttctttacgtcaatactgaaaacccaaaggaaccgtatgaaaatactggtggaggagcaatccctggagtgtacagtgatgctgctgcaaggtctttcgagcctgatgcattctgtggagaacctgatctgtcgtaacaacggaaagcgtggatagattttcagatgatggaagatggtattacaggttcttgcctttgtaaatggtggatgcttccatttctgtttgggattttttgatccatcagggtaatgtaaatatttgaccatacgtagcacagtagtactgatattttagatacaagttcttgtgaaaaatttatggtgctcggcccaaaattgaaaaattgcgaatggattg

SEQ ID NO: 35258 - DNA, 272 bp, Setaria italica
  Peptide Sequence Number=SeqID_101232
ttttttggatggtggctaaagattaccaggagattacaaagtgcccaagctatgatgatgatggaagctaggaggatgctattgcatattggagagcacaaacccctagtagctgctaagtaggtgatagcatatgatcaaaccctatacacctttgatagacgaaccaaaaacaaagaagaacaaaaaaaaataaagttaacaaaaaaaatgaaataaagttacagcaactagtgcagattggagctagcgttctacagtttggtcggccg

SEQ ID NO: 35259 - DNA, 354 bp, Setaria italica
  misc_feature (6)..(6): n is a, c, g, or t
  Peptide Sequence Number=SeqID_101233
ttcaanccttttacctgggactggtgctattgatacttctccagatattgtttccaggctctggaaaaccgggaccattgctgtcttcccattgtccttcttaattgaaacctgcttcctggtccttccatcagagaatgtaatcgagatgtcacatggtggcttgaatgctccaatgatataattcatggcggcgacggcgagatggcggccggagaagggaggagggcggcggcgctgaccggaggacgccgcgtcggggggatcgagatcggatgcggcggagaggaaagagatcgcgcgcagactcactgaggcggagagggaaggtggtgggccctttctctctctgtt

SEQ ID NO: 35260 - DNA, 1441 bp, Setaria italica
  misc_feature (1372)..(1372): n is a, c, g, or t
  misc_feature (1383)..(1383): n is a, c, g, or t
  Peptide Sequence Number=SeqID_101234
gtcctccggtcagcgccgccgccctcctcccttctccggccgccatctcgccgtcgccgccatgaattatatcattggagcaaccaagccaccatgtgacatctcgattacattctctgatggaaggaccaggaagcaggtttcaattaagaaggacaatgggaagacagcaatggtcccggttttccagagcctggaaacaatatctggagaagtatcaatagcaccagtcccaggtaaaaggattgaacacatgggtgtcaagattgagttgctgggccaaatagagctgtattttgaccgagggaacttctatgacttcacttcattagtacgtgagttagatgttcctggtgaaatctatgaacgaaagacatatccatttgagttttcgactgttgaaatgccatatgagtcttacaatgggacaaatgtcagactgaggtacattttgaaggtgactattggcagaaactatgttgggaatatagtggaataccgggatttctgtgtacgaaactactctcctgtccctacaatcaataacagtattaagatggaagtaggaattgaggattgcttacatattgagtttgagtacagcaaaagcaagtaccatctcaatgatgtgattattgggaagatatatttccttcttgtcagaataaagataaaaaatatggagctggagattcggcgtagggagtcaacaggatccggctctaacacatatgttgaaactgagactcttgctaagtttgagctgatggatggtgctcctgtcagaggtgaatctattccagtgaggctgttcctgacgccttatgagctgaccccgacttaccgcaacattaacaacaaattcagcgtcaagtactacctgaacctggtccttgtggacgaggaggatcggaggtacttcaagcagcaggagatcacaatgtaccgtctcctagaatctgccccgtcttcctagatcctggggcccggagcagcatgatgttcacgtttcaggttttgtataatggagcatgaggttagagcgatgtgtgtttacctgtatataactccagaagagcgcccgtcagtttgactgctgctatggccaggcaatttgcactgtcgtgttgtttatgtttcttttttttttctacccactccttaccttgcttatggcacaaccgtggttagctgggggtgctagtgaatcacctgcctatttatttaccgttcttgtgaggcgtctgcaaatcatgtttaatttgtcaatatttttctgtgggatgttagtttagtctgacagcaatgtagaatgtactatgttttcgtaagtcaaagtgtcaaataatgtagaatttacatggagaaaaanaaaaaaaaaanaaaaaaaaaaaaactaaaagaagaactagaccaaggacaacaacaaggggaagtaagg

SEQ ID NO: 35261 - DNA, 455 bp, Setaria italica
  Peptide Sequence Number=SeqID_101235
aatttcgtggtaacgccttgatcgttgcagtcatctgaactccttggaacaccgatgttcgctcgctacacatacagctctaaagcagaattttgatttgccatgcaattttgaggccatatccattggtcgtcagaagactgatgatgccggaacaattgattctgacggttcgttaaattgttgccgaacttctcagaaagaacgcctgcagtaaactctgaagtctaaaacgcctgagatgttcaatattcagaactgtctgcatggaaagctggcttttacatggtaccctgagaaccaaccccagcttccatattcatgaaccaaccaaatttgcttctccttgacgaacactgcaactcttcccataacacttgctggtacaggttactaccccggtcgcctaactgaactgaggatcagagccacgattccatttttctggatgccaa

SEQ ID NO: 35262 - DNA, 395 bp, Setaria italica
  misc_feature (381)..(381): n is a, c, g, or t
  Peptide Sequence Number=SeqID_101236
ccaaagcatcagctatgctaatacgaatgtgtaccaagtactcgtcatcaaccatcacatctctcgaacttcttatcatgcggagacatgaattctggcaaagcttttggagcagcgagtcatcagtctagcatcaacagatttgacagcattgtttatgcccttactccgttagtattatccttcatgctgttcattgtgaagctatcatgggacgtcggctttgatcaggagaagacctccctgctccagttcattgcatgattcgccagctcgctggcgccggtgccggtgacgccagtctgttcccgaacaaacgagagaccgcgcaccttcacaaccgcagatcactctgttcgagttcagattcagactgaaccntctcaaggagaagg

SEQ ID NO: 35263 - DNA, 757 bp, Setaria italica
  Peptide Sequence Number=SeqID_101237
agaaaatgtgatggtcagaaccccacaggtggagggataggttaggtacgtcgggttgtcagaggcatgtcccgacacaattaggcatggttatgccgtgcatctgaattctgatcacagttgtgtgtagatggagtggtctctctgttcttgcgacatccgaaccagcacctaaaagaagagtgagaaatggcaacaaagagcttgctgcaggagactcagttttggcatcgaacaaagatgaagactcaggactcaggtgatgtgaccaccaaagaggcattggtcacagctttggttggccttgtggcataaacacgaggcgttgaggcaagattttgcaagttctgaacttgatgtgatgctgaagagccgagcacaatggatatacatgtgatggatgatgattccctcgataataaggagagggtgcttagttctttttcttcttgcatataagcaaaagaatattagatagagaatagtggatcatatatatcttccatacatcttccagtgtatcacatgaatcttcttgcatgagattttgtttagctctatggtagtcaagttaaatagattcgtaccaaatagaagataaaaagaactacccttgtattgctaatacaatcgtttgtgtataatcggaaataccatggaagcttgagttttttcttgtaaataatattgtggaccttttagaatttttcaatgatttatctatgtcaaccacatgtgcattcagactaaaaaaaaa

SEQ ID NO: 35264 - DNA, 427 bp, Setaria italica
  Peptide Sequence Number=SeqID_101238
tttttttttctaaacaaaccggcccaaatatatattgtatggccttgagcatcacagattcacaatgttaataccaaaaccttactactacgttaacgaacatcacaccattacattacagtcaacaaagcacgaacggcgaggctgcctgaactagcaggctagtagctgagccggccacccccgtcgtcggtggtgacgccgatggacggcgacgtcaccgagacgtccctgtcctcctcgatgtcccggtaccggagcagctccacgtcgaacacctccgctgtccactcctcccgcaccaccgaccgcacccactccgggaggctcgccgccaccgccgcgttgctcttcttctccctcctctgcgcgtcggcgtcgggcaaggggtgcgggtgctgcgccgcgggcgacctgcaggtcagcg

SEQ ID NO: 35265 - DNA, 270 bp, Setaria italica
  Peptide Sequence Number=SeqID_101239
gctcctccgcgagtggcacaagcccagctacaaccccgtgatcccgcagcccggggacgtgatgggcaacaacttccacgacccctccacagcgtggctcggcgacgtcgggttagtggagcggaacgccacgccgctgcacgcctcgccggacgctcgagtgcgtcgactttttcccggtggcggagcgcggcgcggagggcctcgacacgtcggcggcgaacggccccggggtcaggcatgtgctcagcatttgtggtatattttcca

SEQ ID NO: 35266 - DNA, 183 bp, Setaria italica
  Peptide Sequence Number=SeqID_101240
tagtatgcgaagggtcatacggttccattcaaaggggacctatttccacagttgttgtgctgtccatgcagcgttaaacgcatgggtgccgtttctatagtgaacggtaatgcttggggacgctttcgtgggtgctggcacgaaaggttcaggtggctgtgtcttctgcaggtacagtaaccg

SEQ ID NO: 35267 - DNA, 391 bp, Setaria italica
  Peptide Sequence Number=SeqID_101241
ggacctcgcggcgcccgacgcggtcgagggagcggtacccatcggagaagttatcgagcgtcgcggggggcggggaggcggcggaggcagcggcatggagccagtggagaacggaagccgcgggcggggcggcggggtctgggtcagtgggcggaggaggaggggacagttgcggcggcggggaggggagggcgtccgggtgcatgcgggcgcggaggaggacggcgagcgacttcgaggtgtggttcctggtcatgtgacgcggtcggagtagccgccggcgacgcggccggaggcggaggcagggcgggtgacggcgccggcgacggcgctgtgccaattttgcggttgggttcggccgttcgggcggtgaggtgtcagcgtgtcccac

SEQ ID NO: 35268 - DNA, 1270 bp, Setaria italica
  Peptide Sequence Number=SeqID_101242
actctcaatggccgcccatgtcgcaatggactatccaatctctgcatctcaatgtctttctcagtctccttccacaaaactggctccttacctttgctgtcatcagtatttacttgctcatgattgttagcagaccgcctaaccgcgaggccttttcttctctgttttgtcttgagctcaaaatattctctttctccatctccagtgacgtcaccaaacaaaatgagctccaattctgagagctcttttttcctgccgacaaaatcgtcgttacgggggataggaaattcctccttctccatcctccctttccatctgttcaccctatcaaccacacttctccttcctaattttgtggccaaaagaataactgcttgcagtatgcaatctctccagttgccatcattcacttctaattgcacatctaccacccgagaaagagcatcaactgattccatccactcatgttctatccctccatacaacatccacagcttgccaccatgtttctcccacagttctcctctcttctcgatgatatccctggcaaggcaatcagctgcatccaagtcaaaaaatatagggatgagatttttcttgccaaagaagttcctgagctcctcaatggtataagggttaccaaatgacttctttgtgagaacaacaactccatatgtggaagcattcattatcctctcaacagcatcgtggctgtgagaattccggcatctagatctgtcagaaacaaagcagctgattccgtgtatctctagttctgcacgaagccagtttgtgaacctcagcagtgaagccttgcggccatgaaatccaatgtatacatcatagctccgaagcctactgacagaggccgctgatgtcgttggttgggatgatgaagatttacggtacattccccccagcctcttctgcttctccttcctggccgaacgaccaccattgctggtcgctgacgaactaccttggcacgggccattgaaagtggaaacgaagctgggattgttgtagacaatcgctggagtgccaaagttgcttgaagtgcaaaggctaataggaggagacacatctgatggcaagaccccaacattggctgatggtggctgctctggctgtacgaaggagtcaccagagagtatgtcactgattttcagcgcaatgccattcgcggagcacttgttctcaggaccggcatgctccggggcacgagcggagagcgaccgtggcgtgaagaaggggactggttcgccgaaaa

SEQ ID NO: 35269 - DNA, 298 bp, Setaria italica
  Peptide Sequence Number=SeqID_101243
cggctactggtacagcagactatttatcttacactcagattggcagctaggacaccagactattattttacagtcacagttaatgcaagtatatcaccgtttcaaacacactggccagccaaatccgggcagaaccaaccaattacaattagaagaggtgaagggccacccagtttacgcccctcatgctgttagtttgcgcttgagaagtgccataaaatggttgagcagctacattatggcctatcttcaagtcccgtccttgggttccaaaagaactgcttcctcagctgagtac

SEQ ID NO: 35270 - DNA, 1064 bp, Setaria italica
  Peptide Sequence Number=SeqID_101244
gagtgtaagataaatagtctgctgtaccagtagccgcttgggttaatgttttacagtcacagttaatgcaagtatatcaccgtttcaaacacactggccagccaaatccgggcagaaccaaccaattacaattagaagaggtgaagggccacccagtttagcccctcatgctgttagtttgcgcttgagaagtgccataaaatggttgagcagctacattatggcctatcttcaagtcccgtcccttgggttccaaaagaaactgcttccttcagctgagtatccatggggaagatgaggtccgtacacgacattttcagaatgtggaagatgaggtccgtacacgacattctcatttagaaatgtcatttggttcacctgtggcgctgcttgataagcatttggagcatcgacttgactgggggtgttaacatgtgcaaaaacgtttgcattggtattcttatgattagcctttggcttgctcctagcagtccgtttgttctccactggactgtctgcggtcagcctgaccatttgctgctggatttcattcagtgaactactggcaagttttgatttggcactctttttggagtcacaagacttgtattcaagacggtacaaggcaagagcatcagaagaattgatctcatactcgaaaagatgccactcatggctgcttgatggttgtgggtccatgtaataggacctcttcagacctgcgaaatctttcatcaactgcttccttgattcatgccaaccacgaccactgtaatctggcaatgacctttgcttccggttgccactctcaaatgcccttcttggagtgtcaaagaaaagccattctctaagagattcaccctccagaagagaaagatcgaaaagttcaggggcattccatggagacttggaagttgcagctcctccacacacaggaataccaacattctttccttgtacttttgcaataagagcagcaaacagaggcccatctttcaaatcaaattaaccttactttaaggtaaacgtaactaaaatttaaacttaaaacgggttaaactaaa

SEQ ID NO: 35271 - DNA, 482 bp, Setaria italica
  Peptide Sequence Number=SeqID_101245
cttttctgtgtctgttctaattgtcacaatatgtgaagtatttggttttcagaattcagactctagccttagtagggaagagtgactggccatcttacatggagaggttctggcattcgcatttatctcaaacaattaaattcaattctgtcactttcatttaattaatcacaaaaaaatccagacagcagagaaacattgacctcttaagtcttagtttggttctgactcttggtagatgtttgtcattatcatggaaataatgactttcaaagaccttcctctccctccctgcttctatcccctctttatgagagttcacatttcatgagcatgttatctcaagcattatataagagaagggtaggtttattttcaggttcactaacatattgggtcaaagtttttcatgatccatccaggaaattcgttcctggagttctgtgagtgatatagatcttatgcctcatggactttcagaa

SEQ ID NO: 35272 - DNA, 321 bp, Setaria italica
  Peptide Sequence Number=SeqID_101246
tgtttgtcggttcctaggtttcttccgttcgtaaggtcgtccggtcggtctaattggtcgttcgtcgtacgaacaagccagaaggcatcatcacgaaggagacggcggcgacgacggagccgaggccgcagccggtgtcgatgaacgacagctacgtgaacgacaccgtggacagcgacagcagcatggacgacgatgatgacgaggacgacttcgacgacgacgacgagggcaacgtcggcggcggcaacagcaagatgcagtacgagatccagttccagcggcagcagcagagccagagcagcgtcgtccggccgaacg

SEQ ID NO: 35273 - DNA, 366 bp, Setaria italica
  Peptide Sequence Number=SeqID_101247
ccacggcgaggaaggtgctcgtcggagcggaggttcgataggcaggagcgcacgcgcgggcgcggccgacaacctccctaaaccgtacgtatatgcttttcaaaccgaaacctgcaagcatcgccatcagcgtcacttcctcctccaccagtccaccaagcaccatcagtccatcaaccaactacaccactgttcttgttcatgcatcctgtaattcccccgtgccattccattatttattgatttgtttcgggtaattaataagagccccatccttacggccccttaaccggaggacgcagagtggggctccggtggtaagagtaaacagacgagagtcagtccagtaacttatttataggccat

SEQ ID NO: 35274 - DNA, 618 bp, Setaria italica
  Peptide Sequence Number=SeqID_101248
agcggcccgaggactccaagaacctagacccaatacttccaccagctcgaggccatctacaacaggaagcacctccgcagcatcggagccgcctcagcgtccagtgtcgccatcgccggcgctcctcccgccctccctgctgagcaggcgaacccgacaaggcaggaattagagggggaagaatatcaacgacgacaagaggaacaacggaggatcgggcgcaggcgcacaggagccgaacagcaatggcgagaaagcgccggcgccgccggccgcgttcgacgctgacagcggcatgaagaagaagacatcgtcagggagctgaacgagcagccgccccgggaattcacgacggacgagacggacagcgacgagatgggcgatgagtacaccgacggtgaggagggcgaggacgacggcaaaatgcagtacaggatacagttccagaggccgaactcgggcggcaccaacagcgcaccgccggcaccagcaccaacgacggcggccgcacccgcgacctccgctccgacgagcaccttcctcgccgtggttcgataggcaggagcgcactacttacaactaacttaagtaaagttaacggttaaagttaaacttaaa

SEQ ID NO: 35275 - DNA, 452 bp, Setaria italica
  Peptide Sequence Number=SeqID_101249
tccggtaacgggaacgggtgcgcggcgggtaggggcggctcggacaataatggcggcagctccgggggcatgcaaacgcaggcgagcaacggcggtgttgcggccaggttctccgtcgaaggcgccggcggcaatggcgtcgcgacgaacaagccagaaggcatcatcacgaaggagacggcggcgacgacggagccgaggccgcagccggtgtcgatgaacgacagctacgtgaacgacaccgtggacagcgacagcagcatggacgacgatgatgacgaggacgacttcgacgacgacgacgagggcaacgtcggcggcggcaacagcaagatgcagtacgagatccagttccagcggcagcagcagagccagagcagcgtcgtccggccgaacgcgagcggcggcgccgggtcagggccgggcggcccaggcccggcagcaacagcaag

SEQ ID NO: 35276 - DNA, 946 bp, Setaria italica
  Peptide Sequence Number=SeqID_101250
cctcgctccagcctgtgcccgcgcctcccaagccggaggaggcacgggcgtgggctggaggagagggcagcgggtcttcgctgccgtcgcggtggccgaaggaggaggtgcaggcgctgatccagctgcgaaccgagaaggacgagcagtaccatgacgtcgtggccaagggcccgctctgggaggacatcgccgccggaatgcggaggatcgggtaccaccggagcgccaagcggtgcaaggagaagtgggagaacatcaacaagtactacaagaaggtgaaggagagcaacaagaggcgccccgaggactccaagacctgcccgtacttccaccagctcgacgccatgtaccgcaagaaacgcttcgccggcagaggcatcagcaccgcgccgggagcgtacacggccgccgtcgccgtcacggtgctggagaatccgaacctgaacccgcgcgagctcgaggggaagagcagccacgacgctggcaagtcgaagaatgatggacagggaaacgtgcaaggtcctcccggcaacaacggcgagacggcacccgcgaccaccgtgcctgatgacggcgacaaaaacaaggattcagaattgacgttgcacagagggcagaggacagcatgaaagaaacagacgtgcagctgctgcagcagcagttcggagcagacgagacggagagcgacgacaacgacatgggaggcgactacactgaagaaggcggcaacgatgaagacaaaacgaagtacaagacgagcttccagaagcctaatgtgatcgggagcagtggcgacgcaactgcaccaccagcgacggctgcggcaacggcgaattcagccggtccaacgagcagcaccttccttgccgttcagtagacggcaatgctgcaggacccggtgccagctgatcagcaccagaccaccagtgcatcaccgcctttc

SEQ ID NO: 35277 - DNA, 918 bp, Setaria italica
  Peptide Sequence Number=SeqID_101251
tcagtcgcactagtggcgccccgaggactccaagacctgcccgtacttccaccagctcgacgccatgtaccgcaagaaacgcttcgccggcagaggcatcagcaccgcgccgggagcgtacacggccgccgtcgccgtcacggtgctggagaatccgaacctgaacccgcgcgagctcgaggggaagagcagccacgacgctggcaagtcgaagaatgatggacagggaaacgtgcaaggtcctcccggcaacaacggcgagacggcacccgcgaccaccgtgcctgatgacggcgacaaaaaacaagagggcagaggacagcatgaaagaaacagacgtgcagctgctgcagcagcagttcggagcagacgagacggagagcgacgacaacgacatgggaggcgactacactgaagaaggcggcaacgatgaagacaaaacgaagtacaagacgagcttccagaagcctaatgtgatcgggagcagtggcgacgcaactgcaccaccagcgacggctgcggcaacggcgaattcagccggtccaacgagcagcaccttccttgccgttcagtagacggcaatgctgcaggacccggtgccagctgatcagcaccagaccaccagtgcatcaccgccttttccggctcataatcaccatcatacttgttctgctctgccggtgatcctggcaccatccgaataccatttgttgatttatttctgtaataagtatccaatcatgaaagacaaaaggacaaggagtaacactgaagaacagaggtagcagaggcgcctaaacaaaaagtttcttttcttaccataggttatgttatactttagctaacaattgtacattcatgtgacagtcttctctgtattcccttctgatacaatttggtcagtaatttggatcgtac

SEQ ID NO: 35278 - DNA, 1580 bp, Setaria italica
  Peptide Sequence Number=SeqID_101252
ggcggggacgtcggcggcggcggcagcggcagcggcaagatgatgcggttcttcaggggctgatgcgccaggtgatggagcggcaggaggagatgcagcagcggttcatcgaggccatcgaaaggcgggagcaggaccggatgatacgcgaggaggcgtggcggcgccaggaggtggcgcgcctcgcccgcgagcaggacgcgctcgcccaggagcgcgccatggccgcgtcccgcgacgccgccgtcgtctccttcatacaacgggtcaccggccagaccatcccgatgccctccgtcgcgccgccggtcttcatcagcgcgctgacgccgccgcccctgcagcccactccggtggcttccgctgcaccagcggcggcaccggcgcagcaccagcaaccgccatcaattcatctgtcgccgaagcctggaaaaccgcacccacaaccgcatcagacgcaaccgccgctggcgcagctacagatgagcagcaaggagatgatcgtccgtgcgccgccggccgagtcgcaggagacgccggggtccggtggcggcgcgccgtcgccgtctcggtggcccaaggcggaggtgcacgcgttgatccagctgcggacggagctggaggcgcggtaccaggactcggggcccaagggcccgctgtgggaggacatctcggcggggatgcggcggctggggtacaaccggagcgccaagcgctgcaaggagaagtgggagaacatcaacaagtacttcaagaaggtgaaggagagcaacaagaagcgccccgaggactccaagacctgcccctactaccaccagctcgaagcactctaccgcagcaaggcgctcgcctcctccgccgctcctccgcccccggcggatcagcaggcggcaggtgtcaccgtgctcgccgcggtgccactctcccagacgccgccgcacgccgagcatggcggcaaggactgcagcaacggtaacgggaacgggtgcgcggcgggtaggggcggctcggacaataatggcggcagctccgggggcatgcaaacgcaggcgagcaacggcggtgttgcggccaggttctccgtcgaaggcgccggcggcaatggcgtcgcgacgaacaagcagccagaaggcatcatcacgaaggagacggcggcgacgacggagccgaggccgcagccggtgtcgatgaacgacagctacgtgaacgacaccgtggacagcgacagcagcatggacgacgatgatgacgaggacgacttcgacgacgacgacgagggcaacgtcggcggcggcaacagcaagatgcagtacgagatccagttccagcggcagcagcagagccagagcagcgtcgtccggccgaacgcgagcggcggcgccgggtcagggccgggcggcccaggcccggcagcaacagcaagtgggtctttcttgaccatggtccatcactagctgcatacacacacacacacagacacacacacacacacatacgaaagcagcgtacaaacgtgctgtacgtgtcctccttgcacaggtaaaagtggacaccatgcatgcatggcaacttcatctacc

SEQ ID NO: 35279 - DNA, 1790 bp, Setaria italica
  Peptide Sequence Number=SeqID_101253
gaagatgatgtccttcttcagggtctcatgcagcaggtcgtccagaggcaggaggagatgcagcaccggttcctggagaccatggagaagcgggaggcggagcgcacggcgcgggaggaggcgtggcgcaggcaggaggtcgcccgcctcaaccgcgagcaggagcagctcgctcaggagcgcgccgccgcggcatcccgggacgccgccatcataaacttcctccagcgcatcggcggccagtccgtgcagccgcctgccgccgtcgccatcccaatgccagtccagaccccgccaccgccgaagcaacctcctcgacagccgcagcacccacctccaccgtcgccgcaggccacgacaccgcagtcgaagcccatctcagccgcgccgctccagcagcagcctcaggaaacggcggcgcaccgggacgctggcaccccgcgcagcgcgcccccgacctccggcgcgtcacttgagctggcgccgccagtcacgacggagcagcacgtcgattccggtctaggtggtggagacggcggggcggcgtcgtcctcgcggtggccgaagacggaggtgcacgcgctcatccagctgcgcatggacctggacatgcgctaccaggagacgggacccaagggcccgctctgggaggagatttcttccgggatgcggcggctgggatacaaccggagctcgaagcggtgcaaggagaagtgggagaacatcaacaagtactacaagaaggtgaaggagagcaacaagaagcggcccgaggactccaagacctgcccatacttccaccagctcgaggccatctacaacaggaagcacctccgcagcatcggagccgcctcagcgtccagtgtcgccatcgccggcgctcctcccgccctccctgctgagcaggcgaacccgacaaggcaggaattagaggggaagaatatcaacgacgacaagaggaacaacggaggatcgggcgcaggcgcacaggagccgaacagcaatggcgagaaagcgccggcgccgccggccgcgttcgacgctgacagcggcatgaagaagccagaagacatcgtcagggagctgaacgagcagccgccccgggaattcacgacggacgagacggacagcgacgagatgggcgatgagtacaccgacggtgaggagggcgaggacgacggcaaaatgcagtacaggatacagttccagaggccgaactcgggcggcaccaacagcgcaccgccggcaccagcaccaacgacggcggccgcacccgcgacctccgctccgacgagcaccttcctcgccgtggttcgataggcaggagcgcacgcgcgggcgcggccgacaacctccctaaaccgtacgtatatgcttttcaaaccgaaaacctgcaagcatcgccatcagcgtcacttcctcctccaccagtccaccaagcaccatcagtccatcaaccaactacaccactgttcttgttcatgcatcctgtaattcccccgtgccattccattatttattgatttgtttcgggtaattaataagagccccatccttacggccccttaaccggaggacgcagagtggggctccggtggtaagagtaaacagacgagagtcagtccagtaacttatttataggccatcgtcgatcgtgttaaacaaaaattgtaaatcgatgtaacagtcagtccctgatattttccctctcttttttacccccttccgatgacggcggtatacaagtttgtatacaggtatacaagaattacatacagttcaagcaactt

SEQ ID NO: 35280 - DNA, 2349 bp, Setaria italica
  misc_feature (2335)..(2349): n is a, c, g, or t
  Peptide Sequence Number=SeqID_101254
catgatccgggaggaggcgtggcggcggcaggagatgacgcggctcgcgcgcgagcaggagatcctcgcgcaggagcgggccatggctgcctcccgcgacgccgccgtgctctccttcatccagaagatcaccgggcagaccatcccgatgccgtccatcgctgcgcccaccatcaacgccatgccgccgccgtcgcatccgaggccaccgccgccccagccgcaccccacgcccatcgcctccgcctcgccagcagccacgccggcgtgggcgcagccaccagcctcgcagcctccgcccgcgcaacaaccacagccctcgctgccgccgcagaggtcgccaatgccggccacgccgcaaacgccagcaccaccgcagcagcaaagcacggacattgtcatgacgccggccgagacggcggcgcatgccgatacccccggttacgacgggtccggcggcggcgcgacgtcgtcccggtggcccaaggcggaggtgcacgcgctgatccagctgcggagcaacctggacacgcggtaccaggaggccgggcccaaggggcccctctgggaggagatctccgccggcatgcggcggctgggctacaaccggaacgcgaagcggtgcaaggagaagtgggagaacatcaacaagtacttcaagaaggtgaaggagagcaacaagaagcggcccgaggactccaagacgtgcccctacttccaccagctcgacgcgctctaccgcaacaaggcggcgctcagctcctccggcgccggcgccggaccagccgccgtgcacgccagcagcgcaccgtcgacacaggcgccggagacggtcaaggtgacggccgcggcgcccatctcacagactccgccaccgccgacactgccttcccagtcgtcccagcacgcggccaagaacggcggcggcagcaacgccgctgctggcagcggcaacggcaacggcggcggcgcgtcggagcacggcaccagcggaggcggctccgggggcatgcaagcgcaggcgagcaacggcagcgttgcggccagcaggttcttcggagatggcggcggcggcggctcggcctcggcggcgaagaagccagaggacatcatgaaggagatgatggagcagaggccgcagccgcaggcggtggtcagcggctacaacagaatcgacggcgcggacagcgacaacatagacgaggatgaggacgactacgacgacgatgacgacgacgaagacgacgtcgacggcaacaaaatgcagtacgagatccagttccagcagcggcagcaccatcaccaccaccaccaacagccgcagcagcagcaccagaacgtggtcaggccgaacgccggcggcggcggcgccggcaatccgcccggcaccaccgctcccagcacggccgcggccgcgacaacaacagccggatctttcttgggcatggtccagtgatcgatccggccatccgctccccaaacattttcacccccggtgattctcatctcctctcatcaatggcttccatttctctctcatgtaccttttgtatctacctacctgtcgcctccatgctcgtctatatctctacacctcaaaacctcaaaacctcaacagctctccccctcttccaagctccggcagttctcttcctcatgcacgcagcgacacctcgatcaatgtcgtcgtcgtcgtcgctgccacatacccgcaccatatcctcctatttcttgattcgttgctgtgttaaattacagtggtcgcctcttaggtgttacagtaaaaaattggtggtgagatgtggttatttattgatttgttgtggtaattaataagaaccctcaagcattggggtgttcacggagaggttgaaaatttggtgcggtgaaaacggcacgtgaaggcggtaataagggctccatcgcgcggttaaagagaacaagcagacaaggtggcaaaaaaaaaaaagggaggcagatgacgcagtgcatgtacgcactgttactgggtaaattttgtgcatgcgactactactctacagtggggtagattgttgcatgggagcagtgaaaaagttatggaaaggacttgctcgacatgggcatgaacaagaagagccagagctggtgcatgcgggagtttttcattatccttccttattttcccttttcattttcaacatttcttttatatttttccaaccaagtaaactgtccattacgaattacctaagttttttctttctttctcaaactgttgttaccgaacttttacagtgtatacatgagacatattatatgttatattcttgttattatcgtaccaaaaaaaaannnnnnnnnnnnnnn

SEQ ID NO: 35281 - DNA, 502 bp, Setaria italica
  Peptide Sequence Number=SeqID_101255
ttttgtttttttcttaatttgagaaagaaaagaaaaggaacaccacgcaggtgactgtcacagccaaggggaagccgaacagcaccataccaaaattgcttgatattgttttcaagaacgacacaacatcaaagacgccgtcgacaccagccattttcaaacccccccagctagccactcctggcgtgccaagcctctcctctaccaccgccacggcggcttcaagtcacccggagcaaatcttgtacgcaagaagcggcccggggccaccagccatgccaccatgccgccactggcccacctcgcttggccgccaccggccacgccaccatggcaccacaaacgtgcaaccgagctgactgccgccggccacaccaccacagcgcagacccttgcacccatgactgccgatgcatctgatggttgccactgtcgaccggggaaatgccttgatgatgcctcaaggagggggatggcactcgagggcgtcaccatcgtcgtg

SEQ ID NO: 35282 - DNA, 355 bp, Setaria italica
  Peptide Sequence Number=SeqID_101256
acaccccttccctccctcgatctcgctccctcgctcgcaggccacaccacctctcccgctccctcggctccaaggcaagcggcgaccggcggaccggcgggtagcgacccagcgaccgagcgagcagcggcagcgatggcggggaagtcgcacacgcacaaggcgttcctcctctgcaactacgtgctcctcggcgcggcctccagctgcatcttcctcacgctctcgctgcgcctgctcccctccccgtgcggcctgctcctgctcttcctccacgcgctcaccgccgtcttctccgccgcgggctgctcgggctccttcacggcgcccgccacgcccgcccagtggcacaacg

SEQ ID NO: 35283 - DNA, 394 bp, Setaria italica
  Peptide Sequence Number=SeqID_101257
caggggcacgagttcacccgcggcggagtctcggccgccggagtcgtcgtgctcgccgccacgctgcctccactcccaatcgagaggctgcgtccgtgacgtgggggcccggaaatcagaggatcccgcttccggtcctgccgtgcggggtcgcgcaagctaaaccctcactcccgttccgcctccgcctctcgccgacgcgccggctctggagccgccgccgtcgctgccgcgatgaagccctcgccgcacttcccggagatcgggaagaagcctaaagatttgatcgccaaggaccacgcattcaacatcgcggcctacatctcgtcgggagcggatgtcatcgctgctgcgttacgtaaacatgttgaggaggaagctcgagatcttagtg

SEQ ID NO: 35284 - DNA, 601 bp, Setaria italica
  Peptide Sequence Number=SeqID_101258
taattccggtggcaaaccaatgaatgagggttcggaatgatgtatacaaagacactacaaaaagacaaggttgaatccactcaagatagcagaccaaaagaagtcagtgaaacagttcctgttcaaaaccaagctgctgcacagaagctactgcagaaaatgtcgcaggctgtgcctgaaggcaggcatggtcggggtcatagattcaagggcaaaggtaaggaagaagatgctcaggtttttacccttgacgaatgggagaagaggaaggccattggttcaaagtccacctcagaaagctatatgcaagacactagccgagatgaggaactggcaaggcaactgcaggaacaactagacctagaagatatgcatggtggggcagatgttttccatggcaggccagagagttcagatgctgaacgtttacggatgagcatgttcagcttcagtggccctgatgaagcaggtggtggtagaagagagtttggaggatgggggcggggcaggggaaggggccgagggcgaggtcggggcaggggggaaagatttttaagtacagtaaacggaattgtaggtttatgagtttgtgtgtaggagt

SEQ ID NO: 35285 - DNA, 343 bp, Setaria italica
  misc_feature (1)..(59): n is a, c, g, or t
  Peptide Sequence Number=SeqID_101259
nnnnnnnnnnnnnnnnnnnnnnnnnnnnnnnnnnnnnnnnnnnnnnnnnnnnnnnnnnntttttttttttttaataaaatatggtcgtttgtatgcacatttcacagaattcccggacatgttcatacaagtagactagtctccaaggtcagtcgacgaagccaatcaggataaaaaatttttaggagacatgcaaatggatgcagctcgccatctagctggagcctggagctggaccccataaatagtgcttggaccaagctgctgcttctcatcttcttcttccttgcaacacggagaggctagccgctgctgctgctgctacaggcacagatggcgggag

SEQ ID NO: 35286 - DNA, 2668 bp, Setaria italica
  Peptide Sequence Number=SeqID_101260
agaaaccatattgtgacttactcccaaacggatacctaattactcaattcatcaagcatatgatctaccataagctagggttctatcttctatgtacaagaacatcatgtatgcagattactgacatccatgaactacccgtagatcaaactctccacccaatttatatatgatatgattgtaggcagcttctgattcacttcgcattgaagagcatcctcaagacgttgcgcatctttggccgagcgtctggagagaatgcaacacaagagagcgcgatgttcaggactgacaacatctggctgtgaacagcaattgaagttcctgaaaccctggtgtcaaggatttgctccctttgttcaggcctgccagaaagactgagtgcccacttggctaattcaatgccatcactcactgatggtttccctgtcaatagctccagtaaaatgactccaaagctataaacgttgccagccattgttagcctcatagtatacgcatactctggtggaatgtaaccaactgtaccagcaatggttgaaaagcttccagtactcctggaagggtcaataattttgtaaagctcgatatctccaatctgaggctcaattgatgatttcaagtggatggtccttgttgacagatcaagaagcaaaactggttgagtgcacccatgaagaaatgtcagcccttgggccacacccaaagcaatgctatatcgtgaaggccagtctatattatctgacttttcaccatggagtagatcggacactgttcccttgtatccatgctcatagagtaggtaggcagaatctgcagtcaaaatgtaggccaacggaaccatgacattggaattggtcagtttccctaggacctcaatttcacgagcaaacttctcctggttcccaatttgaaatatcttgtcacttgagttaagcttctttacagagtaggttgaaccattgggcattaccaccttgtagtaggtgcagaacctggtcttcaaaaagatgttctggtgattacagactgcttccattgcttttgtgaactcaattgcagaggtgtggatgctattcatagttatcaggcagccattggttatttgaggcacggattccccagctggtaatccttcgtcttctacacgataaattctctttgataacgacatcataacaatagcagcaagcaaacacaatccaacaagagcaccggcaatagtgaagatgatgatgacaatagtgtgcctttttctcgtactagtagtatggatgccattcttgtctcctgtaccatttacaacatcaggattcccttcaatatgaattgacacattttggcggaatataggaacagacccagaaagatcattataagaaagaaccagctgtgtcaaactttgcaggttccctagtgaagatggcacctcaccagacagactgttgtatgaaagatcaagtatctctaattcacttaagtagccaatatctgaaggaatagatccgctgagattgttgtgactaagattaagagatgtggttagtgtggttggcattgttgggatggtaccagccagagcattattccccagattcagctcaattagaagctttgataaactgactgaaattggaatggcaccactgatactgttgtcatgcaaatccaagatggaaagcttttgcaactcgaaaattccgcttggtatgtcgcccgtgagtaaattctgactaagattcaatatgctcaggctctttaaatcagaaaatgcatatgggataggtccattgagagagttgttttgaagcttcagaactaccagcttgtcaaggctactgatagcaggaggcacttgaccctgtagcttatttgatgccagactcaacaaggacaggttcttgcagttaccaagctctgacggtatatttccggtcaactgattgttatccagctcaagataagtcaagcccatgccatcacaaattgagtctgagatgttcccactgagcctgttcccaccaagcctcaagcggtagaggcttggagagaagttgcggggaatagacccttcaagcatgtttgtggtaagatcaacactctgcaaccctggatgggagagaaaatccaagggaatcatcccgttcagattgttgtaactcagatccaacatccttacatgtttggtaatattgctgggaactgaaccattgaagttgttctggttagccgcaaaccgagacagcgtccttacatttgacagactcggtggtatttccccaatcagtttattgcctgaaaggagcaaagtctcaaacttggagagattcatgaacttatctgggacaacgccagttagaacattctggctgagatccagcagagtaagattttcatatttaaacaaatctggaggaattgaaccactcaaccgattaccagacaataccaactccaacaaagagccgaccatagaagtaggaacttcgccattcaacttattggcactaacgttcaagctcctcaatttgagaaaagaacccaagtctgcactcaaattttcactagtaaaagaatttacggacagatcaagaacctccaattgtgggaaagctgagaaattactgagcgggtcagataacatgttgctgctcagattgaaggaaga

SEQ ID NO: 35287 - DNA, 283 bp, Setaria italica
  Peptide Sequence Number=SeqID_101261
cgcggcgctgctcgagggaggacgggtccgggagggagggctgctcgacctcggcgcggaggtcgcgcaccgcgctgaggtcgtcgtcggccgcggcggcctcgcgctccgagtaggcggaggcgatgtagaggcggagcgggcggtagaggtcggtgggggtagtcttcttctcgtggatcgcgagcatcacgttggaggaccccgccgccgacgccatcggtggggggcgacgcggtggccggaggcggggtggggaggagggatcggggggattgggggt

SEQ ID NO: 35288 - DNA, 429 bp, Setaria italica
  Peptide Sequence Number=SeqID_101262
atataggtcatagttttcctcttctcttcatcagatagaatctcatatgcattgtttatttcttcgaattttcctgtgcacccttgcctttattcttgtcagggtgatattttagagaaagcttgtgaaaggctttctgaatgtccctttggctggccttcttgtcaactccaagaaccttgtagggatctatagttttggccgccgcgacgtgcaaggcgaccgaactgaggaggagcgagacgacgaggagagaccggagggggatccccatcgcggcgtgccgcgcggcttcgattcggttctgcttcgctgggtcaaggttcctgcgcccaattttgctcgacttggtttcgtcttgggaatctctgagtcgtattcaggctggatttggagggaagcggaggaggaattggccatggaggaagg

SEQ ID NO: 35289 - DNA, 163 bp, Setaria italica
  Peptide Sequence Number=SeqID_101263
gacggctcaccagagacacctattgattacattcaagttcagatcgccaatgttgagtccaacaggattctctcctcggtgatgcgaactcccctttgtttgcagtgaagtcagcattcaccaggttgacaaaaacactggagattggttcgatcaatccctt

SEQ ID NO: 35290 - DNA, 2016 bp, Setaria italica
  Peptide Sequence Number=SeqID_101264
aactaagaaaaataaatacaatactaggtatgttttgccgagatcaaaactccatcaggtacaatcctcgctttcaaactcctgtcttccaggccaccaaacagtgcaggcttaacatcgcgctcatgttcatagcaaagcaggcaagtattgagaagagagcttattaataaacaccgcgttcaaaagaaggcatcgatgctgcaccaaattcatgaacactacaaaaatacccctagaaagcttattccaacgagaaccatccgtcctctagaacgctaactacatcaaaattgcacaccattcttgcaacttcaaacatacatttgcgtctagagcttcaggaaaacaaactcttcgattgcaggaatctccccaatccttgtcagtgtgcccttgcttggttcttcatcaacaccaattgccatgacagcatgcttgcgaggagcgagtcttccgacactcatgaaactgacattgacattctcctctcccaggacacttcctactgatccaatcatgccaggctgatcaacctgcctgcaaaggatcaggcttccttccaagctcacatctacctggaacgctccaacctttgttagatgagggacgccatccttcaccctcccctccacggtgatctctccagtctcggatatcgcactgggaaatttggactcaacattggcgatctgaacttgaatgtaatcaataggtgtctctggtgagccgtccaacaggattctctcctcggtgatgcgaactcccctttgttttgcagtgaagtcagcattcaccaggttgacaaaaacactggagattggttcgatcaatcccttggtgatcattgcacggagaagtcttgtgtcaagatcatcaggagcccgtgcagatgcataggtcaccttcacagacttgatgccaccaccaccagccactagttgaacagccaggcgcccaagcttttctgcaagcacaacaaaaggtgcaagctctgacagcacctcagcaggaaccattggagcattgaccgcagaagctgcaagctcccctttcagagctccaatgacagcttcagctatctcaatagccactccttcctgtgcttccactgtgctggcacccaggtgcggcgtgacagtaacattctcgtgcagcaccagcttgttgtcaggtgctgggggctctttagtgaacacatcaagagcagcctgtgctactactcctgaatcaagagccctgaccagagcttcttcatcaattacaccaccacgtgcaacattaataatgcgaacacccttcttcatcttagcgaaggcctcatcgttgagcatcttgtttgttgcaggggtaagaggcatgtgcagtgagatgaagtcagcagttgtcatggcctcctccatgctaactagctcgactccaattgcacgagcccggtcagcagaagcatacggatcatgtgcaatcacgtgcattcctaaacccttagcacgacgtgcaacttctgaaccgacctttccaaatccaagaatagcaagagttttgcccacaagagacacaccaacatacttgttgcgctgccatgtaccagccttgagggacgcgtcagcctgcgcgatgttccttgccatggcggtgagcagcgcgatgccgtgctccgcggcggcgacggtgttagcggtgggcgcgttgacgacgaggcatccgtgctcggtggcggcggcgaggtcgacgttgtcgatcccgacacccgcgcggccgacgacgcggagccttcccccggacgcctcgaagacgtcgcggccgaccttggtcccggacctgacgatgagcgcgtcgcagagcgagatcttggcgcggagctcctcgggggagaggccgtaggagcagtcgacgttggcgaactcccgcagcagagcgagccccgcggcgccgagcttctcggcgacgaggaccgtgggcttccccgggacggcccccgaggacggcgcgtcgggggacgcggtggacgccgcg

SEQ ID NO: 35291 - DNA, 637 bp, Setaria italica
  Peptide Sequence Number=SeqID_101265
attagaaaagcttatcttgtcctggaaggatacaaatgatgacattagcatctcggaagcagaggaggggagcagcccaacggatgatagtgattcaagctacacaaatgatgacattagcatctcggaagcagaaaaggggagtagcccaatggatgatagtgatgaagaggggagaagcccaatggatgatagtgatccaaactatggaccattgataaacacggaaacagaaagggagaggtcgcaaatggatggtagtaataatagcccgaggtctggaccttttattgacatggcacatgatgtccttgagggccttgaaccacatcaaaatctaaaacatcttcaaatctctgggtacagcggttctacctccccagcttggcttgccacttcagttactttcttgcaggcacttcatctagatgattgtggagaatggaaaatacttccatctttggaaagccttaaatttcttacaaagctcaagctaagtaatatgcagaaagtaaagaaagtatcaatcgcaccattggaggagctggtgctgattaatatgccaaagttggagtgttgttcctgcaattccgtgatggacttgaactccagtttaagggtcctcaagtttgagcaa

SEQ ID NO: 35292 - DNA, 266 bp, Setaria italica
  Peptide Sequence Number=SeqID_101266
gcgcctggaggatgtgcaaatgggctgcggcagagacgacaagttggtcaaatcgtgcgcccgtggggataagaacaaccgagccactgactatggacaaaaatctgtctttctacgccctttccccccttttcctcacgtaattcactctcacaagaacaagaacctatcaactacggccgcaaaaaccttgcaggctgcagtggaaatcagattcttgctccacgaagaagaatctgttccgagacgactgaattggattcacc

SEQ ID NO: 35293 - DNA, 358 bp, Setaria italica
  Peptide Sequence Number=SeqID_101267
tcctccaatacatcaccctgtcacatcctgcatcaccaaaagtagagagtagcaaagaactgtgcaatgatctcagtgttccaatcatgcttatacccccatgagatcatatatcttcctttgcttgcacatactgacaatttcattaagaataggatcattatactcctccagtgtgttccaatcaatgtactgtgcaatagtcacaacatgggccttggtcatgatgacaccagcaggtgctctcacatcctcatccaaattctcctcctcatcctcaattccctcttcttcctcatcatcattactgtctgcctctgctgcataagcatctccgtattgtagtgaaacttattta

SEQ ID NO: 35294 - DNA, 1285 bp, Setaria italica
  Peptide Sequence Number=SeqID_101268
ttgacatcaatccaaatgttcacaatcatagaacctaagacactcctaaacaaatatgtataattaaacggaagccttttaaagccgtgaaacaccagcatataggcaacgcaaaacaaagacaccccattagctaattaacgaaggcacatttcttcctgatctccccctggctgccggtgagcacgcccaccctgcccatgttcaccatggacaccccaaagtccctcaagaacgtcgtctccggcgagtccctgtaccggtacacgagccccttggtgacgtcgttccgcagcagggcctcgtcggagtggaagaggcccctccgcttggtcacgaggccgtagtacgccgtgtcgaacgtctccgagctccccggcaccatctccagctccgtcgtcttgtccttgggcctccagcaccgccgcctgagcctgtcggcgtacgccctgtccagggtcgggtcgctgtcccggttctcggtgaagttgcgcagccgcttggcgatcgacgggcagtgcgacttgccgatcgcgtgggcacctgagagaacagtcagatccttgaggctgaggttcttggatgcaaacctcttgataagcttccggattccatcgaatgagtcgggcaagttcttgacggcctccttggcgctggagacgctgccgtcccgcctgccggtctccacctcgtacaggttgccgtccttgctccactcccccttggccaccaccttcgtagccagcgagacggcgtccctggcggcgatggcgaggatgtcggcgcaggagacggtgccggggcacctcttctccagcgcctccttgatgtcgtcgatgacgtcgaaggcgtccagcgtgtggttgggcttggcgtccttctccgccgtgttccccttggtggagttgatgagcaccgacccctcgcagcccctgacgaagcagtcgtggaagtggagcctcagcagcggcgcgttcgccgtcgggtccttgtggacggccttggcgacaatctcccggacgatcgcctcggcgtccgggcacgaatccttgtagaacccaaccctgagcttgccgtcgccatagccgccgtagccatggaccgaagcaaccagagccaggagcagaggaagcacgagcactggaggaagaggaagcactcgcactgccatggtagtgcagtagcagaagtgcagcctgtccccaacacttggtgaaaagaaaaaacaataagctatcggttgcttagctttggctgactcgagcctcgcgctgcgcacataagc

SEQ ID NO: 35295 - DNA, 357 bp, Setaria italica
  Peptide Sequence Number=SeqID_101269
tctccgactcagtctagcgactctgattcaatgagtttattttataaaaggatttttggctcagaagactcgtgcccaattaatcttaaagatgttgcaactgacatcattaaaaggtgtggtggtctgccattggcaataattactatggctagtctactggccactaaatcaggcagaagagaagaatggctagatgtttgtagttcgattggtctggggcttcagaattacaaagtggaagaaatggaaaggattttatcccttagttacaatgatcttccctaccatttgaagacatgcttactgtatttaagcatgtatccagaagactacaaggttgacattgtttcagtc

SEQ ID NO: 35296 - DNA, 907 bp, Setaria italica
  Peptide Sequence Number=SeqID_101270
cgcagttgctgtacagctccagggcagcaatggcgcataccatgactcccctttcaacagcgcaaaacacaacctccattctgaagattgctccaaaatccccaactctgaagaacagcagcgacctttctctgggagccaaatgcgacaccaggagggcacttgtatgtggcttgattgctgctggtgctggtgcaatgctgggacctgacattgcttctgctgcgtctaagagacggcctccgccgccttcgccgacggaggagaagaaagacccgaacgttagcggcgtgcaggctaaggtgcttgccagcaagaggaggaaggaggccatgaaggaagctgtggccaagttgagggagaaagggaagcctgttgataagtgaagggcagaaccgcagaacaagtagcctttggttccagcctgctttttctcctctcgttcgctgctggccctgctgctgtgcgtttctgcatcaataatttcgttgcacaattttcccagtttttataattttcaatgggttgcttaattttcactggaaaatttacggcttcatagttcatgcagatacacagtacttcttgtttttttgataaaaaggatttcccatgggaaacaaggaaaatgatttgggttaccagaatacttagaaagaaggataatgatttttcacggtcaggtattcttgaaaaaaaaaggaagggtttttattacaaccttaacatatacatattcaaatttaccgtgtgtgcttcatggctttctacacatggaagaagagactatccatcattttcttttttgagtgttcctacgtcaaattactgtggtgtgcggtacatattgtttttgaattgcaccaccattgaactttgaggatttgttccatcaatggttacaaca

SEQ ID NO: 35297 - DNA, 1475 bp, Setaria italica
  Peptide Sequence Number=SeqID_101271
ccaccggagcaccgtgtcgtcgcggcagcgcgcgctcaacgtgctcctcgtctccggcgactgcgtccttgctggcctccagcctatactagtgtacatgtcaaaagtggatgggaaattcaaatttagcccaatcagcgtaaatttcttgacggagattacaaaaattatctttgccatcatcatgctattcatccaggctcgacgtctaaagatgggggacaagccacttctcacagtgtcaacgtttatgcaggctgctcgcaacaatgttcttcttgcagttcctgcttttctctatgctatcaacaactatttgaagttcataatgcagttatattttaatcctgcaagcgtcaagatgctgagtaatctcaaggttctggtaatcgctgtgcttctaaagataataatgaagaggcgattttccacaatccagtgggaggcccttgcccttttgttaattggaatatctgttaatcagctgaaatcattgcctgaaggttctagcgcactaggtcttcctgttgctgctggagcctacctctatacattcttttttgtaacagttcctgcgctggcttcagtttacaatgaaaaggctcttaaaagccagtttgataccagtatttaccttcagaacttatttctgtatggttatggtgcaatattcaattttcttgggcttgtaatcactgccatcatccaagggcccagtagctttaacattctggaaggacattcaaaggccacaatgtttcttatctgcaacaatgctgcacagggcatactgtcatcatttttcttcaagtatgcagatacaattttgaagaagtactcatcaacaattgcaactatcttcaccggagtagcctctgctgtattatttggacacacactgacaataaattttgttcttggaatttcaatagtaatcatatctatgcatcagtatctttctaaccaaattaaagacgaagtgcctagcagcaaaattgaaatggctgaagctcatgatcacagcagagtaaaggaatccgtttacgtcaacgtgactgattcagtggcaagtgaggctaaacaccgccatggatccgacgagaggcagccgcttcttcctgtatgattttgcagcagaggcagtctccttgacgagagcatcaagcatctgacgtatcttagtgggtttttgacctctctgaagccacattgccgccgtgttgttgggcgagtaagaacatgcatattacgtggcagaatgatgagcttcatgaaagagtaatggatggatgatgcaatacttttagcctagtgatggtgacactaatgtgatagatttatacgaggaataaagtctcgtatttcgccattttttccctctcttgagagttgagtggttctatcgagtgatttttttatgcggctccaatgtaaatagcggttagtttcttgttatgtgcgagttgcatgaggtg

SEQ ID NO: 35298 - DNA, 245 bp, Setaria italica
  Peptide Sequence Number=SeqID_101272
ctaccaatgccttagagccagcttcctcctaccttgcaaagccaccatggctcaagaacaagccgagaccaagtacatgggcatcgagcaagaaaacgagagccttacatccacgcttcctacacgagaaggctggtgggagccgttcttcttcttacaaggctgctggctctccaccaaaatgacgaggagcgtcatggccatgaaaccccagttccacccacggcatgacgacatcatccttg

SEQ ID NO: 35299 - DNA, 716 bp, Setaria italica
  Peptide Sequence Number=SeqID_101273
ggtaaacaatccacaaaaccccatggtcacggaaggctccacttcacatcctttgtctctgcccaccacaaggagtaggacaaggtcacatccccccaattccctcactgctcagtgctcacaagcccaatcaatccccacatccatatcaacacaacgcaggaagcttcccatctctccatgcccccaccacctgcagtcttctgaagtctgaaccctgaagattactcatggcctagaccctagatcctgtcacaattcataaagaccccaattttcatccatcattcttgcttcacccgaaagctcgtatattttgtggaattgggtttcggaattggatcatacgggagttcttggggggtttggttttggttctggtgaggaggacgcgaaaggcgatgcctttcagcagcatgatccaggagatgaagggcgagatcggcgccatctcgcggcgcggcctgctgcggtcgcggtcgcagagcacgggccgcgtccagcgagtggagccggacgaggcagcgatgcgggagagctcgtgggcgcaggtgcccccggagctcctgcgggtggtgctggcgaaggtcgaggcaggggaggcgcggtggccgggacgcggggccgtcgtggcgtgcgccggcgtctgccgtggctggaggggcaccgtgaaggagatcgtgcccgtgccggaggcgtactaagggaaaaagaaa

SEQ ID NO: 35300 - DNA, 292 bp, Setaria italica
  Peptide Sequence Number=SeqID_101274
agaacggttccagagaggggcaatataatgtgaagatacaattacaatctgaaggacatgtttgccaactttgccttcctcagacccaaaataaaaagcaaaatgaactaattactcgtaaggtaacatatcacacgcgcacacacaggttcaaatttatgcagactagctgtcagctcgctagcacagtgtggagtctgtcagagcaagatatgagttggctcaggctcagttccatcgtattggcctcgtttgttgatacacgagagaggatttagagcctgagggttgc

SEQ ID NO: 35301 - DNA, 398 bp, Setaria italica
  Peptide Sequence Number=SeqID_101275
cccctcccttcctccccacctctcgttctctcccccttcctgtctctctcacgcgcgcccgcgcgcccagatctagggttccttcccgcggcgaagatgagcagcccccatggcggcctcgacgaccagatcgagcggctcatgcagtgcaagccgctccccgagcccgaggtcagagcgctgtgtgacaaggcgaaggagattctgatggaggaaagcaatgttcagcctgtaaagagtccggttacaatttgtggtgatattcatggacaatttcacgatcttgctgaactcttccgaattggtggaaagtgtccagatacaaactacttgtttatgggagattatgttgaccgtggctactattctgttgaaactgttacgcttttggtggcttt

SEQ ID NO: 35302 - DNA, 479 bp, Setaria italica
  Peptide Sequence Number=SeqID_101276
ttcgctatcctcagaggatcaccattctcagaggaaaccacgaaagccgacagttaatttatttcctgatttgcagatcactcaagtttatggattctatgatgagtgcttaaggaagtatggaaacgcaaacgtctggaaaacctttacggacctatttgactacttccccttgacggcattggtcgagtcagaatattctgcttgcatggtggattatcaccatctatcgagacccttgataacatccgcaacttcgatcgtgttcaagaagttcctccatgaaggtccaatgtgcgatcttctgtggtctgatccagatgatcgatgtggttgggggtatttctccacgtggtgctggatatacctttggacaggtacataaattatttggtatcacaaattgtagtggcgcttatcatatatcactatgcattgacactgccatattctgtgttgttccaggatatatcggagca

SEQ ID NO: 35303 - DNA, 513 bp, Setaria italica
  Peptide Sequence Number=SeqID_101277
ctcatgagcaaaaaggtcgtgactatatttagcgcaacctaaattaattgctaccgctgtgggaacatggcgtctatcttagaagtggatgattgcagggagcacactttcatccagtttgagccagccccaagaaggggagagccagatgtaactcgtaggacacctgactatttcctgtgatgcggaagtgatgtggatctgcagcaaaggtttgatagataggtgaagtttcctggttgcagatattttttgctcgaatccccccgtgtgctattcttattattttgcccatggctctttggctgtcgcgggcagctctgccacatcgtgattcaagtgtatacctactacagctggaaggaccccgattgtgttctcacttatctctaactggttgatgcttttggcttggtggggggtgctgcagtggtgggttcaagcatcaagcagcaatctgtattatgagaggaatctgttcccgtttgttatttctatttttgttcccctttt

SEQ ID NO: 35304 - DNA, 1176 bp, Setaria italica
  Peptide Sequence Number=SeqID_101278
tgagatatcatgtttgggatcacctcaattttcttcatagctggtgtaatgcttgactcgatcagcgataaaaactgcacaagttcccaattcacactctatgccatgccgcctggcactagctgaatctgtatttgctaatcaaatctgtaaatttattccaacacatctttgcaacccaactgtctagatatttgttactgtcagatgtgaagaaagatttcttaatccatgtaacttatgcattttataaggaaaaaaggagcatgggactgtgccaggctcttaatagtttgtagtatggaactgaaacgttagatcaatgaatacagcttcagtttggaaggataaaaaaacattggacatagcggtagagttcaataaagagtcctgaactagacactttgagttgtagcctgtagcctgtaccgtttcttcatggcaacccatactcatatttctttggaatgtatcatgccttcagaattgaagagctttaaccaacattaaatcgcagaagatgcaatggactctttcggacgatctatgccttttagacaccggattcagagatgtagttctcaattggtcgtattgtttatttaacatttggtgtttggttttgtcgtcgcttgtagcttgtagcctgtaaagagtccggttacaatttgtggtgatattcatggacaatttcacgatcttgctgaactcttccgaattggtggaaagtgtccagatacaaactacttgtttatgggagattatgttgaccgtggctactattctgttgaaactgttacgcttttggtggctttaaaagttcgctatcctcagaggatcaccattctcagaggaaaccacgaaagccgacagatcactcaagtttatggattctatgatgagtgcttaaggaagtgagtatctttgcttaggttaatgtattttttggctattatgctctgtaaagtattttgctgatatcactaagcaggattctatggcaagtgcttagaataaagatggcttaataacaaaatggcctaatatctggtctactggaaaatcatcgccttctgtccttgaaaactagtgcattcttgaaaattgtaagcttaaaatttagctacaacacgcctcatgatatctctgctgggcccagctagtataaaaggaagt

SEQ ID NO: 35305 - DNA, 474 bp, Setaria italica
  Peptide Sequence Number=SeqID_101279
gcagtgctggatatacctttggacaggatatatcggagcagttcaaccataccaataacttaaggcttattgctagagctcaccaattggtcatggagggattcaattgggctcatgagcaaaaggtcgtgactatatttagcgcacctaattattgctaccgctgtgggaacatggcgtctatcttagaagtggatgattgcagggagcacactttcatccagtttgagccagccccaagaaggggagagccagatgtaactcgtaggacacctgactatttcctgtgatgcggaagtgatgtggatctgcagcaaaggtttgatagataggtgaagtttcctggttgcagatattttttgctcgaatccccccgtgtgctattcttattattttgcccatggctctttggctgtcgcgggcagctctgccacaatcggggtccttccagctgtagtaggtatacacttgaat

SEQ ID NO: 35306 - DNA, 1395 bp, Setaria italica
  misc_feature (1360)..(1360): n is a, c, g, or t
  Peptide Sequence Number=SeqID_101280
tttaaaaggtaaaacgttttaaggttactttaaatttaaaacaaatctttttagtttaggttttagtcattaatgcttgtagcctgtaaagagtccggttacaatttgtggtgatattcatggacaatttcacgatcttgctgaactcttccgaattggtggaaagtgtccagatacaaactacttgtttatgggagattatgttgaccgtggctactattctgttgaaactgttacgcttttggtggctttaaaagttcgctatcctcagaggatcaccattctcagaggaaaccacgaaagccgacagatcactcaagtttatggattctatgatgagtgcttaaggaagtatggaaacgcaaacgtctggaaaacctttacggacctatttgactacttccccttgacggcattggtcgagtcagaaatattctgcttgcatggtggattatcaccatctatcgagacccttgataacatccgcaacttcgatcgtgttcaagaagttcctcatgaaggtccaatgtgcgatcttctgtggtctgatccagatgatcgatgtggttggggtatttctccacgtggtgctggatatacctttggacaggatatatcggagcagttcaaccataccaataacttaaggcttattgctagagctcaccaattggtcatggagggattcaattgggctcatgagcaaaaggtcgtgactatatttagcgcacctaattattgctaccgctgtgggaacatggcgtctatcttagaagtggatgattgcagggagcacactttcatccagtttgagccagccccaagaaggggagagccagatgtaactcgtaggacacctgactatttcctgtgatgcggaagtgatgtggatctgcagcaaaggtttgatagatagctctgccacatcgtgattcaagtgtatacctactacagctggaaggaccccgattgtgttctcacttatctctaactggttgatgcttttggcttggtggggggtgctgcagtggtgggttcaagcatcaagcagcaatctgtattatgagaggaatctgttcccgttgtattcattttgttcccctttcttcctcacttgtttctttttctttttttcttttctgtgtttcctgtagaggtgaacaattgtatggttctgtgttgggccattagtctccttttctgactaccttgatttgccgtatagaattaccttttaagcacaagtagtcttgagctgtagcattctttgcaaccagcatttgaattgagcactggtttcgcttttggattttgctttggaccaaaatgaggtgaggtgcaccactttgaagaaaaaaanaaaaaaactaaaaaagaagaactagaccaaggaca

SEQ ID NO: 35307 - DNA, 341 bp, Setaria italica
  Peptide Sequence Number=SeqID_101281
ttctctccccaaatctgaccctcccctcgtgcgaggtctcctcacccgacgcgacgcgatacgcaccagcaccacacgagccgggcgccttctatctagggttagggttccgcggcggcggcggcggccatggaggacgcggcggcagcggccctggcggcggcgagggggcggtggacgcagtgggaggaggtggtggtgtccaacgaccggggccggcgcctcgtgcactactacctccgcggcgagggggacgcgaaggagctggcggtggtggggcgggagcggagcccgcggcacatgtcgtacgccgtgcaggggcggttcctccgcgcgctcgc

SEQ ID NO: 35308 - DNA, 259 bp, Setaria italica
  Peptide Sequence Number=SeqID_101282
aaaaatgatatggtagtatgaaatcccccaagagtagcatatctagctccaggtacttacctaaaagagccaaaacttagtacaagagaacatgtactgccaagtatgaaatcatcaactgaacaataggatcttctcatcaactgacctattttttttactgcacatctcttatagcagtagaagagataatttctagtatttcatccattatgtaacctatcatcatttaataccaagttatttactaacgagtaaa

SEQ ID NO: 35309 - DNA, 366 bp, Setaria italica
  Peptide Sequence Number=SeqID_101283
cctgtagctcatcagagagcttgaggagtgcaaatggtaaatagagtagcttggtttttactgttatagagttatggagcttcctcatatattttcatgtttactttttgcaggaacaagagtatttagttcaatcgaaggagcaacgacttctgattcaacacacttcaacaaattcctagaagcagatgtctcgtcagaatattctgacacagcctcatcgatcacagtggcgacagcagaaatccctcgatcagaaagtagcagctcttgtcatatggattatagacaggaggtggagtttattaagtagtaaattccttgtaattgttctttagttttccctttctttttgttttttggttt

SEQ ID NO: 35310 - DNA, 1191 bp, Setaria italica
  Peptide Sequence Number=SeqID_101284
cagcactgagattgtttcattcacatttacctcaccagttgacaaatcattacacagcgtccactcccccaatcattcagtggaaaaacaatttatagagaatctgaacgctgtgtcaacttcaagcaatacatcaaacactaaacttgatgtcattgatggcgattatttgggactcctgttggagcaaaaattgagagagttgacgtcaggtgtgagatcaccctactttaatccagccaaaggtgttaaagtgcatggcacttcaacagctttggaagatacggcatcagcatgtgaaacatctagcattgcttctactgattatgatagggagtcgatgcagtctttcaatgatggaaaagctactctcccccagacagatcttgctactaaaagtggccagtcatttcaacctgcgaagtatgatcgtgatgtcacggatcgagcagagctagagcatcttcgccaaagtccccactcaacgtgggaagcttctatttcgatggaaacctgtagctcatcagagagcttgaggagtgcaaatggaacaagagtatttagttcaatcgaaggagcaacgacttctgattcaacacacttcaacaaattcctagaagcagatgtctcgtcagaatattctgacacagcctcatcgatcacagtggcgacagcagaaatccctcgatcagaaagtagcagctcttgtcatatggattatagacaggaggtggagtttataagagaaatcctgaatgctagttcctcttgtttggagcggtttggcgattcggatattttggatccacatctgttggaagaactgaatggcaatactaggtttttggctggtgaagatggcaaaggttacagattgaggcggaggctgctatttgactgtgtcagtgaattattgactgtgaaatgtgcatactacttcaatgctggctatggctcatggttcatggggatggcaatcctgcaaagtttgtcagcagaagaaatccatcgagagatgaccagcctgaaggttgccgaggagtggatggtggatgaacttgtgtacagggaaatgagtagtcctctggggagctgggtggatttcaagatggattcataccaggccggcggagacatagcggcggagttgttaggtccttgatcgatgaagtggttgttgatcttctgact

SEQ ID NO: 35311 - DNA, 662 bp, Setaria italica
  Peptide Sequence Number=SeqID_101285
ctattccagcagacaacacaaagaatattgacaggaactctacgcacagctccaatcagttcaatgtcaacaatgatcttcagtcaaactcttctgaagaaaattgctccaagaaaacagtacactcaacagaaatgagcagaaaggtagatcagaaggatgatgggcatatacctgatccccaacacaccatttctgagtcatttgctgaagaaaagctacgcaagcgagagtctaatctaggaccagaagacaagtcagcatcaagaaataaccaaattttaggctattccagaaggtgttcttcaaagtcagtatcacctgaggctaatttaagatcagttcatcaaacaacatcgtctcagtgtttcgaggggaatacgtcaaggactgagtttaatgttacaccaagaaagaataatcaggattttagttggcacgctgacacccaaggcctgcaagaaaatgaagtgataaagcatgttgtcaatagatcaggtggtggacatgctcagaggaggaagagcattcttgcttcattcagttcaaaggcaccgaatgaagccccagactcagagactggaatatcaagtagccctttatcaagcaaggaaagtgcatctgaagcagctgtttctaatctgggtagaagccctgctgaa

SEQ ID NO: 35312 - DNA, 226 bp, Setaria italica
  Peptide Sequence Number=SeqID_101286
gcaatgccagggagttgcgggaaattctttgggacacggcgaggcaggaggagtacattgatgagctggtcgagcacttgcggcgacgccaggaagattaggcgcggcttcctggttgcagtgggtaatgctcgatctctgccgcgaaatctggcacgaaaagcttttgtgctagtaaaaacatgcagttgtgttacgattttcgtggcttgatgttattttcaag

SEQ ID NO: 35313 - DNA, 373 bp, Setaria italica
  Peptide Sequence Number=SeqID_101287
aagaactaaactaagaacttaaggaaagggaacaaagacatgcacgctgcgaagagatccgctactgcttgagggcagcgggtaactttagaatagtccgtagacaaggacgacaagtggattaggatttggatcaaagaaggagacatgatcatcctgccagctggaatctatcatcggttcacgctcgacagtgccaactatgtgaagctgatgaggctcttcatcggggaaccagtctggactgcgctgaaccggcctcaggagggccaccccgcgaggcaagagtacgtcaagaatgtgatggcgaacactggatttgctcttgacaagacaacaactagaaatactagaccgttaaccaatagaaata

SEQ ID NO: 35314 - DNA, 1277 bp, Setaria italica
  misc_feature (1145)..(1277): n is a, c, g, or t
  Peptide Sequence Number=SeqID_101288
tgaatcgccagcaaccgcaagctgtttgtcgccggcagtgattctcaagagtcaggacagatcagggattccctgtggctccctttccatctgccagctccaccacaatcacaacacacagccgcacaagacaatccagtaagggacaatcttggttctggaacccactggtagccatccgtcctcctggatttatacgcgcacagggcagcgccccaaaagccaagcgagatatagctcccagttccgcggttcccgttccactcggcatggctccgcgggcatggattgtgggggagaagggcgaggacctccaagggcccaaggaattcctgcccctctccaagcttgaagatgtcggtgtgttgtattggcaattggaccctaagaagtctgaaagcgaagaagagcttgcaaaaattcgcaaagaaagaggatacagttacatggatcttattgagatatgtcctgacaaactggagaactatgaggagaaggtgaagaacttcttcacggagcacatgcacgctgacgaagagatccgctactgcttggagggcagcgggtactttgatgtccgtgacaaggacgacaagtggattaggatttggatcaaagaaggagacatgatcatcctgccagctggaatctatcatcggttcacgctcgacagtgccaactatgtgaagctgatgaggctcttcatcggggaaccagtctggactgcgctgaaccggcctcaggagggccaccccgcgaggcaagagtacgtcaagaatgtgatggcgaacactggatttgctcttgcagcacactgaatctgccgttaccatgaatatacaatttactgaactcatgtacatcacagtatgatcctacagttggagcagaaaccttgcttgctgtattatcagaatcatggaagtactgcatgcctgaattaagctgtgcacgtaaaagatacaaaatggcacctatggaaacgtacgatgcagtatttttccttgtatctgcttgatacagctaccatgttggttgcagcagcagcaatgctgtggtatatgcatctgccttgttgtgtatggtactactaaatactagtgtctgtcatggaatggaaatctcgtgtcattgaggactgtaannnnnnnnnnnnnnnnnnnnnnnnnnnnnnnnnnnnnnnnnnnnnnnnnnnnnnnnnnnnnnnnnnnnnnnnnnnnnnnnnnnnnnnnnnnnnnnnnnnnnnnnnnnnnnnnnnnnnnnnnnnnnnnnnnnnn

SEQ ID NO: 35315 - DNA, 304 bp, Setaria italica
  Peptide Sequence Number=SeqID_101289
atcgaaacctctggtgcctcggccaccgcagcagcctgggcgtggtggccccttctccgccgcggctcactgggcggcgtcatcccggctctaccgcgcggcggtggcggcgcgcgtctcctgcggtgctcgtgctcctcccgcgcccagccagaaatttgtagctgaaagtttcttcgagaacaagcaagagctttgcgtgtctcgacattaaagaagaaattgtagctgaagcaacaacagcaaagggaacaatggcactatcacgtagtatgagaacatgtttgcacagtggaagacttcg

SEQ ID NO: 35316 - DNA, 883 bp, Setaria italica
  Peptide Sequence Number=SeqID_101290
tagaccccttactaccgaccgcgcggtagagccgggatgacgccgcccagtgagccgcgcggcggtggcggcgcgcgtctcctgcggtgctcgtgctcctcccgcgcccagccagaaatttgtagctgaaagtttcttcgagaacaagcaagagctttgcgtgtctcgacattaaagaagaaattgtagctgaagcaacaacagcaaagggaacaatggcactatcacgtagtatgagaacatgtttgcacagtggaagacttgcccttcttgccatattggtctctggtggaattgtgttgcagatcctggcttgtgctctctataacaactggtggccaatgctaacagttctgatgtaccttatcctaccgatgcccctcatatttttcctgggttctgatacttcctcgattatgtctaacgggggtgatggctgggtgaacttcacgaaattcttgacgggcgcatcaatagtggggagcattgccattccgtcgatcctaaagcacgctggtgtcattggatggggagccctgacgatggagctgtcatcgttcgtggtcttcggcgtggcgatcctgtggtttatccagatgagcagtgaagacgagtacagcagtgtgttctagttttaatgctcacatcctcttggccgcgtgatacctttgcaaaatggttgtgaacttgcttgtacagcaacagtcggagcattgccttggtcgttggtccccattagtgatactctctcttagcgaaaaattggatgcgtttgtacatgtttggtccgccattgtggtcctctggtgatgctgttcctgacatacagaaaatttgtttacgtggtattgatcctcgactgaatgaaaaaaaaaaaaaaaaa

SEQ ID NO: 35317 - DNA, 324 bp, Setaria italica
  Peptide Sequence Number=SeqID_101291
tctaatgaggggcagtggcatctcaagtgctcaagtgacatcatctttgttggaatcagtgagtagagtggaggtctcctatttgatttagatgactttctgccctagaggtgttccaatgcgcacccttttttcaggttgagagtggcgatctaatagcgtatggacttatcccggaatttattggacgttttcctatccttgtcagcttggctgctttaaatgaggaccagcttgttcaggttctcatggagccaaagaatgctttgggtaaacaattcaagaaattgtttagcatgaacaatgttaagcttcatttcacag

SEQ ID NO: 35318 - DNA, 1954 bp, Setaria italica
  Peptide Sequence Number=SeqID_101292
gccgcccgcggccccgggtgggtaccaggcgctcaacctctgccccaactgccggagcgcctacttcttccgcccgcacgacctcgcgccgctccagggcaccttcgtcgagatcggccgcgtccgggccgacctcctcgaccaccccgccgcgagggccagggactcctccttctgggaagctatcaggaccagctcctcgtcgcgtgatgacggggacggtgggggcgtggccgtgcacgtgccgcccggtccgccgttccaccccaatcttaacgtcgtccgcgtcgccggcggaggcggtggagggggaggtggtgggggcgctggtggtgaggagggagcagggaatgagggttggggaggttccagtttgggtaaggatcttcccacgcccaaggagatttgtaaggggctcgacaagtatgtgattgggcaggacagagccaagaaggtgttatccgtcgcagtttacaaccactataaacggatataccatcaatcgttacaaaaggggtctggggcagattcgggtggttttgatggggaagctgatgatgacgacaatgtggaactagagaaaagcaatgtactgttaatggggcctactggctcaggtaaaactttacttgcgaagacattagctcgctttgtgaatgtaccatttgtaattgccgatgcaacaacattgacccaggcagggtatgtaggagaggatgtagaatctatactatacaagttactcacggtggcagattttaatgtgcaagcagcacagcaagggatggtgtacattgacgaagttgataagattacaaagaaggctgagagccttaatattagtagagacgtgtcaggtgaaggtgttcagcaggcattgctgaaaatgctggaaggcacgattgtcaacgttcctgagaaaggagcaaggaagcatcctcgtggtgataatatacagatagatacaaaggacattctttttatatgtggtggtgcttttgtggatttggagaaaactatatcagagagacggcaggattcttctattggctttggggcaccagtccgtgcaaacatgaggggcagtggcatctcaagtgctcaagtgacatcatctttgttggaatcagttgagagtggcgatctaatagcgtatggacttatcccggaatttattggacgttttcctatccttgtcagcttggctgctttaaatgaggaccagcttgttcaggttctcatggagccaaagaatgctttgggtaaacaattcaagaaattgtttagcatgaacaatgttaagcttcatttcacagatggggcgcttagaataattgccaaaaaggcaatgtccaaaaatacgggtgcacgggggttaagaactatccttgagaatatcctcatggattccatgtatgagattccagatgcaaaatctggggagaagcgaattgatgcagtggttgtggatgaggatgctgtagggtcagtggaccaacctggctgcggagccaagatcctttatggtgatggtgccttagatcaatatctctccaagatcaaagcatcgggagatggagcaggaagcgaagtggatggagaagctgagctttcgccgtcaagagccataggcatgtgattcttggttctgacagctctagtgtaacctgtaaaatctaatcccaatcgtatcaatgtaagtattagcctttgtaaatgaacagaatgtgcggcgcccattgttctgtcaaggcttggcacgctgcccagctgttgtcatgccttgcatgatttgcagcaggatttggaagagtatggtcgggttcagtatctatgtcgtacagagactgtcacggtgtcatgtataaaaggggtgatgctcataacttgtaatggctgctgggtgttaaaacctgagacaatggaatgaaatgcaagaggtgataagggggct

SEQ ID NO: 35319 - DNA, 220 bp, Setaria italica
  Peptide Sequence Number=SeqID_101293
tgcagttcatcaatcatctggtcaatcagcttgctgctcatcggtttctgaagataagttgccagcttgaaaaacgagcaaaaatatcgagcgcttattcattattgaaagctatagaattggaactgcagagctacttatcagctgtcgatgtccgcctggataaatatcattcaattaatcaagctgcatctgaaatgtttgaagaaggatctgttga

SEQ ID NO: 35320 - DNA, 442 bp, Setaria italica
  Peptide Sequence Number=SeqID_101294
caacaaagcattccgtctcgctcgaatttcgaacatatgcaattgaacatgttgttccccaggtcaacttcaacagaaaaggagtctccgggaaattcagcctcctcatagtccagtgttttcttaactgcataaactctgccgctttctatttcaaaaacattgaaagctgatgcatcaagtagctctttctgaaatttcaagaacattcccattgtgtaaacttctgcagcatgcctctctacttggctgccttgtgcagtacattgtcttttctgtgtagactcaagtccatacccatcttcagggctaataacattcttctggaagatgtcatactgacagaagaagttttctatggcatccttctgcagaccattgctccttgaagattgtaataactaaagtaaaaagaaaaactaaaaaactaaaaaacaaaaaa

SEQ ID NO: 35321 - DNA, 665 bp, Setaria italica
  Peptide Sequence Number=SeqID_101295
tgtaagatttacatgttctccagcctcatgttcaggagcaagcatgattccatatctttcttccaaatctgtatccccttttcttgtattctgcacatatcaaaatatcaaggttttggtaatttgacacttacttctgtagcatttttttcaaatgatgtaacctttgagtagcttcctaccagcaatgtttttgttataacatggaagggaacaattcagtgaaataaatggaacaattcaatgcattatcaagaaaaatacaaaaatatagttggaacatttgcgtatctcaactgtcataagtactttaagttcgtagctacttctttctcaaaaacaaagttcacaactagttaacatcataagcccattcctttcacttctgtttctaccattgccatttctgattccttttctgcttcctttcgtggttcacggaccttattcctagcagataccacgaggctataagattctctatttgctgattcattcccttgatgcatacccgattctccattcgtaccactcatttcctggtaatatttcaaattcctctcggtcatagtttgagcaggcagcaaggggcttgattttgcacatctctcctccattctttttcttctgtctcgccctctatacctctgccggctgcgcgcgag

SEQ ID NO: 35322 - DNA, 559 bp, Setaria italica
  misc_feature (1)..(50): n is a, c, g, or t
  Peptide Sequence Number=SeqID_101296
nnnnnnnnnnnnnnnnnnnnnnnnnnnnnnnnnnnnnnnnnnnnnnnnnnttttgagggttgaacagaaccacttgagaccaagatacattactagttatctctaactaatgatgacttgtcatctgaaaggatacaatctaatgacttgtcccctaaacaacccagctaataaaaaaactgatatggagctatgtaatgtgctacagtaccgcatgtgctgatcatgaacaattcctcttcttgtgtaggtgctccctcttttcctcgctattcatttgctttgctcccgttctggtcttcttgtgtggttctttcatccgtgccctcagctagctccgcttgacagcttctgctgaatcctttcgagctcttccaagaatacttgactttgctttggatccttgcttacagtggcaccaatttctgctgtcctgttcataagcacagcatatctcgcattttgtgaagcagttgatcctgtcttctctgtgcaaagtttctgcaactcctgctctctgaacttctttgtccacctttgcttgatgtagtgctcaggg

SEQ ID NO: 35323 - DNA, 2382 bp, Setaria italica
  Peptide Sequence Number=SeqID_101297
tttgagaatgcaactttctgattgatacttctttcctagtacaaagggatcgcaatgccaccatagttacaagaggatcgaaaaggatccagaaacaatatttcaatccacaaaaagaaagaaccatccagttcaaactacttgaactaactaatgacttccagcaaaaacaacccaactaacgaaaactgattttgataacacaaactactcatcatttcttacagtagcgcaaatttctaccatcctgttcattagcagagcacatcacaaggcattctgtgaaacagttgaccttgtcttctccgtgccgtgaagcttctgcaactcctgctctctgaacttcttgtccacctttgcttgatgtagtgctcaggtatctcgttaattccaaactgcgtgaaaagcctcagaacatggcaacaaagtattccatctctctcaaacttcaaacatatgcaattaaatgtctatttttcatgtcaacttcaacagagaaggtatagtggagaaactcagaatcctcatagtccagcattctcttcaccatataaattctgtcccttcctttttgaaaacattgaaagctgatgcatcaagtagctctttctgaaatttcaagaacagccccattgtgtaaatttctgcagcatgcctttctattggttgcctagtacagtattttggcttttgccgagttgactcaaatctatcagtgctaacagactcttggaagatgttatattgcctgatgaaggtttctatggtatcctcttgcagaacatagtccttgaagattgaatttgtgttctcacaacttccggaggaacgtataaatgggcaaaacacatgtttgaagtaaactggcacccacatagaccttgtccaatacatgtgcttcaagtgtgcgtttagttctgcagcatatttctcaagcattgttttccaatcattctcaaattcttcagtagttaaagaatttgtaacaagacgtgtcaggtcagcttccattccaggtctgttaaccataaaacctccaaattcagctgcagcttccctcatcacatgccacatgctgaaccgatgaaaaactgtggggaatacctctgcaattgatttctgtatggctgaatcctgatgtgtcattataatacttggtttcttgccatccattacatccaagaatgtcctgaataaccaagagaatgtctctgcctcatcattttcaagcaaagcccaaccgaaaacagttggcttaccatgcccattaattccaattaatgaggcaaatggcatgtggtatgcattggttctacaagtcgtattaaaatgaatgaaatctccatataaagcataatcaagtctagctcgcgcatctgtccaaaagatacttcttatagtgctatcttcatcagtcttcatagcgtagtagaacccaggttgctccttttgcaatcttctcacatgttctagtgtgcttccaatatctgtattcctagtcttcatcagtctgtcagactgtttcaagttgttagaatccactttccttgcaggtatattcttcaatctcccctgtaatttcctgaaaatttccattatctttgtcggcttaatcctgctttcctgcaatattcttgagaagtgtctctcttcctccgacatgtccttgtggctcatgaaaaatctggtcagcaagggcgaacaccaaagtgggtggttatgttcattcatagctgctgtaacctcccatctgtctgcaacaagtttcacagtcatcttcatgcggcattgagtgtgctcaacagcatctcttctcctcttcctctgtcttgtatcagtctcttttgctttcctacttttattgcacacaaatgttatcttcttgtgcttgtaattcgttcctttaatcaccgcgaatccagtaacttgcccatagacactgataaagcgatgagcatcttgtagtgtgggaaataccatgccaacctctggaggcctggccttttccatttcttctggacttggaaacatatagtcttcatcaccatcagcttctgcttcagcttgatctttttggcattcattgaggtcttcatctccatttaggatggcatttccattctcttggtccagttcctgaacaaatgtgtcaccagtttccagggcctgtatttctgatcgcctgttcgtttcagtatcattccacaggaaaataggtgactgctgcaagctatcttcagttgtaagatttacatgttctccagcctcatgttcaggagcaagcatgattccatatctttcttccaaatctgtatccccttttcttgtattctgagactaatacttacaagttagtaaagaatttaacaatagttactacca

SEQ ID NO: 35324 - DNA, 791 bp, Setaria italica
  Peptide Sequence Number=SeqID_101298
tgatgatgccaaccaataacactcagttatgaattgagttaggagaattacagggtaagaaagtttgatactaataaagtaagaaatcctatccctatgatattttttccgtggtgttgagacttcagggttcaattacttggtgatgtatacatttatcactttggccctgtttggatctattagtgcaatagttagcagctaaaattagcaaatggggatccaaacaagcctgccgcatgctaactattagcacctcaccctgctaacaattagtttgttagctggtaggaggctgctaataggtgctaatagctcaaaaccaaccatccaaatccaaccacctactagcaggtggatccaaacatcccctgctaatagttagcagctatgagccattagccgattaactattagcactaataggtccaaacaggccctatgtttgaatttccactgaccatgtggtgattacacatcctgacctctttctgtgtgccactgagtttgaattgcatgctcttgatgcaatagagttccctaggtgtttttatgactgaatttttttcaggtaattacagaagctatggttaatctagtgtcagtcccagcaacttgagtgggctgagactgctgctttcgattgggattcagctgtgcgcaagagctatcaagtaaatcttgtaaactaatttggatgcttcaaagtcagtgtactcagtatctgcttgagaaaaccaagtggactattcaatttggcaatgtttcagttatattgattgaattcttaa

SEQ ID NO: 35325 - DNA, 842 bp, Setaria italica
  misc_feature (764)..(764): n is a, c, g, or t
  misc_feature (777)..(842): n is a, c, g, or t
  Peptide Sequence Number=SeqID_101299
ctcgcctcgcgcctcgtctcctccctctccccttttctttcattttgcccaacccggcggcggctgcggctgcggctccccccgaaggttggaggaagctccccgaaaccctcgctgccgctgccgctgccgtggccgctgccggcgacgaaattgttgtcgggagggaggaagccatggagggcgctaccggagtcggtgcgtccgagtgcgagcggaagccgctgtcggaggtggtgggcgactgcgtgcagcgctggttccaggacgccttcaaggaggcgcgcaaaggggacgtcgccaaccaggtgctcgtcgcgcagatgttcttctcgggttacggggttcccaagaacgagtacaagggaagacaatggatggacagggcatccaaatacaggagttcagcgttgaaggttggcatgaaacgtccaggatacaatgcaagtgactctgactccgatgaggcaaatgatgatgccaaccaataacactcagttatgaattgagttaggagaattacagggtaattacagaagctatggttaatctagtgtcagtcccagcaacttgagtgggctgagactgctgctttcgattgggattcagctgtgcgcaagagctatcaagtaaatcttgtaaactaatttggatgcttcaaagtacagtgtactcagtatctgcttgagaaaaccaagtggactattcaatttggcaatgtttcagtatattgattgaattcattttttacccccctttttttnatttttgccatcnnnnnnnnnnnnnnnnnnnnnnnnnnnnnnnnnnnnnnnnnnnnnnnnnnnnnnnnnnnnnnnnnn

SEQ ID NO: 35326 - DNA, 358 bp, Setaria italica
  Peptide Sequence Number=SeqID_101300
gcaaggaccacctcggcgacggcaagcccggcgccggggtcgtcaccgagctgcccctgacctcggctccgaccccaacggcaacggatacggcaagcagcacgcgctcggcggccatgtcgttaccgacgtcgagacgccggcggccaccgtgaccaagtgcgcttactgacaagccgatcgatcgagcttccatcacactgcacactagtgtagtgcatccaacatcagtggctgtacgtgtaatccaggagagatgatgcgctgtgcttcgattgctctgctctcgtagagacgccggactaaaactatatcactctgcattaaccacttttgtttaagaaaaaaaacaaaaaaa

SEQ ID NO: 35327 - DNA, 303 bp, Setaria italica
  Peptide Sequence Number=SeqID_101301
gcccccccttcccatctgccacaattgccagtttccgctccactccgcttccggtaccagccggcgatggccacggccgcagcagccgccaccgcggcctctacgtcgctccggccgccgtctgcatcccagcgacgcttggcgagtgtgccccgtcggtggtgttgggggatccctgtgcggtccgccggggggagcgcattccatgcggagcggcggaggcggagcaccttattatgcgcagctgataaagctctgaagaatccctcaagaagaccattgaagtggataggttgattgata

SEQ ID NO: 35328 - DNA, 588 bp, Setaria italica
  Peptide Sequence Number=SeqID_101302
attcccaatctcgccgccgccagcccgcttggcctcgccctcccctctcgcccaacggccgtgtcggattgtctcgccgcttgtgttgggcgggtgcgtgggggcggagggggaggtgaacctggaggcggccgcggcggtggcggcggagagggacgagaccgtggcgctgcgcccgcgagggagctcgtggtggggtacgcgctctcgtcgaagaagcccaagagcttcctccagcccaagctccgggggctcgccaggtattgcggtttgcgatgtgcgccgccgacaatcactgcctccctctctcggcgggtgcgagtcctctccttccaaaatcccgtggtgccctggagtccttgtcgaaccggcagctggatcagcgaactccggctccaagcctccacccagatctggatcgatctctaggaccccaggaagtttgtggtgcattgtgtaaattccaatcggcatgctgaagtggataattgggatgccacagtggaaaaggttgtcccatactgatagcacgtaatgctatctattgctgtggagattcaaaacatcacatactcgtttgcttcgatt

SEQ ID NO: 35329 - DNA, 293 bp, Setaria italica
  Peptide Sequence Number=SeqID_101303
cgactgcaacccctcctacacgagcatattggacgtgacgacatccttttcgacacagtcttctctaagtttgttgcggcacaaagtggaggcatgtttctggaggtactagagccctatatattgaaggatatgcttggttctctgccccctgagattatgcaagcactagtggagcattatagtggcaaaggatggttgcagcgagttgaacaatgcattcttcacatggatatttcttcattggattttaatcaggtggtcagactgtgtcgtgaacatgggctatatgg

SEQ ID NO: 35330 - DNA, 281 bp, Setaria italica
  Peptide Sequence Number=SeqID_101304
tgggagaagacaacttcattgatgttgatgaagaaaatggtgaggatgatgtcgaagagcaaggaattttcccaaactctggtaaccattttagagacctcaatcttgatgtggaaattgttgcaattgtgttctagattgaggtcaaagatatatttgctagatgacatgaattgttattgcaattgctagatgatattttatctatcattgttgttcatacatatgtattgtcttttgcattgatctcaatctatgaattcttgctaatgtttgctatt

SEQ ID NO: 35331 - DNA, 634 bp, Setaria italica
  Peptide Sequence Number=SeqID_101305
ttagtaagttttacggttaagtccgtctatttttcgttgcttatctccatctccagcagctgggcatcgtgagccttctttcctgcgagccttcttatctgcagctgctttggccgcagaggcagtctgcaaggcgagcgacccgtcggcccccgcgcgctgcaactctccgaagggctcgtcggccagcacgcgctctagctcccgctcccgctccgtatcctcatcatcgctccctgacttggactccgaccccgacgaggaggagaccgcaacctcaccggtcatggcggcgcggccatggcgcgaggggggatcagctgctgtccgcgcgggaggtcgattcggcgcctgcggagctcgagtcgacagcggcggaggtcgattcagcacctgcggaggtcgaatcgacggcggcggagatggctcctgtcagagtttgctcgaagcgtggggaaagcgacgacgcggggagaggaggaggagatggatttggcgcggaaaaatcccacgcgcgcccaaattgctgtccgcgcgggatccgcgtgcggtcgatggagacgagggccgtacaacgctgctgaaccgtctctacccgcctcggagcacgggacgtcgccgtcgtctcgcgagg

SEQ ID NO: 35332 - DNA, 404 bp, Setaria italica
  misc_feature (392)..(392): n is a, c, g, or t
  Peptide Sequence Number=SeqID_101306
cccgttgctaagagcctttttaagtacgggattacgcaggcctcttgtttcctaacccccactactctacgcactcatccagaggcagacggggagagagagattgggtttggttgtgacccgtgtccgtgttcttgctgcccttttcgcaatacggcagatataaaattcctctttttacactgcatccctggctgcccgcttaattttagcaattcagcggccgcagctcctcccttcgcttcgctcggtggtgtctgagcctccttcgcttcgccttgctgtccgtctcactccctcggctcgtctgccccgccttgtcgccggcgtcgggggcgggagctagtcggcgggcggggggcggcgcgcggcgccgggcgcggatcggccgngtgtgcatggtc

SEQ ID NO: 35333 - DNA, 267 bp, Setaria italica
  Peptide Sequence Number=SeqID_101307
gacgcccgcgcccgtaggaccgagtcgcccgcaacgctgccgccggccgaggcgccgtccaagggcaagaacaagcacaagaggaggaggaagcagcacggcaagaaggaggcccccgcggaggcgccgcagccgctgagcccgccggcgcccgccgcgccgtcgcccgctgatctcgaggacgtgtccggccccgcgccgtcggcgttcgacgtgaacgcgagcagccggcagcaccagcactggggctcgccgtcctgcagaccg

SEQ ID NO: 35334 - DNA, 397 bp, Setaria italica
  Peptide Sequence Number=SeqID_101308
cgccacatggtggcggccggcctgtggggggagccgttccggcccgacggcgacgctttcgtcgcgcccctggccgccgccgctccggtaaccggagtggcggtggacgtcgtcgtcgaaacagaggccaagttcgccttgcaggcgcaggacgaggccgtcccgccggtggaagaggtggcgccgtcgtcggatagcttcggccacgacgacgccaggccccgagacaagacacagaggaggctcgcgcagaacagagaggctgctcggaagagccggctacggaagaaggcctacatccagaatcttgagacgagccggctgaagctggcgcagctggagcaggagctcaccatggccaggcgccagcaggtacagctacgaatcattcaggaga

SEQ ID NO: 35335 - DNA, 251 bp, Setaria italica
  Peptide Sequence Number=SeqID_101309
attagttctcattgctttgcattgccgctagaccgaccacacacatgcttgtcaaatccaggagaacaataccagtccacatgggcctagtgccaactagcggcaatgcaaagcaatgagaactaattcgacctctaccagcctactataggaaaagaagcgagcggggtagacgatagcagctacaataatggcgcagcgcacaactttgacagcacaaggaacaatactaaagggttaactagtaccca

SEQ ID NO: 35336 - DNA, 375 bp, Setaria italica
  Peptide Sequence Number=SeqID_101310
taccttaatcaaggaataccgtgggaagattgaggctgaattgagcaatatctgtgatggcatcctgaagctgcttgattcccacctagttccttcttctactgctgccgaatcaaaggtcttctacctcaagatgaagggtgattatcacaggtatcttgcggaatttaagactggcacagagaggaaggaatctgctgagagcacgatggtggcctacaaggctgctcaggacattgctctggctgagatggcacctacccatccgataaggctcacatgctcttcattcttacgggactcctccttctgttcaatggaagagacaatgcgccatgaagcacggcgagccccaatcacattcttgtatgcaac

SEQ ID NO: 35337 - DNA, 1381 bp, Setaria italica
  Peptide Sequence Number=SeqID_101311
atttagcagcaagatcaagttacagttacaatgtttttgactggaatggttgctcagtgttacgctaaacaattaagggtttactaacaccattcgaatgatttgcctgggaaaagggcatctctaagcttggtcgatagagaacaaaacggctggctttggtgacgaaatcacgtgatcaggacgaccagacgtgtttgccaaagcaaaacgagagcattgaacgattgaaagaaagaacgcggaacagaacacaatagcaacaaattgcaacagcaaaacaagaaagacgacttcaatagcatcagtccaaatggacccagtgccaactaaagcaatggggctaataatccgaccactaccagcctactacatgaagctcggagtcagggaatccatggaggagcaagcgcacggcttcgagcagcacaggaaaaacatgccgaaccatccatcaaggtttaccaggctactaagcctcaccagcatcgcccttgggggcttctttgccctcctcagcaccatcctccgtgaggtcggaggtccagagggtcaagttgtccctcaggagctgcatgatcaaggtgctgtctttgtatgactcctctccaagggtgtccaactcggagatagcctcgtcaaatgcctgctttgctaggttgcaagctttgtccggagagctcagaatctcataatagaacactgagaagttaagtgcaagtccaagccttatgggatgggtaggtgccagttcagccagtgcaatatcctgagctgccttataagccaccattgtgctctctgcagattccttcctctcagtaccagtcttaaattcagcaaggtacctgtgataatcacccttcatcttgaggtagaacacctttgactctgcagcagtggaggaaggcacaaggtgcgagtcaagcagcttcaggataccatcacaaatattgctcaattcagcctcaatcttgccacggtattccttgatctgagcgacatgttcctcgttcttgcgggactcctccttctgctcaatggaggagacaatgcgccatgaggcacggcgagccccaatcacattcttgtaagcaacagacaggaggttacgctcctcaacggtgagctcttccacatctacggtcttagccaccttctccatgtactcaaccatctcctcgtaccgttctgcctgctcagccagcttggccatgtagacattctcctcccgcgacatgttgatcaagaaattgagttactgcaatacccagaaaaaacactgatgagacaatttcaaaaagccggtagagactattatctaagcaaaataacaacatgcagtgatgcagaagggcaatagttagcttaacttgtagta

SEQ ID NO: 35338 - DNA, 1317 bp, Setaria italica
  Peptide Sequence Number=SeqID_101312
ttttttttttttttttttaagttaagggtagggacccaaaggctgttgtaaaaacgcgtataaaggtgtaagcattacacagacaaggaataaacgaagatcaatcacggctatgctgtctgttccctctttttctgttcctcgttcttcgctgttcttccttcccttttcgtttctcccaattcttctctgacccagtcgagcacacgagtgaatctgatcccatcgcggtcttgacgtgctaagaccgcaacagggaacaataccagtccacacggacctagtgccaactagcggcaacacaaagcaatggggaactaattcgaccactaccagcctactaatacaaggaaaaaggagtgaggggagaggaaataagctacaataatggcacggcacagcttcgacagcattgagcatctaaaacaatgggctcgaacaacatgcccgctccgaagattactgtccctcgccagcatcacctttcgaggcttctttgccctcgtcggcaccatcctccgtgaggtcagaggtccaaagggtcaagttgtccctcaggagctgcatgatcagagtgctatctttgtatgactcctccccaagggtgtctaactcagagatagcttcatcaaacgcctgctttgcaaggttgcaagctttgtctggggagttcagaatctcataatagaacactgagaagttaagagcaagcccaagccttatcggatgggtaggtgccatctcagccagagcaatgtcctgagcagccttgtaggccaccatcgtgctctcagcagattccttcctctctgtgccagtcttaaattccgcaagatacctgtgataatcacccttcatcttgaggtagaagacctttgattcggcagcagtagaagaaggaactaggtgggaatcaagcagcttcaggatgccatcacagatattgctcaattcagcctcaatcttcccacggtattccttgataaggttcacatgctcttcattcttacgggactcctccttctgttcaatggaagagacaatgcgccatgaagcacggcgagccccaatcacattcttgtatgcaacagacaggaggttacgctcctcaacagtgagctcttcaacatctacagtcttagccaccttctccatatactcaaccatctcctcatacctttcagcctgctcagccagcttggccatgtaaacattctcctccctcgacatattgacaaaagaacaaacttactcccggcgcggggctgggcggctggctcttgtgcgcggcggaacggtgtggtcggggaactgcgg

SEQ ID NO: 35339 - DNA, 1296 bp, Setaria italica
  Peptide Sequence Number=SeqID_101313
ctgaggagggcaaagaagccccgaaaggcgatgctggcgagggacagtaacccttagatgtcctgtgctgtcaaagttgtgcgctgcgccattattgtagctgctatcgtctaccccgctcgcttcttttcctatagtaggctggtagaggtcgaattagttctcattgctttgcattgccgctagttggcactaggcccatgtggactgatattgctcaataaaacgctagaccgaccacacacatgcttgtcaaatccaggagaacaataccagtccacatgggcctagtgccaactagcggcaatgcaaagcaatgagaactaattcgacctctaccagcctactataggaaaagaagcgagcggggtagacgatagcagctacaataatggcgcagcgcacaactttgacagcacaggacatctaagggttactgtccctcgccagcatcgcctttcggggcttctttgccctcctcagcaccatcctccgtgaggtcggaggtccaaagggtcaagttgtccctcaggagctgcatgatcagagtgctgtctttgtatgactcctccccaaggggtgtccaactcagagatagcctcatcaaatgcctgctttgcgaggttgcaagctttgtctggggagttcagaatctcgtaatagaacaccgagaagttaagaggctagtccaagccttatcggatgggtaggtgccagctcagccagagcaatatcctgagcagccttgtaggccaccattgtgctctcggcagattccttcctctcagcgccagtcttaaactcagcaagatacctgtggtagtcacccttcatcttgaggtagaagacctttgactcagcagcactagaagaaggcacaaggtgtgagtcaagcagcttcaggatgccatcacagatattgctcagctcagcctcaatcttgccacggtattcctttatcagagaaacatgctcctcattcttgcgggactcctctttctgttcaatggatgagacaatgcgccatgaagcacggcgagccccaatcacattcttgtatgcaacagacaggaggttacgctcctcaacagtgagctcttcaacatctacggtcttggccaccttctccatgtattcaaccatctcctcgtacctttcggcctgctctgccagcttggccatgtaaacattctcttccctcgacatgttgatcaaggataaggcttactcctggagcgtgggtcggctctcgagcgcagcggaacggcgcggtcgggaactccggatgctggggtg

SEQ ID NO: 35340 - DNA, 1740 bp, Setaria italica
  Peptide Sequence Number=SeqID_101314
ggaggggagaagccagagcggccgcactagccccaatcgccctcgtccccgccgcgcctccgaccccagccaaagcagcctcgcgccgctcgatggcggcgccgtaccaccagccgacgagcctggaggaggtccgcacgctgtggatcggcgacctccagtactggaccgacgagaactacctctacggctgcttcgcccacaccggggaggtacaatctgttaaaataatacgcaacaaagtaacaagccttccagagggttatgggtttatagaattcatttctcatgaagctgctgagaaagttctgcagacttacaatggcacacaaatgcctggaactgagcacacgttcagattgaactgggcctctttcagctctggtgagaggcgtcctgatgcaggacctgatcattcgattttcgtaggagacctggcacctgatgtcacagattacttactacaggagacattccgggtgaactatccatctgttagaggggctaaggttgtcacagatccaaatactgggagatctaaaggatatggatttgtaaagttcgctgatgaaaatgaaaagaaccgtgcaatgacagaaatgaatggtgtgtactgctcaacaagacctatgcggataagtgctgcaatacctaagaaatctgctggctctcagcttcagtattcagctgctaaagcgatatatccagcaacagcttatgcagtgcctcagctccagacagttctaccagatagtgatcctacaaacacaacgatatttattggtaacttggacccgaatgtgacagaagatgagctgaggcagatatgtgttcagtttggggagcttatatatgtaaagattccagtcggtaaagggtgtggatttgtacagtatgcagctagggcatcagctgaagaggcagtacaacgtcttcatggcacaatgattggccaacaagcagttcgcctttcatggggccgaagtcctgcaagtaaacaggatccatcagctgtgtggagtcagcaagcagatccaaatcagtgggcaagcacttactatggatatgggtacgatacatatggatatgctcaggacccatcatatgcatatggtgcttatgctggatatagccagtatccccaacaggttgacggaactggtgacgctacttgtgttgctggtagccatccaggcatggaacaaaaagaggagccatacgatccaatgaacatacctgacgtcgacaagctgaatgcttcatacatggctgttcacggtagagccatgctagggcggtccttgtggttgaagacgaacccgctgccccagccgacatgagcctgcatccaacgttgcctttctctgaagactgcaatactggtggacgcagctgggtctccctcgcagatgattttggccccttcccagtaggcattattatgacagcgatcaatcatcagacgcgagattacagtaggctcactgacatcttagtgtatgctgagcacatctcatgtatgatcggcatggcccttatgtgtgttctaggctgctgcttaatactatcagtgcaatgttgtgagagcggtgaaagttagctcctttttttcacctgatctttctgctgtttgatcctggactggttcactcgattgcacaatggcatagcaatatacctggtggggatctgatgggtttctctcccccaatggtaaaaccaaatatatactgtctgagt

SEQ ID NO: 35341 - DNA, 588 bp, Setaria italica
  Peptide Sequence Number=SeqID_101315
aacctttgatggagttgatgtgatggagaagattggcagaggaggtgacctctgttgttgagaatagaccagagcttcgcaagatttcgtttgttgcacattcattgggtggactaatcgcaagatatgctattgcattattatatgagagagatacacaaaaagattctcatgaagaatgtgataagaatgccgttggcaatcctagtaaccagcatagttctggaggcaaaattgctggtttggagcctattaacttcatcacttttgcaacaccacaccttggtacaagatcacacaaacaaataccacttctacgtggttccaacaaattggaaaagatggcatatagtttgtcttggattgctgggaaaagcggaaaacatcttttcctgaaagatatagaagatgagaaaccaccgctccttctacagatggttactgactatggtggtctccatttcatgtcagctctacgctctttcaagcgtcgtgttgtctactccaatgtctgcagtgatttttatgttggctggaggacatcttcaattcgccgtcagcatgagcttcctgagcgccaaagtttta

SEQ ID NO: 35342 - DNA, 468 bp, Setaria italica
  Peptide Sequence Number=SeqID_101316
aaagtgctttcaagttgagactcttccagtattacattgcacttcgacattcggagcgcagcgcttcaattcccacatcgcaaagccaggccccaactccagaccatcttccagttcggttagcccataccattcaattcaaatacaaagagatttcaactactggtgacagtgatcgctaaatattaaacattatgatggtttcttttcatcttgtatcccccttgagaaggtcttcaacagagcttctgtactttgtaatcaactcctttctttgatcaagcagctgccgtgtttcatccaaactttgcctttgtccctcgaccgtagtagactttgaacttattgttcctgatatggagttcaacaattgttggcacctggcaaattggctggtcaactcttcaacctatatattaaaaacaagcttcttgttaatataagaacataaagaaattaggatttgca

SEQ ID NO: 35343 - DNA, 836 bp, Setaria italica
  misc_feature (785)..(785): n is a, c, g, or t
  Peptide Sequence Number=SeqID_101317
taccccctgacccctcgcttaccctagccccacagaatcccctcagctgcacgccgccacttagttccctgtagatagacccatgattgacagtgagacaaggtgcagcaacaagaacagccatcacaagcacctccgtcggccgcaaatcgtcgaagcctccacccctcagcatccacaaatggagcactgcagccgccctttcaagtttgcgtgcctccccagttttgtggaagccagatctgtgctggcgctggagaagatggggaaggcagagggagagacgctgcctgctggttcctagtatccttcccactcctctcttctcagtggtctctccttccctcgctcttcccctcttgtggcaaggtgccggtgacaccttggcccccgtgagccatggccacatgtgacaaggtgttaagaaccatggccacatggacaaatttggtaaacaccagacaaaaacactctccgaaaccacctagggggtcatttagacagttttaaatagttaaaagtggaatgcctggtttcataattctgagggctaagttaatgaacctcaatacttgggggcgtatcaggtatgtagacttaatctttctacaatgaagctgcaagtattgcttctgccaagatcgtacactataagtagaagcacatcaatctataaacaattgaaattagaagaaaaccttaccagtgcatcaaaattttgatcccttgttcctgaaccaatcgcatcagataatcttgtgaccaactgacatagcaaaaaaagntgtaaagaaaaagcaaccagtatttcacaaaacattccactactttctacg

SEQ ID NO: 35344 - DNA, 894 bp, Setaria italica
  Peptide Sequence Number=SeqID_101318
tctagttcttacttagtttttttttttttttttgtgtgtcaaacccatttactgtcgatatcttaaaccacatcatccttagcatacaagaccagagctgttgaaagcaatactttgtcttgcacaaacatgactttgacatgtacaaagtgctttcaagttgagactcttccagtatacattgcacttcgacattcggagcgcagcgcttcaattcccacatcgcaaagccaggccccaactccagaccatcttccagttcggttagcccataccattcaattcaaatacaaagagatttcaactactggtgacagtgatcgctaaatattaaacattatgatggttttcttttcatcttgtatcccccttgagaaggtcttcaacagagcttctgtactttgtaatcaactcctttctttgatcaagcagctgccgtgtttcatccaaactttgcctttgtccctcgaccgtagtagactttgaacttattgttcctgatatggagttcaacaattgttggcacctggcaaattggctggtcaactcttcaaccagtgcatcaaaattttgatcccttgttcctgaaccaatcgcatcagataatcttgtgaccaaatggaggaggtggaagtgggaggcgagcgaggcatggtgatgctgctgcggctgtggcggagacatcagccccggctgcgcctgcggtggagacatcatcgccggctgctgctgctggtggtggtattgaagagcgtggaggtggtggtcaggctgcggggatggcaccagcccgcggtaggggtcgccgtactgctgcgggtggtggtgatccatctccctctcgccccaactgcgtcggcgggcacggcaacctcggtaggaactggatgtgat

SEQ ID NO: 35345 - DNA, 239 bp, Setaria italica
  Peptide Sequence Number=SeqID_101319
atcaaaacgatcttggtgctaggaatatgcacagacatctgcgtcttagattttgcaagctcagctcttgctgctagaaatattggtcgagtacctccattacaagacgttgtggtttattcagaggggtgtgctacatacaaccttcctgtcgaggttgctatggatgtgaaaggagctgtggcccatccacaggaccttatgcatcatattggactttatatggccaaaggaagggt

SEQ ID NO: 35346 - DNA, 420 bp, Setaria italica
  Peptide Sequence Number=SeqID_101320
catcttgtgcacataaatccgggatcttacttgggtccagcagtcctgcacgagcaggctgccatgagttatcccatgttgctgacctcatgggtgcatcaaaatctgtttctctcgagagagttggtccagacatccgaggaactaaacattctttccaaagggtaggagcaggcgatgtaacatgcatcattgtggactgagatctacccaaataagtaggtgactgaaacatgtcgtttgtggaaacagctcgtgggattcgccgcgccttgttgtacactgtaaatgctatatccttcaaaacagcaagctcattgcttggcttatcaattctcagtacagtttcaatcgtaacaatctgcaatacgagcttaggtatactgaacccagatagcattacaacatttgatgctgatg

SEQ ID NO: 35347 - DNA, 683 bp, Setaria italica
  Peptide Sequence Number=SeqID_101321
ttatttctttgtttttctttctttcgttagttagtagtttggttcctagtactattacgtaggtaactcaattactctacccaaagggtaggagcaggcgatgtaacatgcatcattgtggactgagatctacccaaataagtaggtgactgaaacatgtcgtttgtggaaacagctcgtgggattcgccgcgccttgttgtacactgtaaatgctatatccttcaaaacagcaagctcattgcttggcttatcaattctcagtacagtttcaatcgtaacaatctgcaatacgagcttaggtatactgaacccagatagcattacaacatttgatgctgatgcttcatctgcacaagcactgctgttttgtgctttggcaacctggaaatacagtgatttcctttccctctctggggatgaaataacgtatccaagagaaacagaacattctactagtgtctgtagaattgcaccaggatctggaaacgggcagactacataaattacagtgcaaggtccactactgctctctttttgatttgtagagatgcttgaagtgagctttatatccctaagtatcctcgacacagatgttagaaagcttttcacactccaatgttttgaaaaagcttgaagatagtcagatatcgaactgatgggacttaagtgactgctgccaac

SEQ ID NO: 35348 - DNA, 480 bp, Setaria italica
  misc_feature (441)..(480): n is a, c, g, or t
  Peptide Sequence Number=SeqID_101322
tgggaactctagtgcaacttggtgttcatattttccagcggtaacaaaagtgttacctctcccaaggtttacatctacaagcttcttttgctaatgggcgtttaagtgcaaaatgctgtgacatgcctgtgccattgttttcgcttctgattacttgtcgatcttccggatggcgtggatcctgcaggctttgccaccggtcgtgcttgggggccctgccgtcctctcttgctgaatgtacggttgttttcatgcttcttttcattgttcatggccggtgcttcccaaagtggatgataggtaggcctagtggcgacctggaatatttgacgatcgactgcttgatctgtctgtacagtgtattacattggatcggtgtagttagtatgaaaaaggcaggcaagtgccatttggtcatcatgtgctttttgttgttacctnnnnnnnnnnnnnnnnnnnnnnnnnnnnnnnnnnnnnnnn

SEQ ID NO: 35349 - DNA, 527 bp, Setaria italica
  Peptide Sequence Number=SeqID_101323
ttgttctttgtctaaactattctattaagaaggcagttcactgaagctagagagtattttgtatccaaatatatcgacccgtattgtcatccaaaagatatggtccgtagattgacgtatccttatcttcggagatgtgcattgctttgggagctgctaagatcgtctgccacatcacccttatatgacaattccaatatttgggaaggatcacatctttacctgagcaatagcacacaagatggaagttcttcactggcaatggagctaaacggaataagcgaattggaaagactgttccaggttcagtcactggacctgattctccgagatgaatctgtacatgtgctggccttaaaatggtctcaacatttctgtgaagattacagttctcgcaaatatagaggctctctcttttctacccctgcagttccatttaggctgatgcaactaccacctgtctaccaagttctccttgaaagattattattctaagtattgtctaattgtccccgtatttgttagta

SEQ ID NO: 35350 - DNA, 842 bp, Setaria italica
  Peptide Sequence Number=SeqID_101324
tggaattgatttataagttagctattggagatgccactcatagccagattgtgaagtctcttcctcgcgatctttcatcaagtgaccaacttcaaaatgttctggattcactggcagtttattctaatccatgtggcatgaagcagggtaagtatgtacttcgcaaatcgtgctggaacgaattggacctgtatcacccccgctggaattctagggaattgcaaattgcggaggagagatattaccgtttctgcaaaacttctgctcttaatgctcagctacctcggtggactcacgtttttagcccactgagaagtatttctaacgttgcaacctcaaaggctgtccttcagattgttcgtgctgttctcttttatgctgtttacagtgaagcatcatcagcatcacgcgcccctgataatgttctcgtgacgggtttacatctgctttggttggcacttgatatttgtgaatcagaaagacaagtacatgccgaccagtatggcatggatgtggtgcagcatgatgatgaatcatgggttgttctgtcatcgtacacagaagaggcttttcccatattgacttactctactgaagtagtttccccggagtctgacaatgtaaagaaagaaagcatgttaaccctacttgtgttgctaatgcacaaatacaaagaagagaatgatgccaccttttctggatccaagtactgtaatattccatccctaattgagagcttattgaagaaatttgccaagttaagtaagaagtgcatgtttacattaagacaaatggcgccacatgtagtcccatctacaccagacagttccagtaccaaagaa

SEQ ID NO: 35351 - DNA, 751 bp, Setaria italica
  Peptide Sequence Number=SeqID_101325
atttcttttagtgaggaaatatgccaacaccggcaccacattgtgatgcatgattcaggcatttaccagtcctgaatcatgcatcacaatgtggtgccggtgttggcatattcttttagtgaggaaacaacgatcctgttgcagcgatctgctcgtcttgccttttggccatctccttaccttgacacgtttggggaggaggatcatgaaatgcagagaggaaagcctttgtatctaagtcaagaaagatacacagccttgacctatctggtggcatctcatagccttgatcgaacttctgaagtccttcggcaaacgactatcagcttttatggatctggatctgattaaatgcaatttccatggaacaatgttgaaagggtcttgtggatgtgcatatttttgggaactctagtgcaacttggtgttcatattttccagcggtaacaaaagtgttacctctcccaaggctttgccaccggtcgtgcttgggggccctgccgtcctctcttgctgaatgtacggttgttttcatgcttcttttcattgttcatggccggtgcttcccaaagtggatgataggtaggcctagtggcgacctggaatatttgacgatcgactgcttgatctgtctgtacagtgtattacattggatcggtgtagttagtatgaaaaaggcaggcaagtgccatttggtcatcatgtgacttttgtgtaccatgttgctttgtcatttgtctgctgaatcttt

SEQ ID NO: 35352 - DNA, 1221 bp, Setaria italica
  Peptide Sequence Number=SeqID_101326
gggacttggttaaaggcttctttcttggcttgtggaatttcttatggcaacgactctggatacaggtcagtctttccttttggacatctccttaccttgacacgtttggggaggaggatcatgaaatgcagagaggaaagcctttgtatctaagtcaagaaagatacacagccttgacctatctggtggcatctcatagccttgatcgaacttctgaagtccttcggcaaacgactatcagcttttatggatctggatctgattaaatgcaatttccatggaacaatgttgaaagggtcttgtggatgtgcatatttttgggaactctagtgcaacttggtgttcatattttccagcggtaacaaaagtgttacctctcccaaggctttgccaccggtcgtgcttgggggccctgccgtcctctcttgctgaatcactaacactcagcttgggagcgtcccttgttgcaatctacgtacggtgtgctttgcttcgatggttgggtagaaaagcaatgagaagtcgcatgaaagaatgagtattcaagtccgcatatcgcataaaaaggtgtaacggtaattaaaaaaaactcgacgagtccaaggcttcaagccttggaaacacagtggctgtaccaggtgtatacaaaagtcatctgcgggagtactcatcaaccaacttcgttcagcttgaagatagaggctgaacatccggcgatggaccatgttgcttggttcttcttcgaggaggcacctcctgaattgctctgctttggcgcagccaaccatctccagacgtttcagcttgcctagattctctgcctggtccagggctggacagtcctgcacgaacaaatcctcaagcttggaaagattggcgatcctcgtaaggcttcggttgtgcttcaccttgagccacacaacagcgggaaggtccacaatctcatgtaggctatgtgcagatcttgagggagtgccctcagttttggacaatgcagtagcgacagacgcttgaggagaggcatcagtatcacctggtggggggagtctccgattgtgttctgattgcacatgcccactgtgctcagtgaccaggcctccacaattttatgaacattacattcagctcaaattcctcaaacaagacattgaaaagcggggcaggagattcagcacgctcaaacaatacaaaaacgccttaagcgatcatataagcacactg

SEQ ID NO: 35353 - DNA, 606 bp, Setaria italica
  Peptide Sequence Number=SeqID_101327
caacaaatttcagtagtcaatttctcgataacttgcagatcaggttacagatcgacctttttcagcatccacattgataattgtagaatgatttacaactcagcataatttatttcatatgaatttgaacttaactgaacttaacatcagggaaccaatgccttgctttgtgctgctcatctcctatgcacatctcagaagatgatcatcactgccttgaggaggcttgaaggtgtctccccatcttagcagcaagggtagacggcgatgcagcgcctgcgccggggaggtgtgcacatcatcagcagcagcaaggcaaggacgatggtgacgagcagccccagcaggttgaacgctggctcatcatcttcctggctgcaacacagcttgcccatgttaactgttagagggggaggaggagatgagttcttggtaggatgatgatgaaggagaggagggacttggttaaaggcttctttcttggcttgtggaatttcttatggcaacgactctggatacaggtcagtctttctagtcggtgtagcaattatatgtggaccgtcaacatcaacttgaattctggtatgtacatcatttgtactttaa

SEQ ID NO: 35354 - DNA, 3451 bp, Setaria italica
  misc_feature (1)..(1): n is a, c, g, or t
  Peptide Sequence Number=SeqID_101328
ngttgcagcgatctgctctgttgttacgatgacagaacaacccatgattcatcatcatgctgcaccagtcatcgtacacagatcccatattgacttactctactgaagtagtttccccggagtctgacaatgtaaagaaagaaagcatgttaaccctacttgtgttgctaatgcacaaatacaaagaagagaatgatgccaccttttctggatccaagtactgtaatattccatccctaattgagagcttattgaagaaatttgccaagttaagtaagaagtgcatgtttacattaagacaaatggcgccacatgtagtcccatctacaccagacagttccagtatcaaagaaagcctaggaacttcatcagatcccatggaaaagaaagcaaaagcacgtcaacaccaagctgcaattatggcgaagatgagggcagagcagtccaaatttgctgcaagtatgaagtcatcagaaaacgaggggcatgatgttccaatgttagagacagatgtgtccagttcaactggtgcggtctctgaggagtcactaccagtttgctccttgtgccgggactcggactccaaaagccctctatgctatttgattcttcttcagaaatctcggcttgcaacttttgttgagatgggtcatccatcctgggataatccaactcaagcaaacaagacgtctggatcagtcaagaaggaagattcaactgattccttggtctctggttcttcaacttccgaggaacttgtcgatgacacgacagtagagccatcttttgatttagacagcatggaagttgatgcctttcttgatttttcaaatgagcagcatccactaattcgatatatatcgtctttcccaagtggacattgcaatggcaatgcagatgacactgtctcgcttgaggcaattgaggctgatatttacaactctattttaaatgatgtatttggatccagtaatgcacacattcagaatgctgagcaaacgtcgccatcatctgcttcaagtatcacagttgattccaagaaaaccagaagccccaagcgttctgtgctgggaacatatgttagttgtctatcagcaaaacaccgccattcttcactctatgatgtagcttccaaatcttctgcctctgttagtacaagaaacaagtttggtccgcttcattgtgatggcatccacatttcttcttgtggacatgctgtacatcaggaatgccatgatcggtatttgttctccttgaaacaaagatatgtccggagacttggttttgaaggtggtcatattgtcgatcctgatctgggagagttgctttgtccagtatgtcgcagatttgcgaattccattcttccagcatcaactgatttctctagtaaaacattgaaggggaaaccatttgttgaaaccttgacccgtgaagttgttattacaactacgtcacatctaaatacaagtcacttacagtttcctcgagcactatcacttcttgaaagtgctggaaaaactgttggacaaagcaagtttctaaaagctttatcagggaagcttaatgatactacagagtcagccctagaaccttctcttcgaagattagccatgctttactatcatcgtggtcccagcggtttttcagcatctgaaaggaaaaggctcaatccatccttgtttctctgggatacactaaggtactcagtggtatctacagaaattgcttctcgtggtaggatgttaaaccagtctgctgagtcaaagtcctgcttggaatctttgcgtggtgaactgaattcatcaagtggattcatattgtccctattattccgtgttgctcactctgcacgaaatttgaatcgtcttgaggttcttttaaggtttgaaggtatccaactattagcggggtctatttgctcttgcatttctggttataaagacgttcttaatgctactaagcgaaaaggctctttgccacctatggttgatccaggtgaggagggtcccctcttccctgacgtccaattttggaaacagtgtgctgatccagtccttgctcaagatccattttcttctttgatgtcaacacttttctgtctacctgttcagtttgtatcatctgctgaattcttcatcccttttgtccatctgttttatgttgtttgtgccattcaggccctgataacatgctacggatcggaaacttttgaccgatctagcttcagtgactgccttcttaatgatgtttgcaagacaatgtcaggatatgatattgccagagagtattttgtatccaaatatatcgacccgtattgtcatccaaaagatatggtccgtagattgacgtatccttatcttcggagatgtgcattgctttgggagctgctaagatcgtctgccacatcacccttatatgacaattccaatatttgggaaggatcacatctttacctgagcaatagcacacaagatggaagttcttcactggcaatggagctaaacggaataagcgaattggaaaagctgttccagattcagtcactggacctgattctccgagatgaatctgtacatgtgctggccttaaaatggtctcaacatttctgtgaagattacagttctcgcaaatatagaggctctctcttttctacccctgcagttccatttaggctgatgcaactaccacctgtctaccaagttctccttgaaagatatatcaagatgcaatgccccgattgtggctcagtgcctgatgaaccggcattgtgtttgctttgtggcaaactatgttcacctagctggaaaccatgctgcaggactggtaaatgcctgaatcatgcatcacaatgtggtgccggtgttggcatatttcttttagtgaggaaaacaacgatcctgttgcagcgatctgctcgtcttgccttttggccatctccttaccttgacacgtttggggaggaggatcatgaaatgcagagaggaaagcctttgtatctaagtcaagaaagatacacagccttgacctatctggtggcatctcatagccttgatcgaacttctgaagtccttcggcaaacgactatcagcttttatggatctggatctgattaaatgcaatttccatggaacaatgttgaaagggtcttgtggatgtgcatatttttgggaactctagtgcaacttggtgttcatattttccagcggtaacaaaagtgttacctctcccaaggtttacatctacaagcttcttttgctaatgggcgtttaagtgcaaaatgctgtgacatgcctgtgccattgttttcgcttctgattacttgtcgatcttccggatggcgtggatcctgcaggctttgccaccggtcgtgcttgggggccctgccgtcctctcttgctgaatgtacaattttttagggtaaacttacttaagttagtaactaaaactttaa

SEQ ID NO: 35355 - DNA, 1100 bp, Setaria italica
  Peptide Sequence Number=SeqID_101329
tctttaaagccagagacatgaaggatttattcacactacaagacgatgaagggaatggttcaactgaaacatcaaatattttcagtcagttgtctgaagatgtgaatattggggttccaagtgaaggtcaacaagatcaggtacatattgcttcgacaatgccaagcaccagtgaggcagaaccacctagtggagtgaaagggaaggtggacgagaactctgaccaagcagatgaagaatcaaacattttgaagtgtctctttgatgcccagggcattcatagcgcaatcaatcatgatgccataatgaatgctaatgatgaccagaaggtgcgcctagaagcagaggcctcacaggtggcacaaagggcagctgaagctttacgtcaatctcggatgctcagaagccgtgacagctttgctgttcccacatggactggaagatctggtgctgctggggcaccctcctctgttcgcaggaagtttgggtccacagtcaacagccagttgatcagttcgtcacagccaccagaaacttcaagcagcaggagccaaagtcttccggtgggtgctctaaatggcaaggcgatgtcatctgcggaacttttggccaagattcgtggaacccgagagggggctgcttcagatgcattggagcatcaactcaatggaggatcaggttcgaatcacgtattgggtccatctgggaacagcggccgctcatctaactcttctaacccaagcatgatcgtgcaacctgaagtcctgatccgtcagttgtgcacattcatacagcagaacggtgggtctgccagctccacgagcataacggaacacttcaagagccgcatacagtcaaaggatatgcttctcttcaagaacctgctgaaagagatagcgactttgcaaagaggcgcgaacggtgccatgtgggtgctgaaacctgattacgagtgatggtagacgtagttcacaggagcaaaattttggcctaggagtcattttcgattgaggattcttttttttcaatcgttattggtggctgacggtatttatttttgtaaggaatatcttaacaggaagaaatattaggagatgaaa

SEQ ID NO: 35356 - DNA, 635 bp, Setaria italica
  Peptide Sequence Number=SeqID_101330
caaatttgttgcggcgggagagaggctcgagagagacacagcgcgtagaaaccggcggcggcgggcggtagcggcgatgaggatcgaggaggtgcagtcgacgtcgaagaagcagcgcatcgccatccacacccacatcaagggcctcggcctcgacgccaatggagcggcgcttccgttggggagtggattcgtggggcaggcgggggcgcgggaggggtccgggctgatagtcgacatgattcgccagaagaggatggccggccgcgcggttctctttgcgggtcctcccgccacgggaaagacggcgctcgcgctcggcatctcccaggagctcggaagcaaggtccctttctgtcctatggtgggatcggaagtgtactcttcagaggtcaagaaaactgaggtgctgatggaacattttcgtagagctataggcttgcgtataaaggaaaacaaagaggtttatgaaggagaggttactgaactttccccggaagagtccgagagtacaacaggtggatatgcgatcgtcattagccatgtaatcataggtctaaagactgttaaggggactaagcaactgaagttagatccttcaatttatgacgctttaatcaaggaaaaggtggcag

SEQ ID NO: 35357 - DNA, 509 bp, Setaria italica
  Peptide Sequence Number=SeqID_101331
cactgctatctcgatggcaggttgaagacaggagggcaagaacaatgcacccaaaatgttatagcttcatgttatctctgctcctaggattgcgtggcgttgatcccagacggcggcatcgcggccgcggagcgaggcgggcactcggggcagctcccgaggacgaaggcatggtggtcgaggggcacgacgagggtgcggcggccactgcggagctctgaagctccctcacggcccacctggtaaccccacggcaccgcgtcgccccgccgctaaagaaggcgagggaaaggggatgagggcgcggagtcccgtagacaccatttgttgcgatatcagcgatgtaggttttgatcacgttggccaccgctgctgcaccgcctctttcgagatctccccggcgtcgcgcgagcagattattggcggtttcgtcgatcagctctgccgccggcggcggcgcccgaatcgtcgcgcacggacgggttcgttagttggtccggtagtttcgt

SEQ ID NO: 35358 - DNA, 1373 bp, Setaria italica
  Peptide Sequence Number=SeqID_101332
tcgtcgtcgttctaactattccttcgctcggtggcctcatgggcgcctaccgcgtggtcagccctggcgaggaggccccgctgaacctgccgtccggggaggcgttcgaccggaacctcgttttgttcgaccgcgacttccgcgccgacggggcgctcttcatgaaccgcacgggcaacaaccccgacgtgcacccgcagtggcagccggagtacttcggctccgtcgtcgtcgtcaacggcaaggcgtggccgtacctccgcgtgcgccggcggcgctaccgcttccgcatcctcaacgccagcaacgcgcgcttcttccgcctcagcctgtccggcggcctccggttcgtgcacgtcgggtccgattcggtgtacctcgccaggccggttgcgacggagaagttcctcgtcgcgccgtccgagatcgccgacgtcgtggtcgacttcgcggagtcgagcgccggcgcggcggtcctgagcaacgacgctccagccccgtaccccggcgacccgggcgacaaggcggagcccgtggcggtaatgaagttcctgatcgaggacgccgccacggagccggacacctcggccgtgccggcgtcgctgatgccgcactacccgaggccggacgcgcgggaggcggcggcgacgcggcgcatcaccatgtacgagtacaccaagaacggcacggacgagccgacgcacctgtacctgaacgcgcggtcgtacatggaaccggtgacggagacgccgagggagggcacgtcggaggtatgggaggtgatcaacctcaccgacgacaaccacccgctgcacgtgcacctggcgctcttcgccgtgctggagcagcggtcgctccgccgcgtcgacgagttcagggactgcatggtgcgccggaacgacgccggcgcgtgcgggatgggccgccacctcgccggcggccggaggcacgtcgtgccgccgcaggaacgcgggtggaagaacgtcttcaaggtgcggcccagcgcggtgaccaggatcctcgtgcggttcaagccgctggcgtccgacgacgcgtcgccggaggaggacagccgcttccccttcgacgtcacgacgggtcctggctacgtgtaccattgccatattttggaccatgaggacaacgagatgatgagaccgatgaagattgtgcgttgaacgactcccagcaaaattttattgaggattcgtttcgcaaaaagaaataaaaagggtctgtgtacaagacacaggaatttagcaagaacaactgtcagatgactgaacctccgagacaccgagtggaggataagacgataccgcgataagatgcccttcaagctttgacagagagttgattgagatgaactgatt

SEQ ID NO: 35359 - DNA, 262 bp, Setaria italica
  Peptide Sequence Number=SeqID_101333
ccagcttctcccggagcgccagcagcagcgcgcgctccgccgccaggctcttcgccgggtacggctcgcccgacgacgtggacctgcagcgggacgaggccagggcccgctcgccctcggtcgacgtcatccggcggtacctcagcaagatctcgagccggctgcggcgcgtggcgtcgaccaccgccgccgcggacctccggctccagaagagccgctcggcgtccgcggcgcaggtgtcggccgccgcccagtcgccggc

SEQ ID NO: 35360 - DNA, 402 bp, Setaria italica
  Peptide Sequence Number=SeqID_101334
aactgattgtgcatcaaaggggacaaaatcttcagcaagcattgcagagatatctcccttcatcactttcaggtgtttgaaacccttatttctttcaaaaactgcattttttgcagaatagtagcgacccccagctcttactttgttatccagtccatccaagtctgaatctaaatcaatatgtgatgaaccaaacctccggttaaaaaacatagatcgattcaaaccacgtgcctccagcatgctctgagatctgtagcgggcaacatccattctgtatagggatccaaacgccaggttatcatggtcgccctttgcgtcgacgtagtaatccttggccggcttcatctctgaccctgcccaagcacggaccccagccttccgcgacgccgctgccccatc

SEQ ID NO: 35361 - DNA, 433 bp, Setaria italica
  Peptide Sequence Number=SeqID_101335
gcggcgggatgagcggcgacaacaagccgcaggcgtggcgccggggacgacaaggcgggaggccaaggcgggcgagcgggaggacggcggtgacggccgagtactggcaacggcacgtcacaccgtcaggcaggggcgaaggcgtcctcaacggcgaagagaacagagccgatctcgacaagaggatcgacgaggaaatagcacgcaagtgcaacgtgagaaggggaaaagaaggaaccctagggcagattgagaagaaacctaaccctagtttggctctgtaccatgttagaaatagcacttatattcataataggagcactaggcccaaatatatataggtacagaaaggggtaaatataaacaaaaccccctaatacaaaagagaaataccaacagtacatatacatctaacaaatagacactacaaaga

SEQ ID NO: 35362 - DNA, 410 bp, Setaria italica
  Peptide Sequence Number=SeqID_101336
tatgtgccttgtccccccaaaactctgccagttgttattcttgtgaattttcatgcactgatgcttctcattgtaggatttgatgaggacgaacaacataaatgctactgtgaataatcttttgctgatgcaatagtaggggcatcggcaatacaacatataagtatgatgtttactggctaataaaagcttatatgaaaagtctgtatagttaaaggtgagcctgggtgtaaaagcactttggttctgtaataaagacttttttcttttgtttttgttcccaatggtttgtatagcaaccatagttgtacaatataatgcctcgataatagactagtaaggttaagtagtaatagtaagaaaagaataagtaaccaatacaagaaataaaattatttaggaataaaaaa

SEQ ID NO: 35363 - DNA, 563 bp, Setaria italica
  Peptide Sequence Number=SeqID_101337
tggccagagaacgccttgagcagctcaatgcttctccatcagctactccatcaaaatattttcgtgtgtactctgcgttgcttctggttttatcagctgatctactatggtaatatttcttgtttagtttgtattcatccatttatttataacctgcatatagtatgatgggtacattttgatatgcacaaggtaatccttgagtactggatttcctcaagcatacgggttcataatgacttagattctcatgacattttaactatttgcacaccctttcatagtttgtaaccagcagtatcatgtattaatggagaattcttttatattactgcctatggacaatttaccatgtcaaactgtcgttgctgtctctatgcattgtaatatttagtattttacaagctttatgtttgagtatgttctctctgttcgatggactggccagtgctttatttatctatcttatccaggatgaagttctgtgttgggtttacaggagctgcagaacccaacttattttggctcctgttctttagagccacttagctattgcctttgat

SEQ ID NO: 35364 - DNA, 494 bp, Setaria italica
  Peptide Sequence Number=SeqID_101338
cttaaactacgaccaaatgctgggtggttctccaacacctggataaaataatcctctttgggtctccatccattggcaatgggatgagctacagcaattatcacttttggaagtccgccgcacttgctaaggacagattttgcgctctcaatatccgcggggctcgggtcagcgggccaaaaacgactatcaagcccctttatcgttcttttgaagagctcaagtgcatcatcaatttctaggccttcaacgctccaccaattttctgaacagtatgtggcaacactttcctcgtttgcaatcacgatgataaggcttcgagtttggtcaggttcaaagcccaaggcagcttttatcgaatcccactcttctgtggactgcagaccgtcaataacaatgagacaagcatgctttttagaagctgacggcacacttgaattgggtctctgattctcaacatgccagcatgttggagagatcccgagtgcaaatcc

SEQ ID NO: 35365 - DNA, 371 bp, Setaria italica
  Peptide Sequence Number=SeqID_101339
cgcttgctccgagcctagctgtccgtccatccgtgtctgtctagctacccgtcgagctcactccctcggggaccccggacgcgaagaggaggaggagcagaggacagacgcaatgccgtcgtcggggatcaccgcggtggacgcggcggccaaggggatgaagctggagcgctacgcgagcggcggcgcgctgatgcttcggcgggccaccagcgccaagatcgtgtcggcgtcctcgcacctgctcttccgcgccaccgtgctcgctacgctcgcgctcgtcttcctcttcacgctgcactacccgtccctcctcttccgctccttccacctctccgccggcggcggcggcccaggtggcgcccactctg

SEQ ID NO: 35366 - DNA, 370 bp, Setaria italica
  Peptide Sequence Number=SeqID_101340
ccccttcccactcaacgcgattcggtatcgctgcggcggtgtcgaacgtcgagctcgctcgccaccggcggttgaggcggggggacggcaccgctcaaagcttacttggttgcgaaacttggcagtatagtttcctagacgcgttgcatggcgtatcgtcgttggaatggacgctgggtggtgaggccgtcagcaggtacagagacctgggccaatctgctaggtgtcgtgctatttgagcacgcatagttagaacatcgaagtgaactatgctgtgtgtgtggcttctcgatgctttggttcgttggatcagattggctcttggtatgatactatgattgccgtgagttcagttacttattactaaaag

SEQ ID NO: 35367 - DNA, 343 bp, Setaria italica
  Peptide Sequence Number=SeqID_101341
gcaaaggaagtgttcctttgcttcgtggctaagagatctctcgatctttggattggagaacaaggggaaatcttcttccagtgatatcgtatgtatcttttgacttctgcagtaatcaagtatcagatctttccataactgtacttgcttttcccgcgtttcgcttcagcaagtgtacattccgaggcagtggaaaggctgcagagatgaagcgtgatgcgacaaggggtgccatgagagccgcattttaagtgtggcatggtacatttcagatggcgagtcacaccacgataacctactgatagttttggcatcatagtcaaggaggaaacatatactttca

SEQ ID NO: 35368 - DNA, 170 bp, Setaria italica
  Peptide Sequence Number=SeqID_101342
cactacgatcgattccctcaagttcagttccacgagtatcggttccagagcgtattgttctcatgcgggctctgcgggctctgttccaactgccgcagagcccgcatgagaacactacgatcgattccctcaagtgcctttgaagatagctgctttgcctttctgttcct

SEQ ID NO: 35369 - DNA, 1276 bp, Setaria italica
  Peptide Sequence Number=SeqID_101343
gtcggcgtgggggtgtcgttcttgtcgtccgctccctctaccgttcgacaggactcctcgtcgccgcctcactactccaatctccatctcgccattgccggcgcaagcaaaggagcggagcgtgatggcggggcgctacgacagcaaccccttcgaggaggaggacgtgaaccctttctcggaacaagcgcgcggcaaggctggcgggcagtccaacttcggcggcggcgcgttctacatgccgaaccccagaaacgtgcctcccgcgtccaattcacgcctttcaccgcttcctcctgaaccggcagacttcagtgccacagtggatataccacttgactcatcgaaggaccttaagagaagggagaaggagctgcaagcaagggaagcggaattgaacaagagggagaaggaactaaagaggagagaggaggctgcagcacgagctggcattgtcattgaagagaaaaactggcctccttttctgccactcatccatcatgatatcaccaatgagataccgagtcaccttcaaagaatgcaatatgttgcctttgcatcttttcttgggttggtttgctgcctcttctggaatgtcatagcagttactacagcttggatcaagggggaaggtgttaagatctggttgttggcagtgatctacttcatatctggtgttcctggtgcatatgttttatggtatcgccctctgtataatgccatgaggactgatagcgcattgaagtttgggttgttcttcttgctttacttgttccacattcttttctgcgtgttctctgctgtggctcctcctgttgtatttgagggaaaatcattggcagggattttgccagcaattgatcttatcagcgtgaatgctttggttgggatcttctactttgttggatttggattgttctgtctcgagtcattgctcagcatctgggtcattcagcaagtgtacatgtacttccgaggcagtggaaaggctgcagagatgaagcgtgatgcgacaaggggtgccatgagagccgcattttaagtgtggcatggtacatttcagatgatagtcccaagcgtatacttacccgtggataggttgtgctacaaatgaaagtatatgtttcctccttgactatgatgccaaaactatcagtaggttatcgtggtgtgactcgccatctacttttttgacctatatagagaatgtgcagcttttatagcgttacttcatccatttccttttgtcctaatcgcaatgtgggagtgcagcatt

SEQ ID NO: 35370 - DNA, 867 bp, Setaria italica
  misc_feature (1)..(60): n is a, c, g, or t
  Peptide Sequence Number=SeqID_101344
nnnnnnnnnnnnnnnnnnnnnnnnnnnnnnnnnnnnnnnnnnnnnnnnnnnnnnnnnnnncttgtcaaattcaccacagcaaaccaggaaacgatgaactaggggagtttagcaaccgcagcactcaatactaacatgcaaaaatactgctgctcgggaaggatgtgatgtttcacgtcatgttcaaagacactgactgatcagttaattggtctgccagttttgaggatttgcaaagaaatttacacagaaaatttgacgccttcatcatcggccgaagtgcctttgaagatggctgctttgcctttctgttccaactgccgcagagcccgcatgagaacaccacgatcgattccctcaagttcagttccacgagtatcggttccagagcgtatctcttcgatggtcattacttccaatccattatcctttacaaagtttattaggaaattggcccaatcttgtatccttaaccaaagaacgaggcacttcttgtgacctttatccatccactctgcacgaccttcactgacaagagctgcaaggaacacttcctttgcttcgtggctaagagatctctcgatctttggattggagaacaaggggaaatcttcttccagtgatatcgtatgtatcttttgacttctgcagtaatcaagtatcagatctttccataactgtacttgcttttcccgcgtttcgcgcacaggctgcaaagtgaagtaaggtgggtagttgaagaagggcggcagcctgaaatcccccagcctctgcatctccactcctgtgcttgctcaaaaaccaggtgcagagatgcaggcttgcacagcagtcagcagagaggctgtgagggactcagcgcggccg

SEQ ID NO: 35371 - DNA, 778 bp, Setaria italica
  Peptide Sequence Number=SeqID_101345
tgatgctttgacttggccacttggggccaacatcaaacatgcccttgattttcagtatcgctgttagtaattatgctcgtgtcagttttagtagcttttatgttataatcttaatatgtcagacttcatcctatggatgagtaccctattcataggatgttagtattactgcaagcaaaagttattttaggtatctgacttccatttagaaatagtgaatcatccctgttttggtcaggagcagaattcctggtgctttagcattttacaataagcagctctgtgaggggataagtttactcaatagtaatcctcaaggttcctactatggctgcgtccacaccaacaaaatcatggacgcttgtgaggtagaggatcagattaccattaagttcagttatgatgatgcaatatcttgacaagttttgttggtcttgacatcctgccttcaagattttctatcctcaggtttcttccatgatgcacacacaattcgactagactgcaagagcatgtttgtcaataagcattacgaagagaaacctgtagttgcaggtgcaccctgatggagaaagataccattagcttcaggtatatttcaattatatgatgcttctcacatgatattctgttttctggacctttatttaggtaactaaaaatatgacggtgtgacttcggaaaagtctaatgagacactactgcggtccacaactatggaatgctcattatgatcgtagcgatatgatgaactaggatacaagaactgacctctggc

SEQ ID NO: 35372 - DNA, 384 bp, Setaria italica
  Peptide Sequence Number=SeqID_101346
cgactggtttgacaagtgatcattcatctcctgtacagtctcaattactctatcaatgttatcaatgcggcgctgtatggacttcagtagcatgttcagtgctgcattgataacattgatagagtaatttcgactggtttgacaagtgatcattcatctcctgtacagtctcaaagcctgaagcccaagtaaagttgaatttaaggttctagaagaggagttccagtggcgtccatcaattgtccaccatatctgtgcggtagagtcatcattcggtgcagtctgcagatcaaagtgaaattatacggggttgtgcatagaaatgaaacctcataatttattttttctacgagaggtgtatcattgaaacactccgtttctttt

SEQ ID NO: 35373 - DNA, 298 bp, Setaria italica
  Peptide Sequence Number=SeqID_101347
gtctccttgtagtttagtactagcaagctagtatcacagagctttcagtctggggagttgtctgtatgcgttccatgccctattgtgatatggaatcattttccagctaccaaactctggctacatagacaggacaaaaccatcatttagatgttaactaccatactgcgtctcttcccaaggactaagtgcagatgtgctatacacggcactgatccgaagactggggatgaacagactggtagttgtccaaatttaaaagcctcctttgttgttggctagattcattctagaatga

SEQ ID NO: 35374 - DNA, 608 bp, Setaria italica
  Peptide Sequence Number=SeqID_101348
tttaagttacctttattgttccctaactttaataaaaaaatgaaaggtcaatattactaatgaagcatcctgttccattatacgcattgcgagtccagtagatgaagagtctaggattgttatccccatagaaatcttggtaaacctgccatcctgcttcaatggtattgagatccatgttggcataggaccctgcaacggtccagagttgggtcaagctgaagtcttgggccgtctcggtcattggtttccacagatttatattgatttgagttccatagtattggccatctgctgaagatactacagcatactcgtggccactcgtcacactagcttcagggtggatatttggtatgctgtcgggcctcttctttccatacaaattgaccgagctagccctcaggacatcctcctcctttgtccttcggattggtacggtgttctcggggcacttgccattctggtgccatgtttgtgtgattggacgaggtgcaatgttggagtcaccatgctgacctctaggatggtaagaaggttgcatctgtatggtatggttcttcaggagaggatgatcgaatgcaggctgtttggagatgggcacacag

SEQ ID NO: 35375 - DNA, 961 bp, Setaria italica
  Peptide Sequence Number=SeqID_101349
aacatacaagtcaactgttcaaggtgcaaggtcacgttctaaaagctcaccactcgccaggtccaggtttccattgccaggtagcagttgagcgcctggatacgcgcttaccagatctcaggtagtgaaaacgtcttatgtacatgcaaagctaaccctttgttacggagataacactgacttaacataccaccaccatcctgaagggtgcaactactaaggcaatcattttcgcgtcatcgactaaatactatataccgtcttaggttagaggtggagagcttggatcgatcgagcagttccacatttatgggatggtattgcggcaacaaactatgaacgatgaatgcagtgccatgctcaccttcttccatagccacggtagaacccaccagcaacccagtagtgccgccgaacgcctccaactctgtttggaccaacccagctaacacgcccggccatccagcaagaggcatgttgccgcttcctccttggtcccagtccccgccttgcagcgaccctgcgtccagctcttcctcctttcgttgtactcaagaattttccgcttgatgttctgcatctcctcgagctcagcagcactctgctgcttcgtgctctgcacgagtgggcagtccccggggatgagcatttgcttcgtctgctgcttatgccctctcttcacaagcaccttgacgcgcacgtcgccgagatcaccaggtttgccaatctcaccgtcaccacacacattttctttgtccgctgcttcaatggccatcaagtcctttgacccctcaaaggcattcattggtatcgtcatgttcacagtgggcctagccagctccaacttacgtgactccaagctttcctgaagaatggctttcagttctctgtcaaagtcttcttgttccttagcatcaacttgcaccaccttccgtcgaacctcaacagttccttcttcatc

SEQ ID NO: 35376 - DNA, 550 bp, Setaria italica
  Peptide Sequence Number=SeqID_101350
agaaatctatcgttcactgtcttcaagtgtcattgtgcacttcagcttggagaagccaagagttttctcagtgtaacagaagttcttctatgctgctcaagttccctgccatcccacagctgcgcacctggtttgcggttgatctcatgcttccagaggtatcttgcatctcctgacatcacaacaagggagcctgggttcaggtaaacggggaactttctaggctcaccatccccttgcctcagggtgtccaaggctgtgcctgttggttctgcttggctgaagtgcatgacgcaagctgattcgagggagactattgcgattccatcatcaaagcgcatcagatcaacatgggcgcagataccctcacctgggttgtatctgtttccaatcatttgatcaaaaaacggttccctccacaacaaatctgatggcagaggacatgcatcttcatcctcatttgccatctctgcgctaacaccaacattgacatcgccaacacaaatagcttcacgaatgagggtggaaagttcgacagcccatgaaggga

SEQ ID NO: 35377 - DNA, 706 bp, Setaria italica
  Peptide Sequence Number=SeqID_101351
aaccctggtcggtgggcacgaccacaaccagccacaccactgagctatcgctcagataattacatctatctttgaaaatgttgtaacctttttatttcttctcatataatggcaagaaatgttaaatctcaatcaaatgaggccaggaaaagcatctcagactgcttggtgcaaatgagaggtcctcagcaagcattacctcaaggatggcatggaattcttcctttgctgttacgtacatatctgtttcgctttactcaacaacatatatgattgcctgggtgtttggaaagtagcaccgccagtatggcctgaaaatgcacacatatcaaagatattgatggaaaatgaaatatgttagttgatggagaaattttaaatgcatcatgccaagtaatggttctagttctgatatttgaatgacatagtatcagcaatgaaaatccaaactggttgacatgtcattcttctgtacgaaacccatgaagagtatcaagcttcaagaaaattcatgccacgccataaatgattgttccaatacttaatgtaaaagggaaaatggactattgcagtacttacacaactactgcaatatttatacggccataatttattttctctaaaaaaactcacatatggaaacaagtacaaaagtcaaaaacagattatcagcaactaatgttacaaaagcatcaagacttgcatt

SEQ ID NO: 35378 - DNA, 738 bp, Setaria italica
  Peptide Sequence Number=SeqID_101352
tgttgttgtagttagttattactaaggtactaactagtctacctttttagtcttctattccttccttgtcctaaaataccatccagcaatggttcatgaggaagaaggctactacattagctgcttccggatttgagtgtgttactgagccagtccaaaccttcaaaaagcccctccccttttatggcagatgttttgaaaatcgcccattggcggctcttgatcttgtggagttctaatgactccgttatggcagcatcatcgagcgcacctggaagatcctgcttatttgcatatacaaggacaacagcaccttttagctcatcctcctgccaaataaaggcatttatcgaatcagtaagtgtaacaaattgcagggcaaattgtgcatactaacctttcttattcgagaaaaaaactagcctttctgtaagaaacaattaagatcggaattctgcaataggaataaggacatatgaatactggctattatttcaagttctgaatgccatatgggttttagaatgaacaatcaaagttgttgaatattctacaaatgaaatgggtattaatgtgatacaatgacaagcagcacagcacttgttaccccatgctcctgctcagataccagtagcagtattcactatatcagacatgtattcaatacatcgatacttctgacatgacagtactaagcttagcccaattccaactactccatccaaattgtacccaccc

SEQ ID NO: 35379 - DNA, 1632 bp, Setaria italica
  Peptide Sequence Number=SeqID_101353
aaaatcgcccattggcggctcttgatcttgtggagttctaatgactccgttatggcagcatcatcgagcgcacctggaagatcctgcatgaaaacaattgacatgtcagacaacatgcaaaaacaccacatgagatacagtaaactatagctacaggctacaagtaacataaggcacacaacccaaagcaaatgtcttctagagatatgaaaacacatcatgttcaacagtgaacatactagctacatagtaaatccgctttaagcaatttgataagagtgtgcaagctacatggatcggtcaatggatccaacgaaaaattatgaagttaatgataaagcagggcatttgtatagtagaaaaagacaattatattacaaaaggtacactttatactgaaagcactacagcctaagtcaaaagatagcatttccatgtgttttaagtgctgaggagtgcgtcaacattcacgataatgtgcatagaaatacatacatccaatttaattctgataatcatgaaaagtaacaaatcaaaacccatatgagaaatgtaaatgcttctttttattttttttttttgttcgtctgatccttgactctcattattgacaagacaaggtagaaatgtggcccgttttaatcattgaagaaaaaatgtcacaatccatgggatttacgggcaaagacacggccacagtttgctcatcattttctacagacctattcttgatctcaatatgagggtacatctaatgtactagtatctgaaactttagcaagcactttacagacaattgactggtggtgtaaaacttctggagttaaaacaaagagaatggggattgtcacgctgacttgcaaggaagagtgtagcaccggctctattgtttaccatccagcaatggttcatgaggaagaaggctactacattagctgcttccggatttgagtgtgttactgagccagtccaaaccttcaaaaagcccctccccttttatggcagatgttttgaaaatcgcccattggcggctcttgatcttgtggagttctaatgactccgttatggcagcatcatcgagcgcacctggaagatcctgcttatttgcatatacaaggacaacagcaccttttagctcatcctcctcaaggatggcatggaattcttcctttgctgttacaagcctatctgtatcacttgaatcaacaacatatatgattgcctgggtgtttggaaagtagcaccgccagtatggcctgatgcttgtttgtccacctagatcccagacttgaaacttgatgttgttgtactgcaccgtctccacattgaacccgatagttgggatcgtggagacgacctcccccatctgcagccgatagagtatggtggtcttgccggcattgtcgaggccgaggacgaggatgcgggcctcgcggttgccgaagagcgacgagaagagccgcgtgaacacgatgcccatggcgacgcccgcggcctggcacccgcggcggcgctagggatccggagctccgggctcagggctgggagagatctgggattcggtgggagggatggaggaagatctggggaaaggggagggaaggtgagagggagtgagctggcgcgcgcgga

SEQ ID NO: 35380 - DNA, 456 bp, Setaria italica
  Peptide Sequence Number=SeqID_101354
acaactttttcttttctccaaataaataaacggaggatgcgaacaagctataagcaatctgttgcaagggcgtacctagggggacccatgcccccctctcttcaaatgtttttctagctccgtccctaatctgttgttttctacgcaggcgaaattcaagctccggtccatcgtgaccatgatcctcttcttctgcctgacgacaccggtgggcatactcatcggcctcggcatctcctcggtgtacaacgaggacagcccgacggcgctcatcgttgagggaatcctcaactcggtcgcggcggggatcttggtctacatggcgctcgtcgacctcctcgccgaggacttcatgaaccccaaggtgcagagcagggggaagctccagcttggcatcaacgtgtccatgctcgtcggcgccggcctcatgtccatgctggctaaatgggcttagtc

SEQ ID NO: 35381 - DNA, 1291 bp, Setaria italica
  Peptide Sequence Number=SeqID_101355
caaaaaaagaaagccgaggtccagcgaaagctcaagaagctcaaggaattggaagtggaggtaattgagctcaggaggaagaacaaggagcttttgtacgagaagagagatctcatagtgaagttggatgcagcagaaggaaaaatagtagagagtaatgtagtcccaaacgcaagagaagagataaacaagctgaggcatacaaatgaggacctcacaaagcaagtggaaggcctacaaatgaacagattcagtgaagtagaggagctggtgtacctgcgttgggtcaatgcttgtctgagattcgagctccgtaactatcagatgccatcagggaaagtctctgcacgtgatcttaacaagaccctgagccccaaatcacaggagagggccaaacagctgatgttggagtacgcaggatctgaacgaggtcagggtgatacagaccttgagagtgtttcttcaatgccttcttcacccggaagcgaagactttgacaatgtttcaattgatagttcttccagcagatacagcttcctaagcaaaaggcccaatctgatgcaaaagctcaaaaggtggggaaggagcaaggatgacagcagtagtttagcctcctcaatcagtggctctccaaggaggaaaccaagggggcccctggaagctctcatgcttaaaaatgcaggagatggtacagccataacgacgtttggacagagagatcctaatgacatcttggacgaggaaaatgtcgcatcctcattccaattgatgtcaaagacagtcgaaggttttgctgatgagaagtatcctgcttacaaagataggcacaaacttgcaactgaacgggagaatgcaataaaagagaaggctggacaagtaagagcacaaaggtttggcggtgggcatagttcagctcttatttcctctccaaaaggtgcacttccaccaaaacttgctcagattaaggagagagcccctgcagctaacgccgcatccagcgagcaatctagtgacaaccagaacaacatcctggtggtgagccagttgaagctcgccaacattgagaagagagcaacaagagtccccaggccacctccccctcgatcaaccactgcttcaggggctacaaatactgcaagtggagtacaaacaccacgtccaccaggtgcacctcctcctccaccaccacctcctgggaaaactggtggcccaccgccaccgccaccacctccaggttgcttcttacccaggtagttgtttgtcttggggtagttgtacttaaggtttactt

SEQ ID NO: 35382 - DNA, 419 bp, Setaria italica
  Peptide Sequence Number=SeqID_101356
gggattggtaaatcagtagcgtttatcacgatacaaaacagaaatcagtttgtcaccacttggttccactgagtttcatgattcagattagtcaaattaggtactgaatctctgctcacacttccatcaggaacaatgtggccgtgcaatgaaaatgtcgttgacgagttttagacacagatcgtatagcattgttacaccggtggaattgaatggctgagggcatttaaaacatgaactcattctccagtcctaacatctgcaggaaaccaaaactgaatcccagcacgacgcgccgctacgctataggaatgaaacagaagcaggagatctacgaggataacgcacaagattcagatgcagcgcatagcgtctgacgctcctgaactcgggattcagaccaagcactgtacccaata

SEQ ID NO: 35383 - DNA, 272 bp, Setaria italica
  Peptide Sequence Number=SeqID_101357
aggggcggcggtcggccaaggaggcgtacaacctcgccgccatggccgccttcgagcacctcaccgcgctcccggccgaggcccctgtcccggttccggccgctccagcgcctccgcagcccgagacccagattccttacaagagtcgattacaaatttatgctcagaagcgaggcaaacagctgccttcatatcgtaccatttatggaggctctcttcatgcagctctattcaagtcagaagtaaccatagatgggcaaacattgagagcc

SEQ ID NO: 35384 - DNA, 255 bp, Setaria italica
  Peptide Sequence Number=SeqID_101358
aaggacagctggaaaagaaaaaggaatgccccagattctctcatcctggtcgcaccttcacaacctcactcgcctgtctctgatatcctccgaacttgatgaagactccttttcttgtttcgcggtgcttcgtaatttatgctttcttgacctttctaaggcttatgatggaaagaaactgaatttctgtgcattgtcatttcctagactccgacaactaagagtatgcgatgctccacagctcaaccaagtgaa

SEQ ID NO: 35385 - DNA, 277 bp, Setaria italica
  Peptide Sequence Number=SeqID_101359
ggcagcgatcaggtgggctaggcaaccagctaggctgtctaggcaaaaattaggtggtaggcaggagggtgctagactgttagcgcccaggtgaactggccggccaatttttaaacagtagcattgtgttaggctcgttatttacttttagctcgcaccaaaattccaactgggatgatcctttcgaattaactgacacttcaaattgtttgcaatcacgaacctgtaaaatcctccttgatctggatttcttaccttcattattaacaaaaattag

SEQ ID NO: 35386 - DNA, 303 bp, Setaria italica
  Peptide Sequence Number=SeqID_101360
ggaggtgatggcctccgcctgcttggtcggcacgccctgcgactccagcttcctgacgagggcgagggtgtcgacgaggaaggcgcggcggccgttggtcttgacgagctgcgagatgctgcgggcggcgctggtgggcacggccgcccccgcccagcgctgcggccactggtgctggccgtgcaggagcagggcgcgcctgcaggcgacggcggcggcggccatctcctcctcctcctccccccacgcgacgcgagcggcggaccgggagggcggcggaggaggggggttggtcggggcgcg

SEQ ID NO: 35387 - DNA, 622 bp, Setaria italica
  misc_feature (613)..(613): n is a, c, g, or t
  Peptide Sequence Number=SeqID_101361
tgggttcaagctcaactactgatgtagatgtgaaagttaaccttgacagtgatccttatcctggaatctcttacatatatacctcctttgatctgtatagtcagttatacgattatactagttggagtcgacaaggtctagatctgacaacggatagtgacaggaatactactggctctcaagttaaatcaagtgttagaagcaagaggaaaacaatcattgaaaaatcccatgtctcagctgataagatcaataatgctaagagctcatctggtgataaagctgaacagaaacgtgcaacaaagcatggtgtcatacaggaggcatccccaaatttacatgttgtggtggaggctgaaaatgatagcaaaaatttttctactagcaatggtggaaatacagcagatactccagaaaggagttctagcagcctacgtgagcctgaggactctgaccttgcagatgaagcttggaatgaagaagatgattcagactttagctcctcaaataattcatcttatgtttcagacatgttagatgatgcttcaaggaataaaggaaaagggtatttaattctggtacaccttcttcggatagcctgtgcgtctaaggnttctcttca

SEQ ID NO: 35388 - DNA, 167 bp, Setaria italica
  Peptide Sequence Number=SeqID_101362
tcagaatcttcagcacatggatgacgccgccatctgccggaggcaaattattgggaatctgaggccatcaaactgcattagcagcagctccgggtacaccggaggatgacctcacgccactccccgtgttgccctccgtatcatccccaacgccggagatcccgcca

SEQ ID NO: 35389 - DNA, 1508 bp, Setaria italica
  misc_feature (1477)..(1477): n is a, c, g, or t
  Peptide Sequence Number=SeqID_101363
gggggtggcaccagcctcctcagcttgcccgccgcgtactcctccatccagcgctactgctgaaggcgagcaaggcagcaggactagcggatatccatctccgatccgggatcccttcttttacaaacgttatttgaaggacctgaccacataattacataaaagttctcaagataaaacaaaaaggaccagctccaagactttcactgtcataatcctaacatggacacaaatttactctcatggaaacaaagcacgtacagtaaacaacacacttttgctcactcactcaaccctaagtaaatactagttgtatgcacggcactacgaccaccgccgtcgatgggcttttacgacagtgatggctttaccaaagcgttccgaggcacggtgcgcccattcacaaatcttgtcctcaggtacacctatgttcgctatgctatcaacatagagcgtcaccgttggttcaatggttacatgctcaagcgcagcaccattttccagaatgccatgcagcagctcgacctgaggccggtagcaccggaacccgctcatgtagaccgtcttgaggtgatctaggcggcgcatagggaggattccctcaccaggccagcagcggctgcccatcacatggtattgcatatgcagtttcagtgtctccagttgtggtgcacaatccaagcagtgagccagctgaagaattccagtgtgcgtatttgggctattagtgaaaatagttatttcacaggtcagatgcctcaaattcacaaacatgaatgtcggtcttgtcatcctaggcacctgcgaggaccaaatcggttggtcttcctgcatataagcacgtatgtttagctccttgactgccgaaatactgggaattccggtgatggcatggcccagacctttattgctgacttgttcatgcaacggcatctgaaatgtgagagttaccttctctaattttgtgcaaccatgaagcactataggaatcacatcccctttgtatccaaaatgagtaagaccggcaacatgaaaatcgaccttgtggacacacatattggaaattagcaaatgtctaagtttagctagttggtgtgttatattcagatcagccacaccagagcaggcgataagctccaaatcctcaagaatagaacaatttaatagcaaccctggaagatctccaattatttgaacatggtgcaaatgaagcctcctgagttttgtaaagctgcatatatctgagagtgcctctatagaaacattggtgagaaacaaggactggataaaagggaaaccctgagcacttaaagcctcaagagggaagtgataaacgttttcggttcgacatgcatcgttcctttttggctgcaggttcagatctataatcttagcctttgctgcactcgcaaagcaaatccacctatcaagatgatctgaggagttgttctgaaggctacacctgatactgaacttnttgagccctattccactgtgctgctgaataa

SEQ ID NO: 35390 - DNA, 407 bp, Setaria italica
  Peptide Sequence Number=SeqID_101364
ggtgttgatcccagtgaattgttggaaggcctgaaaaccagctccagcaaaaaacgctagccttaattcctttgacttgaagacgtccaaatagcttgcagtattgtcagactggaattcatgcatggaagatgaagcaagcagctctagttcttcctccaaacgatcagagtcgtaaatcttctcgaggacagcaatagcttgtgccttcttatccttccagtaaagccaacggggagattctggcagaaaaagcatcagaacaaactgcacaatggcaggcacagcagcaactccaagcatccagcgccatgttccaggaacctgtaccatgtagcatgcatattactaccacaacatagtagtaaactagtaatacatcaacatcttaggagtaactccaagaa

SEQ ID NO: 35391 - DNA, 2222 bp, Setaria italica
  misc_feature (1)..(50): n is a, c, g, or t
  Peptide Sequence Number=SeqID_101365
nnnnnnnnnnnnnnnnnnnnnnnnnnnnnnnnnnnnnnnnnnnnnnnnnncctacagaaacaattcaattttgttctctccgtcacatcgggggcgccgaaaaatgtacagatatgacccaactctgggtctacatgcctccaagcacaatcgacgtcacggggacgatctgatcctttacccgcactgaacatttttccactgaggctattacatacaatcagaaaacagaacagcaatctagggaccacagtccacaacatagaacagtttggatcttcatccagctccttatgaacttccttcctacccagacggagcgcaacagggctatcttaaaactgtcaccgccgttgcttccatgcttgatctttgctgaaatgtacagcctagggcgcagcacccaaaaggctctggcaatcgccatggcttccccatgctctctccttccagagctgctccacctgctcgaagctcagacccttcgtctccggcacatacagggccacgaagatgaaggccagcaccccgattccggcgatgatcaggaaggtgacgccagtcccgaccagccccacgatcgagaggaacgtctgcgccacgatgaggttggagatccagttgacggtggccgacatgcccccgcacattccacggtacgcctcggggtagatctcagagttcacagcccacgggaccgggcccatgcctggagagaaggcggcaatgtacagggcgaggcctgccaccgcgaaccagcctagtatgccttggcaggtgccattagcggcagccatgcagaggctggatgatgactgcagtatgaaggccatggcaaggatgacaagggagatcacaaccccggacaagcttgtaagggccaggcggcggcggccacaacggtcgataaggtagattccaacaatggttccagcagcgttcatcgcagcgacgatgagggaaaggagcaaggccaacttgttggaagtgaaaccagccatctggactatagtggggctgtaatacatgacggtgttgatcccagtgaattgttggaaggcctgaaaaccagctccagcaaaaaacgctagccttaattcctttgacttgaagacgtccaaatagcttgcagtattgtcagactggaattcatgcatggaagatgaagcaagcagctctagttcttcctccaaacgatcagagtcgtaaatcttctcgaggacagcaatagcttgtgccttcttatccttccagtaaagccaacggggagattctggcagaaaaagcatcagaacaaactgcacaatggcaggcacagcagcaactccaagcatccagcgccatgttccaggaacctcagtaaacccaagattgataaggtaggagaagaattggccaccagtaatcatgagtacattagttgacaccaagcctcccctaatttctgatggagcagcttcagcaatgtatactggtgccgtgaccgatgctatacccacgcccaaaccaacgaacagccttccgagaatcagaacgtaagggccaggagcagcacacatgacaattgagccaagagcaaacatcaagtcagcaagaagagtagacttcttgcgaccatatgcatcatttatccaaccacccccagctgctccaagcatggccccgactaatgccaagctaacaatagtttcctgcaggaagtaattgtctctgacagctggaaattcatcacggatatacaaaagggctccagatatgacacctgtgtcgtagccgaagaggaatccgccgattcctgcggcgcccgtgagcgcgagcacgtagctgttgctgaagaacttcatgttcctcttccccgcggcgttcagaagcccggagctcccgggcatggacatgtcgatcgtcatcttcgctcctgccgaatctgaataggccaccaaaaatctcctaccccaaaatccaaccccgggcccttaatcaggcagaaacgcccccccaaatccgctcaaaatccaatctttatccacggagatgcaagctcccgctccaaaatcaaacctaggagcagcggagcggtgcaaccgccggaccgaaatacgccagaaatttctggaaccgaggaaaattttctagaatcggtccggaacgtgggaggggattcgggcgtacttgaagccagcgaggcagcgacgcccgtggaggattttgttcatacggctggg

SEQ ID NO: 35392 - DNA, 323 bp, Setaria italica
  Peptide Sequence Number=SeqID_101366
atgctcgtcgtgctgctcagctcccggctgaggaagtccccgccgcagccgctgtggatgtcgctgcccactgaccggccgcgccgccggctccgcttccggcctctacggaagctgaggtccagagcgctcggctcgacattgctgtcgccgttgccgtggccgtggccggtgttcatgctgatcgaacggagccacggcttgccgccgccgcggcgcttgtcgaagctgggccccttcttgctcatctcctcgaagaactcctctttccaccactccctcatcttggtcgcctccttcttagagccgtcgacgacattgcc

SEQ ID NO: 35393 - DNA, 403 bp, Setaria italica
  Peptide Sequence Number=SeqID_101367
gtgggtcccgaagttgagctaacagctacaatactattctctattgattcttgagctggttcactgcttttcttctttttcttcttaggtgggcccctctcagtctcatctagcattgctgctatgctatatcagtcgggtaaccgtttttgcatgtgtgtcaatggtgtccaaatcctccgcaaatatcgtatctatggtgcccttttctgcgtgttgtattgccattgctctcagcagctcctttgaacatctcgttctttcttcttccagccacagccttgagaagaggtggatacatgaagaagccgtggttagacttctaccactcagacttgccggtgagggtagggataagattctcatatgcagccctaaatctctcaactgaataatatgggta

SEQ ID NO: 35394 - DNA, 957 bp, Setaria italica
  Peptide Sequence Number=SeqID_101368
cccacagtcccattgctcctctgtgactcttggagtctctcaagatgagtagaaaccgagtcaatcattgcctcaagctgtttaatcctcgctgctgcttgtagcatgagaccattatcaatgatacctgggattggtaaaatcagtgagaatggtctcatgctacaagcagcagcgaggattaaacagcttgaggcaatgattgactcggtttctactcatcttgagagactccaagagtcacagaggagcaatgggactgtgggtgatgaacttgagagcagcttgaaagatcaaaatgtccctgcagcttcagtccttgaacccataccatttggacaccaagcggaagatgaaaccgagaagctaagatctgtcctccctcatccctcaaaagccaaaggaacgagactcttccgtcttgcatcactgtacatgacagagctcgtcgaagaatatgatatgaaatgtaaaacagttgctgacttgctggccatggtgcaaattcatcagaaaaccaacaattgaaccaaaatactgctgaggctgctgatagcggagaccaattcagcatgaatcaccagactgccgaggccacaatgccaaaaggtgttgttcagatacagattcttcgtactgcttctacttctggagtaatggtgactaggaattaggaaaccaacacccaaggaaagctagttacaaaacaaaagtcttgtttgacacccatctttgtagtagtcatgacagcaactttgttctcctttttcatatcaattattctgagtcttctagtatcaagatgtgaaacgagtataccaataatggtgctgacgtagtaccaataagactgccaattctgtacttgtacatataagggcaaccttttcagctttggcacattatcatctatcattgccatcaatgtttctgtgtgcactttttgaattttattgg

SEQ ID NO: 35395 - DNA, 207 bp, Setaria italica
  Peptide Sequence Number=SeqID_101369
gcaagattttaactgtgcgctccaagaaaatattctgcttcaggggcgatatgtatttatttcttcaccatatatgcttctactctaacatatttggatatgagacgaagaaaacaattcctttgcaggaggtgacagatgttcgtaaagccaagacagctgcctatttttccaatgtgccattgaaattgttgctggtagtaaagg

SEQ ID NO: 35396 - DNA, 613 bp, Setaria italica
  Peptide Sequence Number=SeqID_101370
gcagaagcgtcccggcaccggctgggatgcggatcccggggacgaggagatgaggattcagttgctcgtcagcaggctgaacgaagattccttaagttcccgtgattggaggcttactagaatgatgaaaaaagctgacctcatgtataatgaagataatctactaagaatactagatgggcttgaggcacgaggcaactggaagcaggctctagctgttactgagtgggtgtataatgaaaatagctacaggcatcggaaaagcagatttgtgtatacaaaattactctcaatccttgggaaatcgttgagggcaactgaagcacttcgagttttcaacatcatgcggggagatgctcaaatataccctgatatgcctgcataccatagtattgctgttacacttggtcgagctggtcttctgaaggagttaatcaagattattgagtatatgagacagaagccctcaaagagagtaatgaagatgcggcgcaaggattgggatccttccttggagccagatgtactcgtctataactcggtacttaatgcttgtgttctatcacagcagtggaaaggggtattttggggtgtttcaacaaatgagaattag

SEQ ID NO: 35397 - DNA, 367 bp, Setaria italica
  Peptide Sequence Number=SeqID_101371
attctctcatttcaacatccatgcaccacacatactaaacgagtgctacttcaacaatgcagttttaagagtgaacttgtgttgattattgcccccctgttctccttgaaacgtaatgacagtttcatattagtgaagttaatattagtttgtacttggcaaagtttgttttgctgtacattatttttgctcctcctatatgtcagcttactgtggctgagttttgatcagatttcagcattacatgtctatcaaattgtacgagtctagccctgttttcatttgggtggtgttcacggttcgtgtaaccacgtgaatgttttcagcagtactaatgaagccaatctattaattgctgttacctgca

SEQ ID NO: 35398 - DNA, 576 bp, Setaria italica
  Peptide Sequence Number=SeqID_101372
atcgctctcctccctatcggctatcgtttctgccgacccagagcttgaaagctcctgcagtttctctccagcttcgtctccgcactcggttgatggcctcacccgcagcagctccggcggccgagttcacgcagatggaggcggcgcgccagtccctgatcgcgatctcccagtcggtcccggagatcggggcgcccgtcgtcaggtcgcccaacggcggcatggaacacgggcacgacgaccgggcggagcagaggtacagggcgaagctcatctccatctccaaccagtcgcccgacgcccggcctgcgccgtgccttcccaagaacgccgccgcctaacaaccttgcaacagttgccggctatagtcgtgtgtgtgtgttgctgttgctaatctactggcccgggacacttggcccaaaataatcggcttgaaactaccaaatggaactctccctgtatgtaagcgcggagttgcctcgatctttgcactgcctgatgttcgcaattgcaatgacctttccttgttaacaaaaaaaaaaaaaaaaaagaaaaaaaaataaatgccacggatgg

SEQ ID NO: 35399 - DNA, 294 bp, Setaria italica
  Peptide Sequence Number=SeqID_101373
acatccttgatgcctcagaagaagtgcaggctgctgcaaagttccgtcccaagcaacgggccaaaccccgaaaaacagttttgtcatccagatctgcagcatctaatcctactgtagaaaatggaaatggaaaactaggagtctcaaatcaagtcagttcttctaaagaactcactagccaagaaagagcatccttgacatgccctggtagtgagacaattgatgatgtagctggttctcaagttattcttgagacatcatcggatgatgtgctgacagttccattgggacccg

SEQ ID NO: 35400 - DNA, 547 bp, Setaria italica
  Peptide Sequence Number=SeqID_101374
ttgcggagcaggccgagctccggcggaagctgcgtgcggaggtcgttgctagacaggttgaggtaccggagcttgaagaagagcagcatctccgtggggatgccgcccgtcagctggttgccggagaggtccagccactgcagggtctccgccatcctcgtcgagcctgacggcaggacgcccgtcagcgcgttggacgacatgtcgagcgtctcgagcccgacgtcgaacagcgcgtcggggatgccgccgctgaggctgttgcccctcaggcgcagctcggcgagcttggcgcaccccgacagcgaggctgggacggagccggagagctggttcctggacaggctcaggtacttgagcgccttgaggtcgccaagcgagtccggcaagcttccggtgagcgcgttgtcggacaaatccaggtgctgcaccgcggccagcttgccgagccaagcggggacgtcgccggagaggcggttgccggacgcggagaggtagacgagcgagctgagctgggcgatggagcccgggaggtggccgtcgaagg

SEQ ID NO: 35401 - DNA, 259 bp, Setaria italica
  Peptide Sequence Number=SeqID_101375
agaatatgtaagaggggaagcaatatctctctccactgagtttaagacctgtagccctgaatttgctgtcacagagagaaaaggatgaacttgtgcagctagttgatactatggtttcctactcagttacatatagaaacacaaagtttgcccctcaagaaagggcaaacatatctgtggtgccacatgatgttccttcactttctttccatcctccattcagtgatatcataaactttaagggctatcaatcagagca

SEQ ID NO: 35402 - DNA, 878 bp, Setaria italica
  Peptide Sequence Number=SeqID_101376
atcccacttactccggtccaagacaggaagctggaagatgaatccggtcagaacaaagacctgaacgtcacgctctttgacatggcgaccatagctttctccactgacaattttgcgacatggaccaagcttggagaaggcggctttggcgctgtctacaagggggagttggaaggagggcagacggtggcggtgaagcggctgtccaagttctcgacgcagggcttgggcgagttcaagaacgaggtcatgctcatcgccaagctgcagcatgtgaacctcgtcaggctcctgggctgctgcatccacggagaggagaggatcctggtgtacgagtacatggagaacaggagtctcgacaacttcatcttcgacaagggtcgatcagcgcagctggactggtcgaagcggttcgacatcatcctgggcatcgcccgggggctcctgtacctgcaccaggactcccggtacaaggtgatccaccgggacctcaaggccggcaacatcctcctggacagggacatgaaccccaagatctccgacttcggcgtggccaggatcttcggcgacgacaccgactcgcacaccaggaaagtcgtcgggacatacgggtacatgtcgccggagtacgccatggacggcgtcttctcagtgaagtccgacgtgttcagcttcggcgtgcttgtcctcgagatcgtcagcggccgaaagaaccggggcatctacagcagcggcgagcagacgagcctcctcagccacgcgtggaagctgtggagggagggcaacgcggtggcgctgctggacgagacggtggccggcgccggcgagcacagggtatcggaggtgcggcggtgcgtgcagtctaggttggtcgtctt

SEQ ID NO: 35403 - DNA, 768 bp, Setaria italica
  misc_feature (696)..(768): n is a, c, g, or t
  Peptide Sequence Number=SeqID_101377
ctcctcaccgccgccgcagcggtcggagttggcgtggccggaggggaagccggcgcggtgtccaccagcaggagggcgctcagggcgtccaagattccggagagtgagttcaccagcctgcccaatggcctcaagtactatgacatcaaggtaggaagtggggctaaagctgttaaaggatcccgtgtcgcggtacattatgtggccaagtggaagggcataacattcatgacaagcaggcagggtctcggtgttggtggtggaacgccatacggttttgatgttggcaattctgagagaggcaatgttttaaaaggactggatcttggggttgaggggatgaaagttggaggacagaggttgatcatcgttcctcctgaactggcgtatggaaagaaaggtgtccaagaaattcctccaaatgcaactattgagctggatgttgagctactatcaatcaagcagagtccattcgggactcctgtgaagattgtcgaaggataactgtgcatagctttctgaagtgtaagttacatatttgtgtggtcaggagagtgttgctcctggaaaaaggctagtttaccaaaatatgctggtggtattgcattgatagtggcatgtgcactcgtgtaagattttgaactttattgaaatatagaattcttttctgaacttaaaaaaaaaaaaaaaaaaaannnnnnnnnnnnnnnnnnnnnnnnnnnnnnnnnnnnnnnnnnnnnnnnnnnnnnnnnnnnnnnnnnnnnnnnn

SEQ ID NO: 35404 - DNA, 500 bp, Setaria italica
  Peptide Sequence Number=SeqID_101378
ttctgacattcgagaagttccttgctcaatacaaattattcttcttaatttattttctctttgcttatttatcctcacgagttgaggtgattgacaatgacagtttctgtataaaacaaaacctgattaattttctggtttcggtatttatgggggtgattataattgacagtatcagctgtgattatttaatatgtactgccatttacaagtcttaaaagttatgtgcagccatacggttttgatgttggcaattctgagagaggcaatgttttaaaaggactggatcttggggttgaggggatgaaagttggaggacaggtctgttaatgctaagttttgatttggtttgcatctatgatctaccttttcaaataataaaaaaaacatcaactctgtagacaattaatatattggcactgactctataaactactagtataactgtcacttgatcagcttataaaccagaatgaggacaactaagttccccatcatat

SEQ ID NO: 35405 - DNA, 704 bp, Setaria italica
  Peptide Sequence Number=SeqID_101379
tattgtattctttttctagttacctaactattcttactaaagtttgttctagtagactggtgagcatgttgaatagttccaaggttacattctccagttctggaggagatatattcgggttctcattcactaagacctgatgcatgacaagcatgcttgttgctatcacaatcacttgttggaatttactctgaacagaccgcaacctcatccaattgagcataaaggtctcaggaactgtctggctttgcagaccctccgtgctgctgatgagttgcaataacccgatccttattaacctgccaagtccttctcctgtgcattctggtagctctgtactgcctgctgcagatatcgcagattgtagatgacctggaactgcaagcccagttcggagagtggcaacaagtggctggacatggtttgctgctggtagaattgatagcgagctgacatgttcattccactgttcttccacaatatctttcacggatgaaatccaacaggcagttgaagggagagaagctaacgcatcagaaggggagccataacgatcggcaaaagacttctgcagatactccactccacctgatcccttgatgattggttccaatagttggatgcgtgctctactgacttcagcctttagagcctttaattctcccatagtgaagcgtcaaacccttcctattggaaacaacaaa

SEQ ID NO: 35406 - DNA, 561 bp, Setaria italica
  Peptide Sequence Number=SeqID_101380
taaagggtaagcagtcagatagcatttggatctcaatttttgtatgataattctgaatacgcatgccctgtttatagctcttgtgaacttccagtcaaggaatgggagcataactttggtcacatagaacttcacaactgcattatgcctttgtgaacagtcgtccggtgctttctgctgtttggttcttacagagtggtgacccaagcatataaatcttgcccaggctatcccacttcagagagtaggactggaatggtgatagttcatttctgtgtggaagattaaggggtacctaataactagaggttgctgaaaaaccatagtttatttattttgtataagatttgtttacgtattgttgactggagatataatgttcctccaaacaataggtcatttggaaacttaatcacaccaaggcaaccaagcatgatgtgtagttccatattctttgagttaacgtcgggatctagaacaattagtatccttacagtttgcataaactttggatgcttttgatgtgttttgttgtcacacctgtgggaggcaaatgatttt

SEQ ID NO: 35407 - DNA, 3429 bp, Setaria italica
  Peptide Sequence Number=SeqID_101381
tttttttttttttttagtttctaaagcaaaagcatctagaataacactataatataacatcagcagttgatcaaactacgaagcagtatgttgcttcgtttctccaacaaaaatgaactggacagaagatacagcaaaagctatgttctaaaacgtgaaatgttacatcaaaattgtagcgagcagcctggggttgaatttggccacattcaacccaacgctgctcatcgtctccttttctttcagatcaaagcatccttgcagtttccaggaagggtcgattccaacaatacggaagggtcaattgtttgacagacccaacttcaagggataccttaagacctcttctttttcgattcggacctgccaccatcagttcctttcctctttgatttgcccatttccttgtgcttctctttcttgtctgcctttgttttgttggacttcacgctgataatgccgcttgcagacaccttggcactcttcagggcctcctccatttcattgtcattattatcaattgcatacttctgcagaatttttgggtccacaggggcttcatttgcggctcttctcttttcctctacttccttggctgcttctgcaagatcctcatccatcgatttgctaagagggggcatttcaatctccttcagtcgaggtaaggttgcttcaatttcttttcctgcgatcttatgaaggtaaccatataacttcttcattgtcttgatgaagttagacagaacttgttccctttctatccccagttcttcctttacagtgcctacgtctttgtcctgcagacccatacagaacaaaacagcagcttgggcaccatgtaatgatacaggaagcttctccgaaaaatactggtgtgcaaggatggggacaagatccagaatcagatgataatcaactaagttgttggaatatgcttctaaccgcttcatgtcatgtggtgatagcgtgtctcccaacaactttgatgcgctattgttaccatattctgaaggttcatggtttgaataatcaatcttcgaagccaagacactcatcgcaagtttaaaattgagatgccggaaagaagttcccaaaagccgcctgaatctttgtctgaaatcttgataaaacggatccaaaaatccacatttgtttgactcgctaacttcgatgtcatcactatttaatggcctcagaaccatacaggtatgctcaccagtaacagcactttgaatctggcccacatagaatggataaaagttgtgcttccgccaaaagcggaaaagctcttgtgtcagtccaaaagatacaccaaggtaatggagcttctcaggacgacgttcacgaagatgaacaaggagtggcggaagatttgccctaggttttatgttctcttctagcagcgaagccttctctgcagcttcagtaatcttcacttcaggctcttcagtttcctcatcatcagcaaatagtgtcatttgcccttcatagtaccttgttagaaggtccacggcagctgaaccatacccaagcctcaaggcactaggatggacagcaattcgcactatccgagctcctgagagactaggaaatacattgtcttggaactgttcacaaaatttccaaggtatttgatcaccagaaggtgcacgaccctcgctcaagcttttcatagccgactttcgagatatttgtccttccaaacaaacctggattacacacagaatatctgggagctggtttttggactcatcaacagggccaagcaatacaaacaaatgatgggccggtgcatccgccattaattgcaagtcattaggtgaatttttgtagtgggaagcaacataaagtgccatcatccgctgtaaaaatatctcactctccttgtggtatgagaaaagtgtgtcccggttgacataatacagatcacattcttttgggtgaggtagcctactgatattcggaatggagtttgcaaggtccaaacaaagtaagtcattaagccatgtctcaatagggtcaccagaggcatatctaattgactcgttcaattcaattttcttaaacaccctactggaattagatccattagattgcgcagatggttggctttgggattctaattgctggagaagcttcaaagacaatgatcgccctgttccttcatacccattgacagtggaagacaggaaaacaaggtatggaccaagcatggacttaacaattggcaatggaatggcagcagcttcatcaataacaaggagttcaacttgagaaagctttccatgatcatgtggtttcagatactggattgtctgacgatgttgtttatatacatttatttgaatcgttgctttcttgagttccggatctgcactcttcaccacgtcatagtgcaaatgctccttgtactccaatgcatttattcccttgcacacaaagtcaaacagagtcttcaagttctctggacttggagcggtgacaaatatatttgagtacccagctgctatagctcctgcaatggcaagaccaagggctgctgatttaccacgtccacgagcagcaagcaaggcaaccgtattcctcaggtttttatccaaaacagagtcaaggaagttgatgacagcattaccctgatccaatgtgcagcacttgccaatcaaaggaccaacagggaagtcttcgcgaagttgatccttgaggtcttttaactgcctctcccgttttgacaatccctcagaatcctcattgtttgtaactggttgtatgaatttcatgtgagatgatatcggcaaaatgttaagttcatcatccatcacaacacatgctttgcatgatgctatggacagcaagaacctctcattgaacctcgcggctggttgagtatgagactctgttcgaaacctttcatggacatccatgaccattgtataaaggctggtaagcgaggacaatgaacggagcagcagaatgatcaaaccaccaccctcaactgtctcaatggtccgtgcgagaaggttgggcgtcagcgcctcgaagtcctgcagtatgcacatgccaaacgtgttgccaaggaccctctcagagtccctgtagaggcagtatgtgatgtccgaggtctccagaaagagggagaacgggtcggccttctcggggtccatgagccccctctgcatgagcttcttgatctgcttggcgcgcttcttcttgtggctgctgatctcgagcttgtcgcggtagcaccacaggacggagggccgcgacttcacgcgggacttggagagcatgtagttgaggttgacaatctggtcgcgcgacttgtcgccgacgatgacgaacatggagcgctgccgctgccgcacgccgttctcgatcagcgtgcggatgcgctcgtccaccttcttcctcatcgtgccgccgcttctatat

SEQ ID NO: 35408 - DNA, 333 bp, Setaria italica
  Peptide Sequence Number=SeqID_101382
cgcgacccgtcccggagaccgccgcgctggccgcgtccgggatggcgaggtcggcgccggtgcggattccgtcggagccctcgcggagggggaggtgggctcacgccggcgcgggcggctgggaggacgtcggggaggccatggtcccgccgcacgagatcgtcgcgcgccgcgcggccgcgcacagctcggtgctggagggcgccgggaggacgctcaagggacgcgacctccgccgcgtccgcaacgccgtcctgcgccgtaccggcttcctcgactgaggcggaggcgagtcgtcacgtcgcattcgcgataaagttttgaccatgtttt

SEQ ID NO: 35409 - DNA, 436 bp, Setaria italica
  Peptide Sequence Number=SeqID_101383
acgatcccacgctcccggcaccgtcgccgacgttccgcctccgcgacgccggcaacgccggaggtggagccgaccacgacggcgccggttagccaggagcagacgaggccggtggtgctgccgagctccggccggagagccagcgttgacgcccccgcgacgacggcggcgttcgtgctgctgctcgccgttggagctgcactcgtgtgatcggcagaccttgctctggtctgctgaacatgaacaggcagaagcaacggagttgtgtatagttgcagagttctttatacctgagcttgtatagttgcagaatggtgcagggctgcaggcattcgtgttaattagtactctatcctaaattaccgttcgttttgacttaaacttttgttatgcacttaaatatatattatatttaaatacatggttaaaaaaaaaa

SEQ ID NO: 35410 - DNA, 817 bp, Setaria italica
  Peptide Sequence Number=SeqID_101384
ttttgagcttactatgacagttgacagatatttctatttaggccgtcaagatttacaatatatggaagatcgtttgttcagcataaataagcacatacaggactgaggaaataaaaatcacagttagtaatcactcactactaaagccaccaaaaaaagatacatgtaggatgattataattctgaaaacacaaaaggtagcagttgaaggttgaaacacataaattgaggtcttaacataaatcagcataagcttggcaactgcattcaataaggtaactagcatatgtaaagctgccttacatgcatgtctctcaactagcatgtagtattaatttgaccaaaaagcatgaaagggaatacgtccaaatcaccagcaatgtatcagctagttccaacagatttcattcacccaggttgctacttgttagcttctccataaatgatggtcaatgtccccatgagtaccccaaaagcagcatttcaatgtccattcgtgtaacaacccagcccaggaaaacggctcatgcccactccacacactgagtggaccacacctacactgcaacctgcttacgctttcgtcctcgcttcgcgtaaaagggttaacccgaggttgcaatgcttcctagcaccagctatttaagttggcctcactctcctttggctagcagtatgggactaaacacatacatgctacctggtggagtggccacaaggccatttcggctcatgagccttacaacactcccaccctcaaggactcgacgtcctcgtcgagcaccaactccaaagcacatgtatgctccatgacatg

SEQ ID NO: 35411 - DNA, 366 bp, Setaria italica
  Peptide Sequence Number=SeqID_101385
aatgatggttacctgaagtctgaagaaagctttgctgttgaagggtgaaattattgagagattaacttcagaaaagtaggtaactctgttacaaatattgcaatttccagttgcctcaaagatccaaattgactgtgcatgttatttatgcaggcaatgcatggggctttacagcatcgaggttgctttacagaaatttcaagatttatgaattagcattgggcatgagtcacggtgcagatgttagattaaaacttgaatactaatttttgttgttcatatatcgattctgcagtatgcttttatttcttcgatgtacatcatgcccatagctaatgttgtttgttctcgatctctgattgcact

SEQ ID NO: 35412 - DNA, 752 bp, Setaria italica
  misc_feature (752)..(752): n is a, c, g, or t
  Peptide Sequence Number=SeqID_101386
atttcagaaaagttaaattctcatcttgttttatttagttcggtacaaaaggaagttgcggcggtgaaacaagtattaggtgatgtgcattttctggttggtgagaaggaaaatgtagttgctgacttgaaggataaggtccaaatgatttctgtgcttgagaaagatgttgtagataaacttaatttcttggaaagtaaaattagtgcttaccagcttgaactccggagtagggcaaggatcatatatgagttgaaagatcgccttgaggctgagaagcttaacaacagttttcagccccaactggaagaacttaaaaaagctttgttggtgaaggatgatattattgagagattaacttcagagaagcaggcaatgcgtgtggagcttcacaatatggagattgctttacagagatttcaagatttattcagtagcattgggcatgggaggatgaagaactttttagcaatttctggaagtcaggatgtgaataatgggcagcctgaaagggaggtctagccaatgagcataactcggtaactgcaattgacgaagcagctaccactcaaaatgtagaccatcagttggaaattagtccaggcagcatgcaagtacaaagcccaacatgcctcaagtttggtgcattgtcatctctggagccagtagcagcacatacagaaaaagctgactgccttcctgagctcaaagaagacattgtcatgggtgatttatctcccacgcatccaacn

SEQ ID NO: 35413 - DNA, 723 bp, Setaria italica
  misc_feature (668)..(723): n is a, c, g, or t
  Peptide Sequence Number=SeqID_101387
tttttgttgtagtcttcacattcagtatatgctacttggtgaaatcattagcattccgggtacacagggaggtctagccaatgagcataactcggtaactgcaattgacgaagcagctaccactcaaaatgtagaccatcagttggaaattagtccaggcagcatgcaagtacaaagcccaacatgcctcaagtttggtgcattgtcatctctggagccagtagcagcacatacagaaaaagctgactgccttcctgagctcaaagaagacattgtcatgggtgatttatctcccacgcatccaacagattctgtgaatccggaacctgactcggagaatcaacagcttctgtgaatccggaatccctcatcccttcgcttcttcaccatgaatttggatacacaaagctaccgattccggtggccgatagttgctgcacatttgtcttgtactcatagttaaccatcccatgtttgtatagatcgtttagcggttcaggttggccacgagcttagagatattttctgctcgtctgaagttctgtcagcttgctgtgtgtcaacggcattactgtacgactgtacgttgcagtttgttccttccaacgatacgaattttcttttactaatgataagtgcagtaaactttccatgataatttaaacttnnnnnnnnnnnnnnnnnnnnnnnnnnnnnnnnnnnnnnnnnnnnnnnnnnnnnnnn

SEQ ID NO: 35414 - DNA, 984 bp, Setaria italica
  Peptide Sequence Number=SeqID_101388
gaaacttaatttcttggaaagtaaaatcagtgcttaccggtttgaactccggaatatggcaaggatcatatatgagttgaaagattgccttgaggctgagaagcgtaacaacagttttattccccaactggatgaaatatccgttaactaagttaaaataaattgcatatatttgatctccagtttctatcaaaatcatgacatttgttgtcttgtgccttaatgatgttacctgaagtctgaagaaagctttgttgttgaagggtgaaattattgagagattaacttcagaaaagcaatgcatggggcttcacagcatcgaggttgctttacagaaatttcaagatttatgaagtagcaatgggcatgaggtacggtgcagatgttagattaaacttgaatacaatttttgttgttcatatattgattctgcagtatgtttttatttcttcgatgtacatcatgcccatggctaatgttgtttgttctcgatctcctgatcgcactcaagggaactattttgggaagtctgtacatagtgtgaataatgagcaacctgaaaggtgagtgtttcattaaacattcagctctcgtggtaataaatttgatttttttgttatgtaacaatcagtatatgctacttggtgaggccattagcattccaggcacacaatctggtctagccaacagattctgtgaatccggatcttgactcggagaaccagtccagaccctgcaatttggatcccttcgcagcatgagttggatacacaaagttgcacattctagtggccaatagtcgcagcacatttgtcctgtactcatagttgatcatccttatattttgtgagctgatcatcccgtgaccttttaggtagccactaaagagagatgccatgtaatttgagatgctttgtacacgttttggattctgttagcttgctgtgttaagtgttaacggtattgttgtaacaattagtaaga

SEQ ID NO: 35415 - DNA, 867 bp, Setaria italica
  Peptide Sequence Number=SeqID_101389
ccaaagggttactgtgattcagaaagattttgtaggtgtgtcagcttcttgtagtcttgcatgatcaatttgtgattttcatatgtattagtggatcattttcatcttctatttttcactaagtctcacgttttatttatgcagagaaacttaatttcttggaaagtaaaatcagtgcttaccggtttgaactccggaatatggcaaggatcatatatgagttgaaagattgccttgaggttgagaagcgtaacaactggtttattccccaactggatgaaatatccgttaactaagttaaaataaattgcatatatttgatctccagtttctatcaaaatcatgacatttgttgttttgtgccttaatgatgttacctgaagtctgaagaaagctttgctgttgaagggtgaaattattgagatattaacttcagaaaagcaatgcatggggcttcacagcatcgaggttgctttacagaaatttcaagatttatgaagtagcattgggcatgagggaactattttgggaagtctgtacatagtgtgaataatgagcaacctgaaagcattccaggcacacaatctggtctagccaacagattctgtgaatccggatcttgactcggagaaccagtccagaccctgcaatttggatcccttcgcagcatgagttggatacacaaagttgcacattctagtggccaatagtcgcagcacatttgtcctgtactcatagttgatcatccttatattttgtgagctgatcatcccgtgaccttttaggtagccactaaagagagatgccatgtaatttgagatgctttgtacacgttttggattctgttagcttgctgtgttaagtgtt

SEQ ID NO: 35416 - DNA, 1305 bp, Setaria italica
  Peptide Sequence Number=SeqID_101390
atcaacgatcatcctgcgtgccgacgcaccgccaccgctgctgaggtcctcactatcttcagcaggggcctccccatcgccattaatgagtgggagctgcacaacctgctgctggttcccgacctcttgggattcgaggcctcttcgcctccgtgcaccaggacgtcaccaccaaggttagcttctgtttgcttctctccatggcaagtgacgcttggatgggtgagatttgaccctggttatcattaatctgcattatttgggtgttcgatgcggagagcaagcagtactgcaaaccaacatggcctagaattcgtttagagaggtggggttcgtctaccaaaattgtgcacacgttatacatagtagttctacattatttaaggaaagtttgaaactaactgattagtgttgcaatgttgagcttctatttggttcaaaattctattggtagatacttgtgatgtggataaattgaggctgataaataaagtttgcaggctttagtgaacattgttggccatcaatggatgatgtggtgggtgtgagagtaagtgtgggctatagtttaggcatcaaaaaatttgtggaagttaatacttcttcagtgacacatcaaacttgataggaaaccccgttgtttaggtcacacagggtctgtatcctggatctactacttgaggaaggctttgtcattttttatttgttaaacatactggtctaacaaactttccacgccttgataactgttggaattttagtgtgggcactgatgttcctgttcttttgttaagcttctacgggtagaaaggtttggactatacttgacaaccttggtattgaagttttttttcctgctacctgtcatatggcaggcctcaacttctcttttcagacatggaaacaaactgacatttgtcccacgtaccatgttcataggcaggactctacttgtctatgcaatggaccatccagatgaaggataaacagatcgccataatttcagagaagttgagttctcatcttgttttatttagttcggtagaaaaggaagttccagcagtgaaacaagtactaggtgatgtgcattgtctggttggtgagaaggaaaatgtagttgctgacttgaaggataaggtccaaatggattatggtcacacctggcacttgcattctcccatcatctggcaacttcatttttgattattacatttccatgcttctctgatgtgtattctttatgcattattgtccctttcactgttatttcagtttgtgacttgaaggataaggtccaaagggtta

SEQ ID NO: 35417 - DNA, 712 bp, Setaria italica
  Peptide Sequence Number=SeqID_101391
cacaaccaaaccaggaactgttatttaagtttgtgacttggaaggataaggtccaaagggttactgtgattcagaaagattttgtagagaaacttaatttcttggaaagtaaaatcagtgcttaccggtttgaactccggaatatggcaaggatcatatatgagttgaaagattgccttgaggttgagaagcgtaacaacagttttattccccaactggatgaaatatccgttaactaagttaaaataaattgcatatatttgatctccagtttctatcaaaatcatgacatttgttgttttgtgccttaatgatgttacctgaagtctgaagaaagctttgctgttgaagggtgaaattattgagatattaacttcagaaaagcaatgcatggggcttcacagcatcgaggttgctttacagaaatttcaagatttatgaagtagcattgggcatgagatcgcactcaagggaagtctgtacatagtgtgaataatgagcaacctgaaagcattccaggcacacaatctggtctagccaacagattctgtgaatccggatcttgactcggagaaccagtccagaccctgcaatttggatcccttcgcagcatgagttggatacacaaagttgcacattctagtggccaatagtcgcagcacatttgtcctgtactcatagttgatcatccttatattttgtgagctgatca

SEQ ID NO: 35418 - DNA, 336 bp, Setaria italica
  misc_feature (6)..(6): n is a, c, g, or t
  misc_feature (16)..(16): n is a, c, g, or t
  misc_feature (54)..(54): n is a, c, g, or t
  Peptide Sequence Number=SeqID_101392
ccgcgngaacaaacanattcagtactgcgctctctctccagtccgttcagctcngaatcgaaccgccggacaggacatcagcctgtgtcagctcttgggattgggttgggttggtggcggagcacggggggcagagccgcagccaaaatctgcagcgaaaacgatggatgcgatgcgaccccccttccacctctcgctctctcaggattcagcgcctactactgctcaccaagattcccagaagcagcaccacgctgcaacacggcggcgtggcccgagagagagggagtggaagtgtgtctgtgggcgagagagagaggctgcagacagaaggct

SEQ ID NO: 35419 - DNA, 400 bp, Setaria italica
  Peptide Sequence Number=SeqID_101393
gcggagcagactagcagaggaggctccaacgcgccttgcccgaggaggaagaaagagggagagaacagagaaagccgcctgctttccttgtttcctgcagcttaacgcagaagtaattgcatcaccaggcaccagccccactaccgagctgcaggcgctggcgctgggagcggacgcagagcagcagccagcagtggccagtggagtagagcatgagaaaggggggggacaaccaagactagacaagacaagacaagacaattacctactaccccctagtacgctgccgccgcccaataagcgccgctgcagcggcctggccgccgccgtgccggcgctcgtcgtctgctccatcctgctcccgctcgtcttcctcctcggcctcccacccccccggtcc

SEQ ID NO: 35420 - DNA, 574 bp, Setaria italica
  misc_feature (564)..(564): n is a, c, g, or t
  Peptide Sequence Number=SeqID_101394
ctcggaaaactctagcctcacaaaagcaaatcagctcaccgaactatcctcccaattgtttcgtactcttctccagatctcaactaacctctcttaacttcgcaccccaaacttcttaaaactcttttttgatctgtttctttttcggactgaagaaattactgcctaacgctactgctaatgatactaagcttagtcaaaggcgatgtcagttaccattgccgagatctcggcagttcgctccgccgggtgccggggtggccgccgtcctccggccgagcgcggaccgcggccgcgaggacgcggcgtccttggccgtggcatccttcttgtccttgaagaagccgaacaccggccgcgagcacacggggacgttgagcaccaccggcgtggcgcggacgccggcggagtaggaccggtccatgacgcgtgaccgcgaccgcatggaggagtggacgctgccggccggggagctggagctgcgctccaggccctggaacacgatcttgccggaagcgttcatgcgcggggagtccacggagaccatgctaggcggcggcggtncctgcggtgt

SEQ ID NO: 35421 - DNA, 229 bp, Setaria italica
  Peptide Sequence Number=SeqID_101395
gatactgttgcgcccgtgtgatgtgtcgaccgccgtgttggtttggagctggggctgcatagtcgtccatgccgcccgcatgaatggacggccccggatcgccaccgggggaggcgccgacacgtggccctccggggccccctgatcctggagaggctagggtttcatggtggaggttttgtggcagaaatccaagattatgcaagtttcagtggatttgatagctgaa

SEQ ID NO: 35422 - DNA, 245 bp, Setaria italica
  Peptide Sequence Number=SeqID_101396
ggattatatttttggccagtgtttatgctctcatttacgtgagaaacatttggtatgtaagtgtttgaatgaattaaatatggaaatgttatacttgcagtgataaactgacattgcatatatccttagagggtctttagggtgttggctgtattcgcagtatcagtatgctcttaatcttcaggtgcgcctagtgtaatagcctaatgggcaattaaacaagtaaatctccattgtaggcaatg

SEQ ID NO: 35423 - DNA, 499 bp, Setaria italica
  Peptide Sequence Number=SeqID_101397
ctcggtcatgaaatcaatattcaagagtgctcaccatggggtaagtttgtaaagtgctgcaccttaatctcggatgttttgcttgttgttgttccaaagagcgacaggagtatttgagagaacttgcacatggttcttgtaaaaacagtggaactggcagaccatattgatcgctgcatcattccttggatttcttatggtcaccaaatatattggaaagaaaaagaagaagctcttctggatgtccgcaactgcaccgctcatttcagtgattgtatcaaccttctttgtgtacatcactcgtgcagacaagcatggggtcgcagttgttaaaaacatagagaaaggcatcaatccaccttcggctagcctcatatacttcagcggcccgttcatgctgaaaggattcaaaattggagtagtagttggattgatagccctaacggaggcgattgcagttggaagaacatttgctggcatgaaggactacaaactagat

SEQ ID NO: 35424 - DNA, 335 bp, Setaria italica
  Peptide Sequence Number=SeqID_101398
atctatcttgtcttcaaagaccgagaggtattggcaacaactaatgtttcatcaaggtcaaacacaatgccaaggcatcgaagattcaacatggtcaagcaagaattgtataagcccaatggtactttatagccccaaaacacgcgtgatttggcaagtttctcttagaagtcatcgccactaagtgtatctcttccgctccaagtggaaaaaccgctgtctgcaaacaatatgcatttaatggaacaagatcagacacagaataaatattttccgcttagggaataatgtaagcaaacagaatactatgcacacagcgaaagcatggaaattca

SEQ ID NO: 35425 - DNA, 348 bp, Setaria italica
  Peptide Sequence Number=SeqID_101399
ccggcagtacggatacacactctccaagcccaaccacctaaggttcggcttcccggccacgctcgtcgtcacggccatcggcctgctgctcatcagaggctactgatcgattatattgatgatccgccccatgtatgggtatgggtatgtgtatgtatatggaaatatggaatgggatatggaaatactacggtgatactatatgtatatgtgtacagggaatgggggaacgaaacaaattaaacgtgtcccagcttgtattttgtactacaggaaagaaagattattcattggttccgttgccttgccctcccgagtggggtgacggagggcacgctgctttagttt

SEQ ID NO: 35426 - DNA, 1042 bp, Setaria italica
  Peptide Sequence Number=SeqID_101400
taaaaactaagaacttaagaaaaggaaacagatggcaagcaatactcaccaagtcaggtcggtgcatttgtgttgaccctcagtcgcactagtgcagaagcttaccttggaaatctgtctcgaaggcagtgattactgttccagcatacttcaatgatgctcagcgtcaggccacaaaggatgctggccgcattgcgggccttgatgttgagaggatcatcaatgaaccaacagcagctgctctgtcttatggaatgaacaacaaggagggtttgatagcagtctttgatcttggaggaggaacttttgatatctctattctggagatctcaaatggagtttttgaggtcaaagcaacaaatggtgataccttcttgggtggtgaagattttgataacactctattggaattcttggtgagtgatttcaagaaaactgagggcattgatctgtcaaaggataggttggccctgcagaggctccgtgaagctgctgagaaggcaaaggttgaactttcatcgacttctcagactgagatcaatctaccattcataacagctgattcttccggagcaaagcatttgaacatcacgctgacaaggtcaaagtttgaatctcttgtgcaccaattgattgagaggactagagatccatgcaagaactgcttgaaggatgctgggatatctactaaagatgtggatgaggtgctccttgttggtggaatgactagggttccaaaagtacaggaggtggtctctgaaatttttggaaagagcccaagcaaaggtgtcaacccagatgaagctgtggccatgggtgctgccattcagggtggcattctccgtggagatgttaaggagcttcttctccttgatgttactcccctgtcacttggtctcgagacgcttggtggtatcttcaccagattgatcaacaggaacactactatccccacgaagaaaagccaggtgttctcaactgctgctgacaatcagacccaagtaggtatccgtgtattgcaaggtgagcgtgagatggctgc

SEQ ID NO: 35427 - DNA, 967 bp, Setaria italica
  Peptide Sequence Number=SeqID_101401
acaagtttttaacttatgtactaccttcctattgcgtataagcatctctgtttttgcaggactttctacgccaaaacaacactggaaagttactctggcaaggatttggcatccaagctgcacagctatgcctctttggtatccaggagcatgaagatataatgtgggatgcatttcagcgttcaggaaaggggaagatctcatttctatatccaaacaagagtaccattcccaagtcagtcaaagacctcaaattcgatggtttgtccttgagttctgaccttcatgacatgagttcacaggatgaacctttcaacttcattttgcttgatggtacctggagtaattctgctgcactgtacagaaggttgaaggagagatggactgcaatatggggagatgaagatattccttgtatctcactatctacgcttagtgcctcagtgatgcataaactgcgaccgcagccagcatgggatcgcacctgcactgcagcagctgcagctggactcctctgggagttgaatttgcggcctgagctcagcacattagagtttgaaaagcaagctgaggcagtggagtgctcattagatatcttgctggatgctctcaccactcgacgggttcgtctgggtcgatcgataacccgaaaacagagacataataggaactgcatatagggaagcatatacattaaagtggaaggctgagggtgtgtttgttttatgcccatgcctgctgattgattttttggttcttgactgtgattgctcctctcgttcggatgggcgccaacctaagacgtgcccacatgcttgctctcacgcccaggcggtggctgattcctcccaattatttggcaatccaacggttttggcagggcagggcatgggcacaaaccgaacgcacccgcatgctgagttcattctttttatagaattgcatagctgattggctagtcaaatta

SEQ ID NO: 35428 - DNA, 418 bp, Setaria italica
  Peptide Sequence Number=SeqID_101402
gatacaaatagattaaaaaataattaaagacttcatgtgcgcttattttgtcttatttattgataaatattgggcccacatgcatgccaacaaaatctgcaacttcctaaaacaacttttacctgcatacgacgagcacggcggtctcgaacttctttctttgccacttcaacaaattgttgcctctcttgatgaacctcatcaatctcctcttgggttgatggccgtccactggagtttatagaaggaacactcccaggttttctattctaaaatatcagaagatctaatgtcacttcatttgtaatcaagcaatagcaacttactgcaaagtgcaaacaacaaactgagccttagtaagtaaaaaattccaaatgaaaagaattgtgcaaacataggatattcaatacattattta

SEQ ID NO: 35429 - DNA, 1126 bp, Setaria italica
  Peptide Sequence Number=SeqID_101403
aatggcacctgagtgtggtgcattcatgccctaatcacaagctcatatacattgctattattctccctgttgaggcgctttagtgcctcaaaacttcttctgcttcctaagaactctattcttttaaaagttacaagtcctttctctgctgattcggcacttgaatacaacgatcgaagtcgatcagcgtgccgagaatctgtatgcaaggccatgtctatctcatccattgacatgttttcctggtagaagttgtagatgtgatccagcacttgtatacgtgtaaagccaccatggttatagaacgtcttcgaggaaggtccaagctctccaaaacggtcaatagggaagagtatggtaagaaagtgattcttgaagatcaactcacttcgctcactttctttcagtgggcgggaaaaattaatcagttggttgatctggatccctcgcatccccatttgcatcaaaataagtggtgccttgctgctcattggtatcatcagaccatgaagaatccgtataaatagaggcggatgaagttggctcagagattgtccagcagattgaatccagaagtgtggctggtgtgatcggatgaattggcacttcgcatgactgcatacgacgagcacggcggtctcgaacttctttctttgccacttcaacaaattgttgcctctcttgatgaacctcatcaatctcctcttgggttgatggccgtccactggagtttatagaaggaacactcccaggttttctattcttgtcagatgtctgggcattttgcagaaccatggcaacacgcctagctaggtccgaagagaaatggacaagacgctgtaagttttttccttcactgttttcaagatccaaagtggagttacaatgttgtctgagtgtcctgcatatctgttaatagaagcatcctcacacacaacataagtggcaggacaacctataaaccagtgctcgagcaacttagcaccttctctcgtagcagcatcagatatctttttcttcatttcaccagatatcccagggtcaatgtagattgtgtcattcataaaaaccagctcatcattgccactttctttcataggagtctgagggggatgcttccgggtcg

SEQ ID NO: 35430 - DNA, 1180 bp, Setaria italica
  Peptide Sequence Number=SeqID_101404
ttaaggacaacattaggcacctttgtggatctaagagaagaaagcacttcttgcagcttgcaacaattagcctctagtagtcgcatatctttgaaggcaatcataaatcatattttcatgagaaacacatcacataaccaatgcaaacacatgcacaccgccacacctatgaacacctagggagtttcagccggcagatcttgagattgacgaagtcatcattctttactgtccacgggcatgctgcctcgtaaagaaggttgaggcatcaaccttggaattccatggatggagaaaacaagtatgttgttcaaggacactgatggcttcagctttgatgaaccattgggttgttggtcgttcacctcatcgtgggtataagagtaacagatctgatggttgcttcaagatattgaactggaactaccatgggatcaaggggaagcaattcttgtccagagagaaggttgactcaactggttgtcaaatcactagagctgtaccaaaagatcccaaaaagggtaatcacacaaagtggtgggagaaggacatgaagggcaacatgaagagtatcaaatcccaagatgactttgacgaacagcttttgatggctggagataagttcacagtggtgcacttcttttcacctagctgtcgagctttgtctaagttacactcaaaggtacatcaatttgccaggatgcatccaggactgcagtttctcatggtcaactataatgaacagacagagatctgtaggagactcaatgtttatgtcttgccattgttccgcttttacagaggcgctgaaggtcgtatctgtagcttcagctgcacaatttcaactattcataaattcaaagatgctctgaaaaggcatggggttcagactgagagtcttgcaacagaaaagggtttggaagaatctgaacccaagagctttgccccacctactgatatcccaaatgcaagtgatccttcgccgaacatggatgtagatgacggtcccgttgaaccgggctatgactaaatcaatttgctgcagactgccgagttcaatagttcttatgtatgcgtatagaagctaagtaatttaaaaattaggacccatatgctcttgtacagcccttcattttaaaattttgagggctaataaacattaaattgctatctagttctg

SEQ ID NO: 35431 - DNA, 122 bp, Setaria italica
  Peptide Sequence Number=SeqID_101405
gtggcgctggcgaacaaggaggagggcgcgctcaaggaccagtacccggtgcccgccgactggtgggtcgccaagaacaagttcatggtcaagggcgccgatggccactgggcgctccagga

SEQ ID NO: 35432 - DNA, 330 bp, Setaria italica
  Peptide Sequence Number=SeqID_101406
acgacctgcttatatcggggcttgtttgtgttgtcaacatccttcctcacaattacagaggcactgctagtgccggagtcttctatgctttcaattcatccatcttgtatagattcataggccatcaaaatcaacactaaggttggttggtttgtccatatgaattcatgtagcaatttcctgaacttcacttgcaactgttatttcacctttaagccttgcatatattgcagcattaggacgataattctgttcctccatgaacgatagcagactagagcagtcagcagtatttcccttttgtaataaaccatcaatcaaaatcttcca

SEQ ID NO: 35433 - DNA, 845 bp, Setaria italica
  Peptide Sequence Number=SeqID_101407
atgtttaagattaaagcacgcatggatccaaggtacagaattatgtggttctaatatcgtactgtgaaattcagatttcaagtctagtgatattaattctctcacgtctgtgctatcaccaaattgttgccagcaacatggcgtgtactatgtgcattttactcctctatggtagggaagatgtcaattatctcatgttcatattgctggctgataatctgctgtagcattgttcttggaatcatttctgaagaaagatgaactgcagatttcaaattcagtgctacagcaaattctattatatttttattatgatagatcatgagaaaacactttggacagtcattgcaaccaaatatgcagaaatgaaaaaccatatctgcaactacaaaagtagtgaatgctattcatcaacagtaaaaactgaatacgtcttacttgagcatggaactatatctctagaaagcacaacatgtgatgcatccacccaacaaactcatttgaccattcttgctgaggtgtggtgccatttgatactcctggaaaatgctgatcttgaatttgcagctgatgtactgcgtaccacctgcgttttcctaggaccagacctgagggtgttgaaaatcctctcgagcgagtatggtctttcttttcaagttttatctcaagcttttgtatggctgcttctgcatttgctttttgcatattctcccatgcagtcatttttgcttcctctccctccatcctttaaacaaacaagaaatgcatccatcagcatttgatagaacacatcaaatgtattacagcctcattatcttctcaatccctatattagatgatagaac

SEQ ID NO: 35434 - DNA, 1483 bp, Setaria italica
  Peptide Sequence Number=SeqID_101408
cttcccacacaaatatggtatactattacataattcctgaagaactagaaaatgaagatttgaaatccactggtacagatgattatattacattctacttataatagagatggggaaagcactttggacaatcattgccaccaagcatatggggaaggagaagatcataactgcaaagacgtgaaaattggaattagaaagcatgacatgtgaagcatccactcaacgaactcatttgaccattcttgctgaggcgcggtgcggtttgatagtcctggagatatgctgatcatgattggcagttgatgtactgcgtaacacctgcattttccgaggaccagacctaagggtgctgaaaatcctctccagcgagtatggtcttttcttttcaagttttatcacaagcttttgtatggctgcttctgcatttgctttctgcatattctcccatgcagtcatttttgcttcctctccctccatcttagatatacacttagcagtttccttaacttcccaggcagacgatttagattccagtgtcttttcttccactctataatattggttgcatttttgtcaaagcctcgggtgacatgtttcttggaccacctagtcagagtcacccgatcatccacctgcacatccctgatctcaagcttagagaaacaactctccagctctttgacttgttgtgctgatagcgaacgggagaatgaagatctcatgttggaagaagaggacctgcttatatcagggcttgtttgtgttgccacatccttcctcacaattacaggggcactgctagtgccggagtcttctatgctttcaattcatccatcatgtatagattcatgggaagtaggcaatgactgatatgactcagttgcactaccaaattgctgagaagccctggtagactgcatagcagggtaccgaccattcgtttgaccggacctgcctcctcgtccattgctgctatcctcacccgatgctccactcagatcccttccagagtccatgacgcccgcacaaacatgctctggtagcagaactccagccaagtaaggtgagttcacagtgagatttccaactctaccactctcaaggaacagagccgatgatgaagaagacgagtatggcccaccaaatctgccagtaggtccaagaggtccacttttggacttgggccgccagagttgcgggactgacctcccaagtgcattactggggtttggactgaagatccaccgttctgcgtcctcccattttgatggcagtgtcctcccactgctataaggtagcaccatgctgcttcctggatgccttctatgtcgggccgaaggcgggatcactctttcggaattcggaccctgctgatacccaacaattgtcgtcccacgccgatggtagctcggcgtccctggacaaacaagaaatgcatccatcagcatttgatagaacacatcaaatgtattacagcctc

SEQ ID NO: 35435 - DNA, 1569 bp, Setaria italica
  Peptide Sequence Number=SeqID_101409
gattgcaaatggattcacagggatacacatggaaacatcaggtcaaattatcagagatcgattcgagtgcatctgacctaacatggttcagataaacctaatgggagctgcaaatatccaagcaaaaaggaaacgattatgtacagctcggcaattagacagatgcggaggcacatcgcatactggataaacccctttggaccaaaatggttcaaagatggttgattttgccggttttcaccaaatgtgatctcttttccttcttcacctttgttctggtggtcaccaactccgaggcacggaacacgaaggtcagacctgatctatcacccctagtttttcccagctatgatactgtcagaacttagtctattggaagggatctacaattgccttgctgcttcctctcactggagctgagacctgctgctgctttcaggccaatggaagcttggcgcattgttgtattgtgacaaatcaaatgaaatggtctccactccataagggaaagtttccggagcacccgtcgatgttaacggccatccctcatttacaggattcgcctggacatttgttgcatcagttacgctgtcagttgcagtgactgctgtgtttatagtgtttgcggtggcattcctcctcttgttatatgcccttttagtttttttttcaaggtatcaagaacagttggggtcgccagcttcttcttgcgggaacgcttggactggccttgagtaagatcccagccctttgtactaagagagatgggcaatgcatcatcagtaaaatcctcgttcacaggattgtatgcaaagttggctgttgaaacatggctgtcaaccctttgatctcttagtgacttctcatatgagatcactttatccctgatttccctcatgattgacaaagcatattcttttgattctgagttcatggaaccaaattccacaacttccgcaaagtattggtggccaagtttgtagagatcatcgtagcttcccagttcctgattacccgctgagacaggttgggatatggaagcacatgtttgtttacaatccttgcaccagcgatgaatgatgtattttggtggaatcatcagcacaagctcctgcctcaatacagtgagcgcatgcctgcacaatattcctttggattggaacaaccggcagaggcaccatatgtcatcttcaacattatcataaacaactttgtagtctaccttggttgcttgattgatatgctccgaaactacgtatgtaaccactgaatcattccggtcaagtatactataattgcaatgaaatgaatgccctatttcattcaagaacttctgaaagatttctgcagtgtacacctttgcggcttgatcttccacaggtaatcctgtcatcattggtggcctcatctgtgatgatcttaaatcttcataagattccttttctaacttatctttaacagctccctcatactgctctacaaacattttcaaagaggttcctgacgtcaaccagccgtcaaaatagtcagtaacactatcacttctatctgtgacagacattcctgccc

SEQ ID NO: 35436 - DNA, 851 bp, Setaria italica
  Peptide Sequence Number=SeqID_101410
atagaatcacactaggtccacatattactctccttctatgtgaattttttatattttcaataaccaacatgtactgccgatttcaaacgcagccaggggccaagttatccgtgtgactggagaaaagttaatgttatccaaacattgttagctgctcgtcatggctgataaaagaacaatgacctctaagctagtaactttgctagttcatccactcttaaggtaccttgtggaaccacatccgataggaactcttgcgcacggccattttgtccgcattgccaaacatccattggcattatctttcttttcaatatgactgctggatagttaattttctacaagatgctttttaatttttacttgcttgtctagcccatttctcctggcactggtcttagtttgagtacgcttgaaaaccagttcacgtggaattgactttgtgaatgcaacgcacttttgatagaccagatctgaatcaacaaactcattctcactcagaacaagtgccctgccactgtcaatggcctgttccaaaaggcataacactcccaccatataagaaggccgcacttcagaactactattgagaacatccgtaccttctataccttcgttgcctttcctcttagtttccaaatcatcacctatgcttgttacaccagggtgtggttctaaatcatctggacagtgttcagatcttgcagaatgatcaagggacttctcaaccagacctctattagtgtctgctgagggttcagttccagatatacctgtagaatgaaacaatccagggacttctactgcagaactcagcaccatatcagtgccatgattaagcttcatggtta

SEQ ID NO: 35437 - DNA, 448 bp, Setaria italica
  Peptide Sequence Number=SeqID_101411
ttttaagttcaaaggctcaaaagatatccttgctgatagaagttctagaaagaagcaccagaacagggatgatggggtaaaatcaagcatcggagatgtgggcttcttgtccgcgggggtactcataatatggaagataacatggatggctatattccatatgaatggaagcggacagtatattcatggatgataggatctgggggttatttctgaagacacagaggtcaaatacatgaacaataagagaacaagggcaatgttgcagggtaaaattaccaggaagggtattttctgtggatgctgttccaagattctaacagccatgaagtttgaacttcatgctggttcgaaagagaagcagccctatgcaaacatctttgtagaaggtggtagggtttctttgttgcaatgcttacacgatgcatgggagaagcacacacgatat

SEQ ID NO: 35438 - DNA, 245 bp, Setaria italica
  Peptide Sequence Number=SeqID_101412
gagttggcttagtttaacgtatccaaagtacttggagagtacagtacagtcttgcaagcttgctagccatgtgcatggcgtactgccactaaacctttgcagattactacaatggggagcgaggtggttggtacgaggctctccactgcagcttgcgaccaaccatgcaggcctggtcggcgtcggatcggagcggaccggcgcttgtgttcttgatcgtcagcacggcgagccggtgcccggga

SEQ ID NO: 35439 - DNA, 1389 bp, Setaria italica
  Peptide Sequence Number=SeqID_101413
ctgcggcaggtgcgggaggcactggacgccgtcgccagcgagctgcagcgcgacgccgccgacatggccgtgcaccaggtggacgcacacaacgtggtgcccgtctgggcggcgtcggggaagctggagtactcggccaaaaccttcagaggcaaggtgagcaaggtgatggacgagtacctggtggagtaccccgagttgccggcgttgatgccatgggatggtgagcagtcggaggatatttactgggatgcgctgatcgacagggtttgcagtgaggcggagaatgtgccagagattgattggtgtgagccgggggaggcagcagcgctggaggtgcttctggggagtaaggacgggttcttgacaaagaggatcaagaactatgacatgggccggaatgatcctacaaagccacatgcattgtcgtgtctttcgccatacttgcattttgggcacatttcagcacagcggtgtgctctggaggcaagaaaacgccgccaacttagtccaaagtcagtggatgcattcttggaggaactgataataaggagggaactagctgacaacttctgctattaccagcctcactatgattcactggctggtgcatgggagtgggctagaaaaacattgatggatcacgcctctgaataaaagagagcatatctatacgagggagcagctcgagaatgcaaaaacatctgatcctctgtggaatgcatcgcagttggagatggtgcaccatggaaaaatgcatggattcatgcgaatgtattgggccaaaaagattctagaatggaccagtggacctgaagaagcactttcagtagcaatatatttgaatgacaagtatcatatagatggcagggaccccaatggctatgttggttgcatgtggtctatatgtggcctccacgatcagggttggaaggagcgtccagtatttggaaagatacgttacatgaattatgctggttgcaagagaaaattcaacgttgatgcttacatttcatatgttaaaagattggttgctcaggccaagaagaggaaggccgaggaatctccagatacagggaaggtcaaagcgtccagagtctgaggcgattaagcagttgaacatgtctaaaacttctatataattcgaatttggctggtagatattaacatggcaaccgaagagttgctaagtagtaataagtagagagacattttgcaagggtttatgctcactgatattcttatgacttctgatgattgaaacttaattagcattaactaagaccggtcaaattcaagtgtatgcgattgttaacattgttactgaatttagaaatagttaagacttaagttagtttagttaacttttaggtaactaaactaaaaaaa

SEQ ID NO: 35440 - DNA, 359 bp, Setaria italica
  Peptide Sequence Number=SeqID_101414
cttgactcctcagctactaccttcctggcttcctctctctcctcagctccatgtgggcggcctcgagctccgcttagatcacagctgtgttcgttggttgggtgatccgccccttgtcggctcctttcagttccgagctctggaacagggagatctgcgctgtctccacctcggctccctccctcgtgtgcgcgtgggcactgagcagcaccttcagaaatggatttcttcacggaatatggtgagggcagcaggtacaagatagaggaggttatagggaaagggagctatggtgtggtttgctctgctctggacacccatactggcgaaaaggtcgctataaagaagataaatgacat

SEQ ID NO: 35441 - DNA, 396 bp, Setaria italica
  misc_feature (48)..(48): n is a, c, g, or t
  Peptide Sequence Number=SeqID_101415
cttcaggagatggtgtacccaggagatctgtaattatatcaagttgangtacacatttttcccagggaagagaggtttttccagtttaaaagctctgcaaatatacagccgatgctccatatatctattgctggagtgtactgcaacaattcaaaacatataatgttcgaatgctccagataatctacagcacacaaacatgtgtaaaagctaaactatccagcatcccattatatgcacagagaaataacaccaccaccaccagaatagtcttttattctaacaagagtcaccaaaaaaataactggctagaaaagaggcattagtaatagtaataatagaagtattaataatatttaaacagggaagtatgtgagaaaaattaatgtgctttga

SEQ ID NO: 35442 - DNA, 582 bp, Setaria italica
  Peptide Sequence Number=SeqID_101416
aggaatttattgcagaatctgtcactaaatctgctgggagtttttgaaaacaatattgagctatagcaatatgcaaacagcatgtcgtaggttgcaagcgctaaccttgaggaactctatttgcaccaacagaggaagaatctagctgtgctctccgtgcatcatctctgattacacactttgaaagatcctccgtgacattggttgtgctttgggttcggttatccgagtataacacgctaggccttggtagagagttatgttgcctttcaggtggagctgctgttgatccctttgcataatgttcttcaagatatgcaaattgcttctacaaatgaacccaagtgccgtggatcatgaaaccagttgactcagtcccctcaaggaattctctcaacatattaggatgatactccagaatttctctgtagatgagttccctgatatcttcttttgtaatcctccgcctctcaaactcaaattccagcttcatgaccggctctgctttggatactcacactggcgaaaaagttgcaataaagaagataaatgacatctttgaacatgtgtctgatgcaacgg

SEQ ID NO: 35443 - DNA, 427 bp, Setaria italica
  Peptide Sequence Number=SeqID_101417
tgtaagtgattaagagcaactactagcttttcagttcggctctagagctacctggttgaagaacaagttcatgaacagcttcaatcacgaactctgcagacaggtccaatgttgccacttaccagtgagtttccactatacatcaggctgacaaatcttcaccagattttagtgattgaatagcgacaaatcgaaacccagcaacttcgagtgcaaagaatccggaatttaggaatcctttagttctacgttcttttagaactcaggtatctggattaagaatacaaatctgtacaggactacatttctgaatttgtcagaataatgtagcgcttagcataagtaaccgctgctgataacatgttaggaaatggttcgctggtgcactgctgcggaaatctaccagtggccaccgcgaccgtccacg

SEQ ID NO: 35444 - DNA, 606 bp, Setaria italica
  Peptide Sequence Number=SeqID_101418
caaactacctactacagttgatggccggaatggccgactggtagctttacctgcaattcatcagcaatctgaaccaagcatctgcagttctcttgtggaaggtatctccaagacatgacacattctaaaaaggatgttctgtatagagttctcacatttttcaggacgggtacaccctgaagcactgcagacctaattcaagcaggcatggcaggctgcttgatttttacgtacattgggtcaaccactagacttgtccacattgctagctgattgattcagatttaacgtggtagggtgtatagtgaaaactttgtggcactagcagcatggggctgctactgacatagctgatgatgctgatcaatttgttcttgaagctggtggctccagactctgaattatgcacatggtcttattgttgtaaaatgtaacatggagtttgaatttgaacagtcaaattttcctgtagccttttgttcaaatgtaataatatttatttttgaacggaatgaagatgcagatttgtgcaacaaaagtgtcgcactttttataacgaaaaaaaaaaaaactaaaaagagaactagaccaaggacacacagggag

SEQ ID NO: 35445 - DNA, 1310 bp, Setaria italica
  Peptide Sequence Number=SeqID_101419
ggtctgcagtgcttcagggtgtacccgtcctgaaaaatgtgagaactctatacagaacatcctttttagaatgtgtcatgtcttggagataccttccacaagagaactgcagatgcttggttcagattgctgatgaattgcaggtaaagctaccagtggccattccggccatcaactgtagtaggtagtttgtttggtatgtatggctttggttgcccagtttgtctcacatcaatcctgtcagcctcacttgtttcgcccttgcaggtaggaattcttttggggtatgagcttctaggtgagacaccattagctattcgtctctgttcatattggtcagcagcaggtgatgcataattaccataacgctctgcagaaccaacccctctagcaggcctcgtagcaccacctgcttgaggaactctatttgcaccaacagaggaagaatctagctgtgctctccgtgcatcatctctgattacacactttgaaagatcctccgtgacattggttgtgctttgggttcggttatccgagtataacacgctaggccttggtagagagttatgttgcctttcaggtggagctgctgttgatccctttgcataatgttcttcaagatatgcaaattgcttcttaaaatgatccacggcacttgggtacatgaaaccagttgactcagtcccctcaaggaattctctcaacatattaggatgatactccagaatttctctgtagatgagttccctgatatcttcttttgtaatcctccgcctctcaaactcaaattccagcttcatgaccggctgtgcggctggttctctatccacattagctatgttcttgaaatacgggtcagcaagggcctcctccgcacttggccgatcttttggatcaaaagctagcatcctctccaataaacgtaatgcaagtggatctgcatttggaaatttatgagtaaacggtataggctttttccgcctcatgctgctcaggtagcgctttgccttctcgtttcgaatcctagagattgcttcaggagatggtgtacccaggagatctgtaattatatcaagttgatgtacaacatttttcccagggaagagaggttttccagttaaaagctctgcaaatatacagccgatgctccatatatctattgctggagtgtacttggagaaaaaagatccacacagctcaggtgctcggtaccatcttgttgcaacataatacgtccagaagatggcagtcggagttattctacttgtaaagtcttacttctttgtctaagttcctaaaattctactatt

SEQ ID NO: 35446 - DNA, 2458 bp, Setaria italica
  Peptide Sequence Number=SeqID_101420
tttttaacttccaaataatagtttttcacaagtgttattataaacgtaaaaaaagttcaatagtacagttaattaacaaattaaaatacaaagtcacacgctctggagttagaactcagaaacgtgcagattacaacaatgaaatgatattaaggaagtgtacatagctgtagctcctaggcccccgaaatgatcattgtgcacctgatgtgtaagtgattaagagcaactactagcttttcagttcggctctagagctacctggttgaagaacaagttcatgaacagcttcaatcacgaactctgcagacaggtccaatgttgccacttaccagtgagtttccactatacatcaggctgacaaatcttcaccagattttagtgattgaatagcgacaaatcgaaacccagcaacttcgagtgcgaagcatccggaatttaggtccctcgtcctcccacccctcagctggatcctccgccgccgcatcctcagtccgcttacccttccgcagccgccacagcgctggccctcccttgcggacgtggattggtgcccccacctcttctcctggcatcccctgaatggattttttcactgagtatggtgagggaaacagatacaagatagaagaggtcataggaaaagggagttatggtgtggtttgctctgctttggatactcacactggcgaaaaggttgcaataaagaagataaatgacatcttcgagcatgtgtctgatgcgacacggatactccgtgagatcaagttgcttagactactgcggcatccggatattgtggaaataaaacatattctacttcctccatcaaggagagaattcagggatatatatgtagtttttgaactcatggagtctgatttgcaccaagttataaaggctaatgatgacttgaccccagagcattatcaatttttcttatatcagttgcttcgaggattgaaatacatacatacagcaaatgtatttcatcgagatctgaaaccaaaaaatattctggcaaatgctgattgcaagctcaaaatatgtgatttcggcctagccagagtagctttcaacgatactccaactgccatcttttggacggattatgttgcaactaggtggtaccgagcacctgagctgtgtggatcttttttctccaagtatacaccagcaatagatatatggagtattggctgtatatttgcagaactattaactgggaaacctcttttccctgggaaaaatgtggtacatcaactcgatataattacagatctcctgggaacaccttctccagaagcaatatctaggattcgaaatgagaaggctaggcgctacttgagcactatgaggcggaaaaaggctataccatttacacagaagttcccaaatgcagatccacttgcactaagtttgttagagcgaatgctagcttttgagccaaaagacaggccaagtgctgaagaggctcttgctgatccttatttcaagaatatagccaatgtggatagagaaccttctgcacaggctgtcacaaagcttgaatttgagtttgagaggcggagagttacaaaggatgacataagggaactcatatatagagagattcttgagtatcatccaaagatgttgagagaattccttgagggaactgagtcaagtggtttcatgtacccaagtgcagtagatcattttaaaaagcagtttgcgtaccttgaggaacattattgcaagggatctacaggaaccccacctgagaggcaacataactcattgccacggccttctgttgtctattcggacaaccgacaacaaagcacagccaacatcacggaggatctttccaagtgtttaatcagagagaatacacaaaagacacagcagcattctgcttcagttgctgcaaataaatttccactccatgttcctcatggtgctgctgcgaggcctggtaaagcagttggttcagtgctgcagtacaaccccggtccagcatctgccgctgagcagtatgagcaacgtaggattgctaggcacccagcaattgccccaaacaatatcccttctggaagctcatacccgagaagaaatcagacctgcaagagcgagacaggtgatgctgaaaggatggacgtgaaccaagctgggcagccaaagccatatgcagcaaacaagttacctgctaccgtggacggtcgcggtggccactggtagatttccgcagcagtgcaccagcgaaccatttcctaacatgttatcagcagcggttacttatgctaagcgctacagttctacgtcttttagaactcaggtatctggattaagaatacaaatctgtacaggactacatttctgaatttgtcagaataatgtagcgcttagcataagtaaccgctgctgataacatgttaggaaatggttcgctggtgcactgctgcggaaatctaccagt

SEQ ID NO: 35447 - DNA, 669 bp, Setaria italica
  Peptide Sequence Number=SeqID_101421
cgcgagcgagcacagcttgcaatcgcgtcgcgggcgaagagccggggaaggaagcagccgcgacggccgcagcgccccgctctgccagccgagcagatggcagtcgattctcgcgaggacgttctctgggaagctttccttcttttcgttttcggcgtcgaggatgacgtttagctccgacaggggagaagtgtcttcctcgtcgttcacgaggctcagagagaagcgcgtggccgccgttgatgccgccgatgttcctactaaggggagcgttctcctggactgcattggaggcagcgcatcctgtgcaaaagctggtgctgcgtcccgcgaggtggcggtggacgaggagaaggcagttacgcagcggcttccgacgtagaacgggaacagcaggtttgaacgtagaaacctgaaaagtgatcttgtttcacacgcgaaagaaatggatctttcggtctgtgggcaacagggtgctgatttcctgctgtaatcaacgtggtagtgctcgaaattccgttgaaaaaattgagatgtacaaattgtagttgtaattttgtacaggagcagaaccataagctacaagcagtagagatgtctgaacaaatgtctgaatttcttctctgattatgcatcgtctagattctgaagttagacgtaaaaaaaaaa

SEQ ID NO: 35448 - DNA, 745 bp, Setaria italica
  Peptide Sequence Number=SeqID_101422
tgctggatcgtcagagccggaccatggaaggattgaataatctccacagctttcaagcaaaagctcttgaagaaagcagggaaacagttcagaaacttgcgcagtttggccaacgccagcaggaagagctattggcccggcaagaacagatccggcaagcccacgatcatctcatccaaaactcgcactcaatactggaagcacaggaagagttcagagcaaagcaggccaacatttttgccgctctggataaactgcacatcctgcacaacgccatcctagccgagtctcgcttcatcaaggcattcttcttctactgctgcatcgtgttcctcatctacatgctcactagtgcaaagcaaacgttcagcatcaggggccagctctactttggtctttgcatcacattagtcctggagattgggctgatcaagatcggcgccgacgacttcgacaagcagttctggatcatgtccaaggtgttcttggtcagaatgctgtttctcggggtcgccactgtccagatccttcactctatattcacctacagggactacgaggcgctgaaccaccggctcctccagacgctggtggagaaggtccgggcgctggagaagaacgccggcgggaggcgctgccgtacgacacggaggagagcgaggggagcctgatggattactcgtgggtcttcgacgagctggcggacgaggtggacagcaaggtggatccaagctacgtgttgccg

SEQ ID NO: 35449 - DNA, 290 bp, Setaria italica
  Peptide Sequence Number=SeqID_101423
gactccttaatagggggttttgatgttgacagaaacattgagaatgcaaagcagatgattgctttaggtggtttggacctccttattagcagacttgaagctggtgatgcccgtgagagcagacactgcattgctctcttgaccacatgtattcaagctgacggcagttgtagacactacttagctgataatctgaagaaggaaccgattgttcaacttcttgttggaaatcagaagaaggctagtgctgcagcccttaattttattagtgaactggtctgccttaatag

SEQ ID NO: 35450 - DNA, 652 bp, Setaria italica
  Peptide Sequence Number=SeqID_101424
atcgctgccctgcaaactcccgattgcagttcatgccgagcaagacaaatccctctcccagtcgacacacaccaaaccgctggcatcgaatcggatccgcgggtggctgtaggcatcccggcattcctcgcccacccactccactcgcgagcccagagatttcctctcccctgcccactccgctttgctgcggctggcgacgtcgggaacaccgatctcctccgattcgatcccgactggtggtctccccagcggctagccatggcggagccggtcagctcatcccaagacgcgtccaatccccctgctccggagcagagagtactggtgacgaacaagcacggggagaatctcgtgggcctgctgcaccacacgggttcgaacaaagttgtagtgctctgccatggctttacggcttccaaggacgatggaatcattgttgatcttgcagctgcaataacaaagcaagggattagtgtgtttcgctttgatttcagtggaaatgggtaagtcactaatggattctcccttccatcaattgcttttaatttctaaggaagccttggttggaaatgtcgaactaaattacctaagtttcctaattgtatgtatcaccacattactgcttgggtttgtgattattttttattag

SEQ ID NO: 35451 - DNA, 812 bp, Setaria italica
  Peptide Sequence Number=SeqID_101425
aggctgatgacctgcattctgttgtttcattatcttttccaggagaattttgatgtagcagctattgttggtctcagcaaaggtggagatgtggtggttctgtatgcctctatctacaatgatgtccccatggtggttaacctttctggtcgatttaatttggagaaaggtgttgaagagcgcttaggcaaagaatttatggatagaataaacaaagaaggctacattgatgtcacaaacaaatcaggaaagtttttgtacagagtaaccaaagagagcttgatggaacgtctgaacactgatatgcatgcagcaagcctttccatcagcaaagaatgcaggttctttacaattcatggttcagctgatgagatcataccggtagaagatgcatatgagtttgcgaagcttataccgaaccacaagctgcgtgtcattgagggagcaaatcactgctacactgctcatcgtaaagaactttctgatgccatagtagaatgcatcacatccaacgaggcaggggatatcccacgctagagccgcacgttccccaccgcagctactggctccctccaaaaatatattgccggatgaattagtcctcgttttgtcagtgcgaagtttcattgcacaattacctagactgagaactaggtaactctgtcagatgagtgtcctagggatgaaactcctccctcgtctgatgaaagtctctattaattatcttgccaagttagcaattttgctgatgtggtattaaatttaatgtcatgaaactctcataaaactataaggactgctaaggccatata

SEQ ID NO: 35452 - DNA, 1763 bp, Setaria italica
  misc_feature (1733)..(1763): n is a, c, g, or t
  Peptide Sequence Number=SeqID_101426
agttggaatttggataagaggaaaactttctggggattcagtaaatatcccatccgacggctttaatcgctgccctgcaaactcccgattgcagttcatgccgagcaagacaaatccctctcccagtcgacacacaccaaaccgctggcatcgaatcggatccgcgggtggctgtaggcatcccggcattcctcgcccacccactccactcgcgagcccagagatttcctctcccctgcccactccgctttgctgcggctggcgacgtcgggaacaccgatctcctccgattcgatcccgactggtggtctccccagcggctagccatggcggagccggtcagctcatcccaagacgcgtccaatccccgtgaacgcctctcttccctgatcttatatcactaccgcttgctctgaattctgattgccagtaacacttcgctgtagagatgggggcgaagtagaacatatcctgcctcgtaattattgaattcatgtcgtttggtttctgaacagctgctccggagcagagagtactggtgacgaacaagcacggggagaatctcgtgggcctgctgcaccacacgggttcgaacaaagttgtagtgctctgccatggctttacggcttccaaggacgatggaatcattgttgatcttgcagctgcaataacaaagcaagggattagtgtgtttcgctttgatttcagtggaaatggggaaagcgaaggtgaattccagtatggtaactacaggaaggaggctgatgacctgcattctgttgtttcatatcttttccaggagaattttgatgtagcagctattgttggtcacagcaaaggtggagatgtggtggttctgtatgcctctatctacaatgatgtccccatggtggttaacctttctggtcgatttaatttggagaaaggtgttgaagagcgcttaggcaaagaatttatggatagaataaacaaagaaggctacattgatgtcacaaacaaatcaggaaagtttttgtacagagtaaccaaagagagcttgatggaacgtctgaacactgatatgcatgcagcaagcctttccatcagcaaagaatgcaggttctttacaattcatggttcagctgatgagatcataccggtagaagatgcatatgagtttgcgaaaaaaattaaaataaaccaaaaaccaaaaaataaaaaagcttataccgaaccacaagctgcgtgtcattgagggagcaaatcactgctacactgctcatcgtattataatcgtagtttggtttattataatcatgcaatttattgtttgtgttattatgctgttcattgaatttgtatcattggctagccaagtgcttacggatgccatagtagaatgcatcacatccaacgaggcaggggatatcccacgctagagccgcacgttccccaccgcagctactggctccctccaaaaatatattgccggatgaattagtcctcgttttgtcagtgcgaagtttcattgcacaattacctagactgagaactaggtaactctgtcagatgagtgtcctagggatgaaactcctccctcgtctgatgaaagtctctattaattatcttgccaagttagcaattttgctgatgtggtattaaatttaatgtcatgaaactctcataaaactataatggccttagcagtccttatacagatcatgtttcttggaaattaaaaaaaaaaaaaaaannnnnnnnnnnnnnnnnnnnnnnnnnnnnnn

SEQ ID NO: 35453 - DNA, 640 bp, Setaria italica
  Peptide Sequence Number=SeqID_101427
ctgaactagttgaaaggaggctatttattaaaacaccaacaaagaataaaatatctctaagctatttccaccaattatgatatctaccacagcatcaaatcaaaccttaatgcccttttgagtttcttggctgcaagtgtaaacactaaacagggctaaaatggataatgtggagggaacataatagaaatatatttaaaaaacaatatgccaggaacagaagtagaaattagttacacacataggcaagaaatatcctcttttgtgtgctactttacatgaaaaattctggtcgaattgccatatctgcagcatctaaggcaataggttggagggtgcaggacagtgacttgatggccacttcatcaaaacatcattactgatacatccaaactaacataactccttttttctattgatagcctactttcaaattagtcagttaaccattgtccccttattgtgtacacacagattaaatttcatctagaaatcatggcacaagattagcatataatccttactgtccatatggaatggtgagtgcatgccatacaatctgtactttctcctaaatggaaagcatcagggcaccaaaacacatatcagtatagctcaaaactttaataattcaactgtt

SEQ ID NO: 35454 - DNA, 483 bp, Setaria italica
  Peptide Sequence Number=SeqID_101428
cccctctcttgacaataactcacagtggaatctagtaggttgttttggctgtggattcactctaggttgtggcttggcttggggttttggtggaggtttcttaggagtaatttccgaaagtgtgtcaagcttgttcttgaggtggtttggcttttccacccaaatggctttcttgggtgctttaggtggtgtctcaatgaaaactccatctctcacacactcagacacattttgctcactggctggattgggttgctctctattttatgtgggtgactctcgaggggtatagtcagctggtggctcacactggttgtagcttggtttctttctctctccactgttttgacccaccttctcacacaacccatcaagaatttgtgcaacccattaaaatgacaacccttgataacagatccaagcccaaaaccatcagccattttgaactcctgaatcatcatgcctagctgaggttccctactt

SEQ ID NO: 35455 - DNA, 1057 bp, Setaria italica
  Peptide Sequence Number=SeqID_101429
tacggaatttcgaagctccggcgcgaggggggaacgagctccgcgccgaggagtggaggggttgtgatgctcgccggttcctgctcgattcccgcggatctcgcgggcgcgccgcgatgccgaggtgagtactgagcaggagccgcgcgcgatctcggagcggttggtggaggaggagcgtcctcaggatgatgccgtcgggcccgcccaatccgatggggcccgggcagccggtgggcggcaccgcggcgtcgctgctccggacgagctccagcttgctcagtggcggaggcggcggacagccggggatgggcggaggtggtggtggcatgctctctgcgcagtcgcccttctcgtccctggtctcgccgcgcacacagtttggcggcaatgggctgcttgggggtgcctcgagtgtgtcctccttgctcaaccggcagtcgtttgggaatgggggacatatgcagggtccagggtcaatgcaaggtggtgggatgcagatgggcacgctccagcagagaggagggatggatggtggtggtgatttcattggtgcgggagggtcggatcctctgtcgttcccgtcttcctcacaggttaatttaggcaatcagatgggttcagacaacatgcaggcgacttcgcagcagcagcaacagcagatggatgttgtgcaggatatgcagcaacagcagcagcagctgccgatgtcttacaaccagcagccacaacattctcagcagctccagcagccacaggctacagtgaagttggagaatgggggaagcatggttggcatcaaatccgaacagcagatggggcaatctgaccagaacggtccagcccagatgatgcgtagtgctagtggtgtgaagcttgagccgcagcagttgcaagcccagatgatgcggagtttgagttcagtcaagatggagcaacagagttcagactcatcagctttcttgcagcagcagcagcagcaacagcagcaacaacaacagcagcaacatcagcagttacttcgtcaacagagtcttaaactattgtagtaacttct

SEQ ID NO: 35456 - DNA, 496 bp, Setaria italica
  Peptide Sequence Number=SeqID_101430
aagtgtagggcagaccagagggggacgacggcaatcctatgagctttatctcgtccatcgagcccctcacaggagggaactacggctcatggtgagagaaggtcgagatagcgcttgcgctatccgacattgatttagcactgactgctccctgtcccatagaacttggggaccccgtgagggtcgaaaatgaaagtaaggattttgacaaaagggtgcgcgaccatgcaccaataagaatgcagtatgatctcgatcgtgcgaagtgggactcgtccaacagaaagtacctgatggtgatcaaaagctccatcacagaagcaattaggggagcaatcccagaatgtaagaccgccactaagtacctgacaaaagtggagagtcagtttactggctcttcaaaagtatatgcaagcaccctcataagaaagcttgttactgcgaagtacactggtggcggtgtaagggaacatatattgcgaatgagcaatatgtc

SEQ ID NO: 35457 - DNA, 1404 bp, Setaria italica
  Peptide Sequence Number=SeqID_101431
cccccgtccacgtcgccatccgcaggtcacgtgaaaagcagcagcgcagaaaaaggcggagaagctgcttgaattggaagcgactcgagtccaaaccaccgcaccgagagccccccgccgcgccgcttcccccctccgctcacctctcgcccgcacgccgagcgcggaggcgacagcgagcatgcatcacgaccccaaccccttcgacgagggcgccgccgacgacaacccctactcgaatggaggaggcggaggcggcaagcagcagtacgggttccggccgaccgagcccatcggcttcgggggggccggcaggggcgacgccgtcgtcgacgtcccgctcgacaccatgggggactccaagggcaaggcgagggagctctcgtcgtgggaatcagatctgaagcggcgtgaggcggatatcaagaggagggaggagtcgctgaagaatgccggagtgcccatggaggagaagaactggccgccattcttcccgctcatccaccatgacattgccaatgagataccggccaatgtgcagaggttgcagtatcttgcattcgcaagctggcttggaattgtgctttgcctctcttggaatttcattgctgtcatagtctgctggatcaaggagggagattcaaagctgtttttccttgcaactatctatgctttgcttggaattcccctgtcatatttgatatggtataggcccctctatcgtgcaatgaggactaacagtgctttcagtttcggatggtttttcctctgttatctgatacacattggtttctgcataattgctgccattgctccacccattgtattccatgggaaatcattaactggtatactggctgcgatcgacaccttctctgagcatatcgtaattgggatcttctactttgtggggtttgggctgttctgtttggagacactgctgagcattgcagttcttcagagagtgtacatgtacttcagagggaacaagtgaggccagccatagtggaaaactacatttgtcggaaaatgtgatggagaattacttatgaatgctagtagcaccttttcgtgtggttttgtgcatacctgtcagcacaccttgagtctatcgtttcatatgtcagtggtggtgcttttttaagctggtatggtttaggatggtagcactgtcattataggtttgcttgcggaacggggtgttttatttcttcattagctatgcccatgttttatcaggttagtttagtcttaagtttggcatgtcggcgaccgttatggcacgcagtattatattattcttgaaatgcagaagagcaaccgccatatggtgtctgaactgaattcttatatgctactgtgcttgccgctttatattgaaaaaacctagtcggagcaaaaaaa

SEQ ID NO: 35458 - DNA, 1805 bp, Setaria italica
  misc_feature (1778)..(1805): n is a, c, g, or t
  Peptide Sequence Number=SeqID_101432
tctcgccccagccacttgccgcggcgtccccatggccgcctcttgccgccccagccatggaagcttctgcctcgtgctgctgctccttgctgccgctgctgttcttggagcggcagggagctcctcccatgtgcagctgagcgccgagtccctgctgctcgctgcggactcatcgtcttgccccacgccacaagggcaacaacatggcggcgcctcgacgggcacgaggatgccgatcgtgcaccagcacggcccgtgctcgcctctggccgacaagcgcgggaaggcgccgtcccactcggagatcctcgccgccgaccagcgccgcgtcgagtacatccaccgccgcgtgtccgagaccaccggtggagcgaggccgaagcgcggcgcggcaccggtccagctccggcccggcgcgccgtcggctaccacttcggcgtcgtcggcgtcgtcctacgcgacgtcagcgaacctcccggcatcgtccgggcaagcgctgggcgcgggcaactacgtggtgaccatcgggctcggcacgccgtcggagcggttcacggtggtgttcgacaccggcagcgacacgacgtgggtgcagtgccggccgtgcgtggcctactgctaccggcagcaagagccgctcttcagcccggccaagtcgtccagctacgccaacatctcctgctcctcctcctactgcgacgacctcgacgccagcggctgcgacggcggccactgcctctacggcgtccagtacggcgacggctcctacaccatcggcttcttcgcccaggacaccctcacgctcgcccacgacgtcgtcaaggagttccggttcgggtgcggcgagaagaaccgcgggctgttcgggcggtcggcggggctgatggggctcggccgcggcaagacgtcgctgacggtgcaggcgtacggtaagtacggcggcgtgttcgcgtactgcctcccggcgacgccgtcggggacgacggggttcctggacttcggcccgggcgcgccggcggcgaacgcgcggctcacgccgatgctgaccggcagcgtgccgacgttctactacgtggggatgacgggcatcaaggtgggcgggcacctgctgcccatcccggggtccgtcttctccgccggcggcgcgctcgtggactccggcacggtgatcacgcggctgccgccctcggcgtacgagccgatgcggtcggcgttcgccaagggcatggacgcgctggggtacaagaaggcccccgcgttctccatcctcgacacctgctacgacctgacggggtacaaggggagcatcccgctgccggcggtgtcgctggtgttcaagggcggcgcgtgcctcgacgtcgacgcgtcggggatcctgtacgacgtggacgtgtcgcaggcgtgcctggcgttcgccgccaacgacgacgacaccgacgtggccatcatcgggaacacgcagcagaagacgtacagcgtgctctacgacctcggcaagaaggtcgtcggcttcgcccccggcgcttgctgatccggtggtccggctcgccggtggagtgttagtacgtccgtgatttctcgaataactaattattcgcctgcatccgctaagcggtaggccatcagcgttgcggatggaagattatcctgtcagtaactgtcagatggtatgcttcaattgactgacacgcagtcgtctctggaatctggattgcacaaggtgtcattcttatccatctttcaaaaatcatcctcaataaaacaacgccttgtgaccnnnnnnnnnnnnnnnnnnnnnnnnnnnn

SEQ ID NO: 35459 - DNA, 473 bp, Setaria italica
  Peptide Sequence Number=SeqID_101433
aaggaccaaaaacaatacaaatgttaatttttcaaagtttcaccggaactcgaggacgaaatactgcaagattctcgttcaagttccttgaattttgcttcaactacatattctttttcatgcttcctaatcaaacatgagtaaaatgctgatagccacccatcttcctttctgaattgcagagaggccaataactcagattcttcctcacatgtcaacatataattatcaacaagacattcaagagcctcgtaacacagaggatcagctttaatggctgccttgtaccattggcgagcaagatcacggttgtctagtgcttcataggccttgccacgtaagaaacatatagctgatttgatgttgatctcatgatcttcagcatccttatcaaaataaatgtcactgtcatcatcctgatcaaggacctttccatgttcatcaattttgcatcccaagcatcaacaaacact

SEQ ID NO: 35460 - DNA, 265 bp, Setaria italica
  Peptide Sequence Number=SeqID_101434
tcctcgccgtcgaggccggcgcctccctctgcccttccgcgaccgggtgcctcgactggcgggcggggctggggcgctggctctacggcggcggcggcggcggcggcgacgcgatggaggaatttatgaaggaatggaggaggagtcacagggaagccaccctgctggatcccgtggtggtggaagcggcgccggattccctggacgcgctcatggcggagatgggcgccatgctggcgtcctacgacgcccggctcgacatggg

SEQ ID NO: 35461 - DNA, 617 bp, Setaria italica
  Peptide Sequence Number=SeqID_101435
acaagctacagataccatattgaaagttgaaacatcagagaaactgaagttcaaccacttcagtgcaatcggagtacatgtcccttgatcagttctaaatcagaaaagaaccgcaaaatgccatctttcttgatcaattgccactctgacatcggacccagttcaacaattggtccagcatgatcagaagtgtatagggtgtttgccagcaacgatattaacttactaccaaggaatatttaagcagtgctaagggtcttttacctcttctaagctaccatcattgcaaccttcaaccttgaatgaatggaaattcagaggttacaaataccattcatagagccgaacaacatctagacagatgttttgatatgcataaagaactcaagagccgaacagcatccaggacaccaatctctttctagaattgcatcagccactcacggcattgctcgtgcacctcgcccttatgtcgtggagattggctcttctgacacggtcctgttgatcgtgcgcagatagatgggaaactcaagtcagcgcggctccaacacaccggtggcagtcgccacgcagacgccgttgcctgtcgctgctccgatcagatcgacgaactt

SEQ ID NO: 35462 - DNA, 199 bp, Setaria italica
  Peptide Sequence Number=SeqID_101436
caacaacatggctgttaggttcctctctcaagtaagaatttgtaagaaacctgtatcaaattacatcatatgataattctggttctcaatgtacaggtatgcatatgatctggtaaaggagtttgaccagaaatagaacggcactgtagactaaaacttacagagccattatgcttaggagtaaatttctaaaagaaat

SEQ ID NO: 35463 - DNA, 448 bp, Setaria italica
  Peptide Sequence Number=SeqID_101437
gtttagtgaatggctctgtagctgcagtgaaaaggatggacaaggtttcaagacaagccgaagaagagttctgtcgagaaatggaactcttggctaggttgcatcatcgtcacctcgtaaccctcaagggcttctgtattgaaaagaaagaaaggtttcttgtgtatgaatacatggcgaacggaagcctaaaagatcacctgcactcatctggaaggaagccattaagctggcagactaggctacagattgccatggatgtggccaatgctctcgagtatctccatttcttttgtaaccctccactctgccatagagacatcaaatcgagcaacattctgttagatgagcattttgttgccaagcttgctgattttggccttgcacatgcatcaagaactggagctatcagctttgaagctgtgaacacggatatacgaggaacccc

SEQ ID NO: 35464 - DNA, 303 bp, Setaria italica
  Peptide Sequence Number=SeqID_101438
aaagcattggttccggcaactggtggtcccgatgctgctattccaaaagactcttcccagactcagatggataaatttgcctccctccgtgcttatcgtcgagctcgtggattgtgataagtgtgctgagaagtggcatcatggatagaaatgctcccctacagttcaattgaattccgtgcaagaactgtttgatttattttctaaggacgaatcctcaccagctgtggatactcctagctatttgggatctgaatatccagggcaactatttttggctttatctcaagatgccttagttgg

SEQ ID NO: 35465 - DNA, 247 bp, Setaria italica
  Peptide Sequence Number=SeqID_101439
gggtggtggtgcggcggcgccagcaccgccgtctggtagcgcgcgtccaagtccagctccgggttcatcgtcgacagcttcatcgacaggaactcgacctggcgctgcagcgactgcacgtagttgatgatctcgtccagcatcagggctttccccgtgatcttgttgcagcctggcacgagggactgcagcatcttcatcctctcgctaatcctctcccgccgcaccctctccgcgaggctgtggc

SEQ ID NO: 35466 - DNA, 993 bp, Setaria italica
  Peptide Sequence Number=SeqID_101440
gtacgttcacgtttttttagttttttttttttttgttcgcaaaaacaggaatatttccacttaaacaacagtttaaagttcttgaagttgtcaagatgctacatgtacatgaatcatccactggattaccactcggcaccggattttgccttttggaaattacatcgctactttatccacgatgatgcaaagcgcacaacaagagcaacaactgtgcgctaatggccaagccatgttgagggtaccggctgaaacctagacttcgcagttgatagtgcatcatggtaatcagccccgctgaaacagtcacggaagtcagtgaacagcttgtcatacaccctccatagcaccttatatgatctggagtatggaaatggaaggaaaaattctccttctcgtgcgaggtgttttaacagcaagaatgttttctggtttcttccaagccgtcaatgactgcaagccatatttcgaagaaagatcatgagccttttctcctgttttaccacaagcaatgaactgatcaatgatggtgccatgaagtatgctggaaggaggcatggcagggcgctcaagttgttcttttaagtagagataagtgtgaccaacaagctcatcaatctccccaccagatgggactaagttctcactgacatatagtgcttggaatctcctccttggggaacctctgggaattggcccaggccagcgtttctggagaccagcagatggccagttccttgcaatagcagtttgccacaagcaatctccttcaaatatgttggcccactgcttgttgacacatgctatttgcacccactcggagactggtaaacgaatgaatattctacaataagatgctctgggagcctaccaattggtccatcacttctgtctgtcatgggactggaaggaagaagaagcggcttccctggagcgccacaccggtcggtgggagagacggcgtcggcgaggaacgggcggatgagcggagga

SEQ ID NO: 35467 - DNA, 719 bp, Setaria italica
  Peptide Sequence Number=SeqID_101441
cgtcagcgagcctatatgacagaggaagggtcaagactgttaagtaatgttcctatgctcctcataacctaagacctgcagttgctaatgagctgtggtatacatatagttcatgaacacctcatttgctctagaactcatccacactaactttaactggaggattagcggttatacagatacattagctcttcttacgacgccagacaaattctataaaaaatattccactagtcaacatgatccattgcagcatatcactttgtctgaaattagttaaaagtaacttcattcttggggaagttgaacagaaaacctcaccaatgatggtgccatgaagtatgctggaaggaggcatggcagggcgctcaagttgttcttttaagtagagataagtgtgaccaacaagctcatcaatctccccaccagatgggactaagttctcactgacatatagtgcttggaatctcctaaaatgacccaagaaactattttcatttgatgttcacaacactagagctagatgatatccaaagagagcaacaacttgccagttctggtctagtgagtttgtatagcagaagccagtttttattttcgtttattcttcttaaaaggagaagtgcaatgacttcacttcaaagtcaaattgcctaaattaaatgcaaaagcctagagagagaagcatttgcggtgttttgaatgtttgaactaccaac

SEQ ID NO: 35468 - DNA, 253 bp, Setaria italica
  Peptide Sequence Number=SeqID_101442
gtcgggcttgcccctgtggccgccggcggtggagttgcgcctcctgtccacgctgggccgggagctggtgctgctccgcatccgctccttgaacccccggcacgactgcatgtgcgcgtgcagctcctgcggcttgaactccttcccgcattgcgagcaacgcggcaggggggccggcttgtgcgcgtcgcgctcgcgcccgtcgcgcttgccctgcttgtctttcccgccccgccgcgacctcgccttccgg

SEQ ID NO: 35469 - DNA, 608 bp, Setaria italica
  Peptide Sequence Number=SeqID_101443
cctccgcatcctcctcctccaccgccgccgcgcacccgcccaaatcgctcgccgtctgcaaccccttcgccggcacctaccgcctcctgcccccgctcggatccgcgtgggcgcgccacggcaccgtcctcgccggccccggcggcaccgtgctcgtcctcaccgagctcgccgcgctgtcctacacgccgtccggatccggcaagtggatgaagcatcccctctcgctgccctccaagccgcggagccccatactcgcctccgccgcagcagccgtcttcgccctatgcgacgtcggtaccccgtggcgcagccagtggaaactcttctcctgcccactcgccacgctcaccggcggctgggcgcccgtcgagcgcgccgcatggggagacgtcttcgagatcctcaagcgcccccgcctccttgccggagccggcggtcgccgggtccttatgatcggcggcctcaggtcctcgttcgccatggacgcgccgtgctccacggtgctcatcctgcgcctagatctggccaccatggtgtgggacgaagctggccgcatgccgcccaacatgtaccgctgcttcactggcctctgcgaggctgcttcg

SEQ ID NO: 35470 - DNA, 207 bp, Setaria italica
  Peptide Sequence Number=SeqID_101444
atgtaaggtgatttattttgtcatattagtttttttatgggccagaaggtaatggtagttttcccctctcagtactttggcaatttgcatagaataatgtaattgtgtatctttgttaatgtttgttttattttcaacatggcagatttaagctgtttgaattccacgtttatactgcttaaacagatcatatttgctaattgtttt

SEQ ID NO: 35471 - DNA, 531 bp, Setaria italica
  Peptide Sequence Number=SeqID_101445
gaaattatgcagaccataatgcctagaaaagctgaattgttgctttcacactgaaaagatatatagataaaaccattgtcaaaagcatggccattgaagttgagtacaccttaactatattgtctgaatacttcatcaaccatgataccagcagaccggtggaccctaaattgaacacaaccatccatgttgtgatagaatagccattaaataggcgctgccaccagggacccaactcaaatccagctttgaagtcaccataaattagccatcccatgttgaatataactccaaacctacgtatataattgtacattttgccagtacaaactatcgctgttcttcttcatcaagtactctgtgtagacaccagctagagctgaaagacaagcagaaagtatcccaagcatgtaaccctgtaatggtgctgagaaaagcgaatcacatggtgcatcgacaattactaccacctggctggtggttgcaccaacagctagcaaacattgccatccattgtagatttgacaactt

SEQ ID NO: 35472 - DNA, 795 bp, Setaria italica
  Peptide Sequence Number=SeqID_101446
agtgtttaccatgctattcaagatcacaggggatagtcaagaaatactcacagttgcacagtgttttttctttttttgtaaccaaatgcaatggtttttggtatgtgaaattacagacaatggacaagtttaagatatagatacctacgtatataattgtacattttgccagtacaaactatcgctgttcttcttcatcaagtactctgtgtagacaccagctagagctgaaagacaagcagaaagtatcccaagcatgtaaccctgcaatggtgctgagaaaagcgaatcgcatggtgcatctccacatcctttcacctggctagtagttgtaccaacggctagcaaaacaatcgccatccattgtagatttgacaacttccttttgaggacaagcctaaacaaaattccagtggtgacgattttcaagtttcccattatctgataggtagatggatcaacatatgtcaaggttgcaaactggacattgttgtggatgaggtatattactgaaggaacaagatatagtcggacactcctccactcctttgtcatccttggtggagatgaagattggcattccttccaaaggaagaaacttgatacagacaacttgaaaagttctgctaggaagggaatggttgcatagtcgtacttatatttgccattgctctgggagagagtagtcaatataccctgagagctggtcaggatggtgagaagagcagccaccaagtaccactgcatcgtcgcctccttcgacgccgcggcgctgtccgggtctgtacggagacg

SEQ ID NO: 35473 - DNA, 1472 bp, Setaria italica
  misc_feature (1)..(32): n is a, c, g, or t
  Peptide Sequence Number=SeqID_101447
nnnnnnnnnnnnnnnnnnnnnnnnnnnnnnnntttttttttgcaattgtaattatatttacaagtttgtatggattatcaggtatgcgcagaaaaccaatacattttccctaacagcagcgagagtaaaaatctttgccagcgtactttacaagggagggtgcgatggaggtagagatgcctgccattctaaccatatttacaaggtccaaagaaatggattgcacacatcccaaacaatcaacaaggctgcaaaacagaagcgatcctatgggtttctaccgcctgagattgcctcccaacttcccgcatcacatgacaggaaatcctgatacagcagtgaatgggcaccggtccatcgcctgttgcctgttgcctgttgcctgttgcgatacagaaatggacacgagggttccagttgctaagaataaggaagcttgttcaaagcttccgctgctgagtgatggcagctatttctgctgagtgatagcatcactgcagaacttcttgaaattttggcactcatcggtcaggaagtcatagatacgttcaaccatttctgcctgatcccatctaggactccagggatagtcatttatcgggggcgacgtaataggtgtcccgtcagcattacagtgctgagaactctgcaatgtgaggacaggttgctgctttgggaattgaagggggatagcaaagtgaaccagaaatgtgaaaattcctgaaatggacagtactgtagctctcttgcaaaaaatcggatcagcctctatcggtctcccaaaggtaggagccagtgcctcaataaaacgtcttctggcaccaattgaagctgatgcttcaacaaccagcaggttaagactttcttctaaggcaggaagatactccgctaaacacatcccgtttgaccatggagggagtttcacatcctcaactgagaaaagtgatttcaaatctggtgttgagattagtttgagtcgtggagcagaaggaacagaagagtaacttgaacttctactgattggaaaaatgacctgtagatggatcttttgaggtactctccaaggacatccttgcaccagtttggtaaagtcgaagtctgcgtccagaagtggtacagcaaatttcacctcatctggcctatcggcagaaggtaccatgcagacttcaataccctccttagagagaactgtacttagttcaaacgttactcttgcatcgtccaccttggcaacctgcttcttgtggtattcaacgtacaattcccggagctcctgtacgagagcaaggagtcccttggggtcgcggcagtcccagcatgccaagcagctcttatcgccatttccagcctcggcataatcgaccagcgggtggaacccctcgtcgtccggcccgaacaccacgtcgggcgccaccttgggagacagcgcattgtacacgacatcccagtggacgtagtcgaggcagaagggg

SEQ ID NO: 35474 - DNA, 725 bp, Setaria italica
  Peptide Sequence Number=SeqID_101448
gtaactagctttcttccttcaaccgcgaggaaggaaagaacccgcaccgctcacacaggctcccaacgcgcctccgccggccgcgcgcggttgcctcctctccccgctcgccggatccctctgccctccaccgcggcgccgctcctccaccgcttcatccaaccatgtataataactacgggaaccctcctgggatgcagatgccacagcagaattctcagcctggccagtttaacaatccattatatggtgcaagctcaggcctaattagatctgggctaggagtatatggagagaagttcttgggttccagttcagaatttatgcaaagcaacatcaatagatacttctccaacccacagtattatttccatgtgaatgatcaatatgtcaggaacaagttgaaagttatattgtttccgttctttcacaggggccactggactcggataagtgaacctgttggtgggcgtttgtcctataaacctccaatctatgacataaatgcaccagatctgtacatccctttcatggcatttggaagcttcatcattcttgcaggcttcacattaggtttcatgggaaagtttactccagaagctataaatctgcagtttacaagggcactcatcggatgggccttccagcttgtgatcctgaaaaggtctgctctactcaaatgggcgtggtgaggtgccactactcgacttggtagcatatggtgg

SEQ ID NO: 35475 - DNA, 489 bp, Setaria italica
  Peptide Sequence Number=SeqID_101449
gtcccggatacttcaggatagtgaaagtaggaaagaagccagcctaactaagcttagcatacctgtcaagtgtcaaatatacattgaatcaactggatctggtcttcgtcttggaagtttcaatcccttgtaccattgcttgcattttctttacagagatttcgacttcatcaagcttctctagtatcaaatccccaagtggaggctcccaagcactagctataggattcaaacttgtgctctgttggccatcagatggagctttcctgctgaaattcaggttccttgtgttcaaaagatggactagaacagccttcctgaaatcatgtggatgagaaaccccagttatttttacatcatcactagcaggctttctaacaccaacattctcaattctgatagaatatatcccaaaaaaggattacaagataaccttgctcaacaacaacatcagaaattgaagggaggataacatatttctccttcttg

SEQ ID NO: 35476 - DNA, 1337 bp, Setaria italica
  misc_feature (1331)..(1337): n is a, c, g, or t
  Peptide Sequence Number=SeqID_101450
ctcgggatcatgagcacgctcctcgtctacggcgtcctccaggaaaagatcatgagaattccctatggagtagagaaggagttcttcagatactcactttttcttgttttttgtaaccgcattaccacatccatggtgtctgcaatggtgttactggcaagtaagaaatccttggatcctgtggctccattacataaatatggtgttgtctccatatcaaatatactgaccacgacctgccagtatgaggccctcaagtatgtcagtttccctgtccaaacgcttgccaaatgtgcgaagatgatacctgtcatgatctggggcacaataataatgagaaagaagtatggtggaaaagattacttctttgctgtcatcgtaaccctgggttgctcattgttcattctatacccggcctcgatggatgtcagtccattcaacaaaggcagagaaagcactatttggggtgtttcactcatgcttggttatcttggttttgatggtttcacaagcacgttccaagataaactcttcaaagggtatgacatggaaatacacaaccaaatattctacacgacaatgtgctcctgtgttcttagtttaagtgggctgattctccagaatcatctgattccagctgtggactttatgtttcgtcatccagattgcttctctgacgtcgtaatcctatccagtgttgcaacagctagtcagttcttcatatcctacaccattcgaacatttggagctctcacatttgctactataatgacaactagacagctggtgagcatattgctgtcatgtgtctggtttgtgcatcctctcagctggatgcagtgggttggcgcagcgattgtatttggagctctgtacacaaggagcttcttcagaagcaaaccgcagaagccagcggttgcaagcccaccacgcggttctagcccgaatcctcctaacaacagttgacaaaataacatagaaaaaattgacttgttgctgtaccggaacgaagtctgtgtccgagatcaacggcgtcatgacaagttaactgggaagataaattccagatctagttgtgttactactcccggacctgtaggagatgaaggtggtcctatagtgttagtttagcatcatccagagaaaaattgttcaggcagcccagcctggattaagtgagctgggcttccaattttgtagctcagccattctccattgacatgtatcgcaatagtttccatgacaaaatgtattgttagtccgtagaaaattttatacccgcagcataagcattgtgtatattaatctatctttatttgtgagaaaatgtnnnnnnn

SEQ ID NO: 35477 - DNA, 701 bp, Setaria italica
  Peptide Sequence Number=SeqID_101451
acttcttatattacaatctagatagtttttggagactccagcacatgaagatgatccatctttccaggttcgtcttcagcttcacgtcgcatcctcctcccgatcttcctggatgggtggcaacagagctggcggaggcggccttgcttgttgagccagtactttgtgagcgcaggacagcagcaccttgacaccatcgagcagcttctcttgcagatccgtcttgtacaggccttcaggcctgttttgacagtataaagacccgatggtgcccaatccttgtttcatggatgcgtccaagatggcgaaggactgtaagaatagcttttcccgtgttatcaagttttagaccaggtcctttgatgtcgacctccaggaagaaaggcttccctttcactgcctcagttgctgcaatgtcccttagttccaaagctttatcccacatatcttcagacaactttttcttagggcatgtaacaaggtgagcattggcatctgcatatgaggccacttcattaattgcgatattaaccttctccaaagtcagtcttcccctcatgtacgatgacaacgaagcaagctcttcagttgagatgtaccagcgcggtgcaggtgctcttcctttcttgggagcagcaactggctcctccttaatcttcaactcacattcattatattgagaaacagattgtagtcttgtt

SEQ ID NO: 35478 - DNA, 321 bp, Setaria italica
  Peptide Sequence Number=SeqID_101452
gtctcagctctcaactagtagaagcgagttgctagcacacaccggcggcggccaagcacaagcagaggaggagcagcaatggcggaggcgaggcagctgcggtcgttcgtggaggtgccggcgggttcgcacttccccatccagaacctgcccttcggggtcttccgccggcggcaggcgcaggagccgccgcgccccgcggtggcaatcggggacttcgcgctcgacctcgccgccgtcagcgacgccgggctcttcgacgggcccgcgctcgccggctccccgtgcttccaccaggagacgctcaacatgttcttgggg

SEQ ID NO: 35479 - DNA, 629 bp, Setaria italica
  Peptide Sequence Number=SeqID_101453
gtggcggtggcggaggaggaggctgactaggccccagctccggcacttcattctcatcgtctgccaagctgtgcacctggtcatcctcgacatagaacctgactggtcggaaccccttctgaaaccatcggctctccatgatctgagccacggtaatccttgtctctgggttcgtgtcaagcagacgattcaatagactggtcagatccttggagaaccacctcgggcaccggaattcccccctgtatatcttacggtacattgccatgaggttctgatcatggaatggaaggtagccagccatgagcacgaagaggatgacaccgcacgaccatatgtccgccttggcgccgtcgtagccgcggcgcgcgagcacctccggcgcgacgtaggagggcgtgccgcagaaggtgtggagaagcccatcggggtggaactgatcggcgacggccgagagtccgaaatcggagaccttgagatcgccgcgctcgtcgacgaggaggttctcgggcttgaggtcgcggtggaagacgccccgtgcgtggcagaagccgacggcggagatgagctgctggaagtaccttcgcgcgatgtcctccttgaggcggcccttggcgacgcgcgcgaag

SEQ ID NO: 35480 - DNA, 1167 bp, Setaria italica
  Peptide Sequence Number=SeqID_101454
ttcccgttatacttgtttaaaaggaagtccagggaagaaaggatcacacttcaacccaagcagtgacctgttccaacctaatgaaaagaaggatatcataacatcaaccgcttcctggctggctatggttggtgtttggctggtctcacctttgtgatgggacctattcagatgctaaagctctacgctgtcccatacttggtatttgttgcttggctggatatggtcacatacttgcaccatcatggccatgaagacaagattccttggtaccgtggaaaggtgaatgttaacaaagcttccaaattgttagtgtttcaagatggttgtaatcttcaaaaactagggtatcatccatttttggttggttagaagcttttaaatgtttgcctcaattaagttaggacattattagtagaagaagattatatctgtttgtttaggatagtatcttgcatgttagtgaagcagactttggtgagttgcataatcataatacaccctttctacaaatggaagatgcataaggacataccctgccacaaacattagatgtgcaattgactctctccttttgatttatcttggatgaaactggatgttgtccatgacaccacttgacagatgttaatgttattgctggtatatacatggcagataatctgatatttaagatgtggtgtgcaaatgttcaacatgaccgtaaaactttaaatcagagaaaccctagtggtggatgttataaattaaaggtctagcctttcattggtcactttctggagtaagatctaattggaggatgctatggaagcatatagaacaaaaacgtcagtttcctcttttgtccttttaaggggaaatgatgtaacttcctattttttgtcgtctaccggagtatattgctagcttagcctattatatacttttcacctgcgctgaggttttcaagtgctgctcattgttgcttattgataccacattgtcttttgctctattaggaatggagttatctgcgtggaggactgacaacgctcgatcgggattatggattgatcaacaatatccatcatgacattggaactcatgtcatccatcaccttttccctcaaatcccgcattaccatctcattgaggcgactgaggcctccaacccagtgcttggcaaat

SEQ ID NO: 35481 - DNA, 268 bp, Setaria italica
  Peptide Sequence Number=SeqID_101455
gcccgtcggccaccgcacacctgacccgaggaacccaatcccatccgtcgcgaacgcagaagatcccgtcccgtgccagcctgcggcggcggcggcggtggactggactacaaagtagccgatagccacccattccatccaggccgcctccaccccgtatccaccccgtctcgcggcctccctgccgctcctgccccccggcaatggctcggctcgtgctatccgagtgctgcggcctcgcgccgctccgcctgcgcgcgggccgggc

SEQ ID NO: 35482 - DNA, 1530 bp, Setaria italica
  Peptide Sequence Number=SeqID_101456
cgctgccgcggcgcgggccgcggccgcggccatccaccgcgactgggcgctccgcgtatccgcgcccacgcgcctcacctcgacggtcgagggggaggacagggggagctccccgctgggggaggaggccgcgggcggggagttcgaccccggggcgccgccgccgttcgggctggcggagatccgcgcggccatccccaagcactgctgggtcaaggacccctggcgctccatgagctacgtgctgcgcgatgttgtcatcgtcctggggctggccgccgccgccgcgcgcctcgacagctggctcgtctggccgctctactgggccgcgcagggaaccatgttctgggcgctcttcgtcctcggccacgactgtggacacgggagcttctcaaacaaccccaagctgaacagcgtggtcggccacattctccattcctccattcttgtcccataccatggatggaggattagccacaggacgcaccatcagaaccacgggcacgttgaaaaggacgagtcctggcacccgctaccagagagcctgtacaaaagcctggacttcatgactcggaagctgcggtttaccatgccattccccttgctcgcattcccgttatacttgtttaaaaggagtccagggaagaaaggatcacacttcaacccaagcagtgacctgttccaacctaatgaaaagaaggatatcataacatcaaccgcttcctggctggctatggttggtgttttggctggtctcacctttgtgatgggacctattcagatgctaaagctctacgctgtcccatacttggtatttgttgcttggctggatatggtcacatacttgcaccatcatggccatgaagacaagattccttggtaccgtggaaaggaatggagttatctgcgtggaggactgacaacgctcgatcgggattatggattgatcaacaatatccatcatgacattggaactcatgtcatccatcaccttttccctcaaatcccgcattaccatctcattgaggcgactgaggcagcaaagccagtgcttggcaaatactacaaagaaccaaagaagtcgggtcctctcccgttgcatctatttggggtgctagcggaaagcttaaagcaagatcactatgttagcgataccggagatgtactctactatcaaactgacaagaaaatgacataaaccatagcaagtagcgaattcttcattcttctcaggggggctgtgcctgaagacttgaccaccttcctgggatttctgattggtgtgcctgagtccattgatatgtcgattcaagaatgtaagttggcaaagtattatcatgtaaaagggggtaaatgtagttctttccaatgatggaaaacggaggccgcctccgatgtaacaaacatgcaattctttggacaagaggtatattttatagtaaagagcgaaaaaagagcttagttacctgaaaaaattatgagtcacagtgagtactccacttatgtacaagggctactgtgcctagcttc

SEQ ID NO: 35483 - DNA, 351 bp, Setaria italica
  Peptide Sequence Number=SeqID_101457
caccacacatgtgatttagtatcccttctccttccttacccgaattcctcacaataatatccaggcctgaaagctctgcttttatttgttcgagcttcaccccaccaataccatttgctccatccacaattagtttcttggcaagctcatctccacctttatcttttggcactaattccaacatacgcctgaacgagttgataagttgtgtaaaataatctgactcggaagccttgatgcctttgtttttgcaccggaccatccaatgcagttgaggggtggtcaaaattcccatatcaattgcatgtgagccaactaccgcatttatcccctgcagtgcggcaccaagga

SEQ ID NO: 35484 - DNA, 1103 bp, Setaria italica
  misc_feature (1078)..(1103): n is a, c, g, or t
  Peptide Sequence Number=SeqID_101458
ttcgggtaaggaaggagaagggatactaaatcacatgtgtggtgctgactttgttcaaaaggagcgagttactcctcatggctttagctctgaagatcttggtgtcaggtgtgcaagtctggatggtgacgctgatcgacttgtctacttccgcatgtcatcagctagcgacaataaggttgatcttgttgatggtgacaagatactatctctgtttgccctgtttatcagagagcagctagatattatcaataaaaatggcagtcaagtaaacaaatcattgcctgcaaggcttggcatagttcagacagcttatgcaaatggagcgtcaacacagtttctcaagaaccttggccttgaagtggtattcactcctacaggagtgaaatatctgcacaaaaaggctttagagtatgacattggtatatattttgaagccaatggacacgggactgtagtattctcggaggatttcatttctcaactagagtcattaagcaacgagctctctcaagctgcaaatggttcagcacagtatcatgctgcaatgagactgatggcagccagtcagctgatcaatcaggcagttggtgatgctctgagtggtctgcttctagtggaggctattttgcagtataagggatggtcatttgagaattggtgtgaactatatagtgatttacccagcagacagttgaaggtgaaagttattgatcgaagttcaattgtcacgacagacgcagagacaaaagttagtcaaccttctagtttgcaagaattgatagataaggagactgccaactatactcacggccgatgctttgtgcgtccatctggtacagaagatgtggtacgggtgtatgccgaggcatcaacacaggtggaagccgatagtcttgcaaaatctgtagcacgccatgtggaacaccttcttggataaccatttacagtcttgtttgccattttgaccagattaaattttctaggacaatccctcctgcgtttcagtttgtaacttttacatcctcagtccaaactttcgaatttcattgttgatatgcacagaacagaaatcaannnnnnnnnnnnnnnnnnnnnnnnnn

SEQ ID NO: 35485 - DNA, 854 bp, Setaria italica
  Peptide Sequence Number=SeqID_101459
agaatagttaggacaaagaaaaatcattgaatcataatttacacacgatctatcaacaatactttcatgtttcgatggcgagcttgattccttcttttctaatcacagtgtgattatttatacattcatccatctgcacaaccacagtgtaccattggaaaaacaacgcaccaaaaccgtgctccaaggtacagctggggaaaaagatggaagggggaaaaaagagagaaaacaagctcaaagccctggatatcctcatcttcaggagctgcagacagcaaattgctggttcaatccactggatggctgcaccattctgctttggtggtggcaaggcatcactatggaactgaggagtgccttctcaacatcttcagaggcctctctcctcagtaaacacatcacatactccatcactgctgtatcgcaaggcagtgtgattctcccatcacttgtgaacccaaactcttcctgtgacagcttcaggagctccgtgaagactgttgtgcggaggtacgtgagggggatctcaaaccgcttcccatcagaagagtagacaatgcagttgcccttccctgcaactatgctgctgcaagatgggttgatctctttgtccacagttgtgaccctccttcgcccaattgcgcccattccctgccacttcttggacagctgagctagcttcttggagctgatcatggtagctaccttcctttggctttcaagcaaatggactcttgtctttgagatgaaatagttagaaacaattcaatcagtgtgtggtgatggtttttgcagctatcatgtatttatagggaacatatgtggtaggacttgggaagatttgcatcttg

SEQ ID NO: 35486 - DNA, 237 bp, Setaria italica
  Peptide Sequence Number=SeqID_101460
ggtgccggggcaggggcagagcggagtcgttggcgcggcggcgcacgagtccaagcggctgagccccggaggaccggacccccagcatcattaggcgatgatgatcaccgtggcgatgcgctcgcgggctccgcgcacgcgagctgccgccggaagatcggctcgtggtccatttcgcgtagtgttgttgttcgtgtatatgtttcaatttactagtttttgtacgtttcttgccct

SEQ ID NO: 35487 - DNA, 955 bp, Setaria italica
  Peptide Sequence Number=SeqID_101461
ttttttttttttttttaacaacaagactaccaaacaaactggacatgttaaactcaatccagttgagacaagaaccgactgtacattcagcacatggatcagtcagcttgatacttcacatggttgcagagcttccatagctaactacaagccctgaattatgtacccgcatacacttccacacatacaattaaggaagtgatcagctggatggatctcactgcaagcagcaaaccaaattgccacgtcaggaaacgggaaaaacaaggcctttcttttgtacagaccaattcacaccaaaacctcgtggttaattctccctttactcggattggttgcgccatttgagcatttagatacaactcatctacatcccaattcaagggcagctaaaacctaagataccatgagcagcttgcatacaataaccggtggatctactgacagcatcctccactttggtttgcattctcctgcttctgctttagagtgttcctcttgacaactgaagaaccttcctccaagaggcttggaacctcaagaatctttaatgcaagctcttcaaaacatttctccacgttctctcttgttttggcactactttcgagaaacagacagccgtattcttgtgctaaggcaagaccttcttctcttgtcaccactctgtcctcatccttgtccactttatttccaacaagcattttgacgcaatctttatttgttgagtgcatctctatttccttggtccacacatcagccaaattcgtgaaactctccctcttggtgacgtcgtaaactagaatgatcccatgagcacccctgtagtaagaactggtaattgtcctaaacctctcctggccagcagtgtcccatattgtacaaaatatctctagagaacttgaataggataagatcgacaatcaatacatccataatatcaggatgctttgaaaag

SEQ ID NO: 35488 - DNA, 353 bp, Setaria italica
  Peptide Sequence Number=SeqID_101462
tactaccaattaaactttacttaggtagttcttcttttttggcagataagccatcagtggaatttgcattaccactaaatctggtatcattgtgagtaactggacgatggtcctggtcgtaatcatgtattggaggtgcactggggacatcagacaacccatccaatttatgtgttgatttcacatcctctcgagcagggacatgagaagaatagctgtctggctggtatgctttcgaatttagaggcgtattgcggctgtaattctctgcagccgctgcacaagtcctctgaaccacattgtttgcttctcttcgggctgggccagtatgggagtactctgatgcataccca

SEQ ID NO: 35489 - DNA, 582 bp, Setaria italica
  Peptide Sequence Number=SeqID_101463
cgttgatttgctagtgctgaggtgtggatacaggatctaggtgttcgggtcgtgccgtagtttcgtgagccctggtgcgcccgggcgttgtattgttgatcactagctgttcgagcgatgtcgcatctggcgtgattgcattagacacgcaacttgccccgtttaactgatctgcactgtgtaattagctgcttcgctttgatttctgtagtataagtacagtagcaacatcacttgtgacagttggcactgtagactttggatatgatttgtttttatctaataagctcctcatgaaaatggtgactcaaccattagccttttttaatttgttttatcatttgcttgtggaatagctttgcttcacttattcaattgcttagtagcccatttcaaccattttactttcattgtctggttatgtatatttatgccttccgtggttaagttggcaagtaaagtactacctccgcatttaaatatgacaattcagactatgaatagttctttttttaactaattattctgtcctaaaaaccatatatttgagaaaggatggagtatattgttttacttcttcgc

SEQ ID NO: 35490 - DNA, 981 bp, Setaria italica
  Peptide Sequence Number=SeqID_101464
tccttccgagttcgtccacgacagagcaattattcaattgcacggcggcagtactcaccccctcgtcttccgttcgaaactgcatttcctccgccgccttcaggaagggatcttgaaggcttgaaggagtgggagctgaaccttgctggataggtaagaacaggcgatggcggaggaaaaggcagggaaggagaaggatgtggtgcggctggagcgcgagtccgtgatccccatcatgaagcccaagctcataattaagcttgcctacctcattgaacatcaatccgacagagaagaattcttgaagctgtgtaagagggttgaatacaccataagggcttggtaccatctccagtttgatgatatgatggaactgttcgctctctttgatcctgtgcacggtgctaaaaaactgcagcagcagaacttctcatctgaggaaatcgatacgcttgagcagaacttcctgtcctatttctttcaggtgatggaaaaaagcaattttaacatagtaaacgatgatgaggttgaacttgctcattctggacaatacctgttgaatcttcccatcaaagttgatgaatcaaagttagataacaaacttttgtcaaagtattttaaggagcaccatcatgaaaacctacctgacttctcagataagtatgttatatttcgtaggggcattggattggaccgcactagcaactttttcttcatggagaaagtggacatgatcatagctcgtgcatggcgaaagtttcttgagaagacgagattgcaaaagctcttctccagaaagaaaaatggtaagcaaaagatggattccaagaagaatgatgatctagccagtgaagtagaggacaaggagctatatgttgaacgcatacggcttgaaacaatggagttaagtttgcactttgcagcttgcgaaattaattggcaaggtcgcaattcaagagcctacatttgaagaggttattg

SEQ ID NO: 35491 - DNA, 181 bp, Setaria italica
  Peptide Sequence Number=SeqID_101465
atagaaggtttctgaagtcggaaatcgctaataaagtaaagtaaaaaaacaaaatggcaagcaggacattgggttaggggtagaaagtatatggttcggttagcaccaagttgcgatcgcaggatggtgccgtgatctagcaggaagagaggttacgattggcccaaggcaaaacagagca

SEQ ID NO: 35492 - DNA, 379 bp, Setaria italica
  Peptide Sequence Number=SeqID_101466
gctcctgtgaatcgttaatagaaaccgaagataatgactcctctgcaagctgcctgtaaagcactaatcttggcgatgctgatcgaagggtaagagaaaactcaaaaactgatgatagtggctcattgagtagtgtgcgggtgtcttcaacaatcttctggacacaacattttgccgtcaaacattcagagcctttgtccagttccttccagtggtcgataaaatcccaaaacagatccttccattcttttgaaagtaattcactggcttcgagcagcaacggcgtgccggcccacttggcccggagcgccacctgcacgttcttctgccgccggatctcggcccccgcgccgaccgaggcgagacatcccacgagcaa

SEQ ID NO: 35493 - DNA, 344 bp, Setaria italica
  Peptide Sequence Number=SeqID_101467
cgtctgttcgaacgggcatggcgagcacgcgaagcagctccgcgccctctccggccggcggcgatggagagacgggcctcgaagccctggccctagccaaggttgcagaggcagccgacgcgattgccgccgcggcgagtgctggagaggtggtccgcgcgatccacgccgtcgctgccctcctcttccccatcgactccgccgccgtcgccggtaccgtcgaggaacccttcaggacccagattattgaagctgtaagtgtcagcaatgatgaaagggagtcttggaggcgtgccttttaatcaatggtccaagacaatttacctaactaatgtctaaaatat

SEQ ID NO: 35494 - DNA, 447 bp, Setaria italica
  Peptide Sequence Number=SeqID_101468
ttagtaataccaagaccgaaaggacaattggagtaaacgaaattaccaactactcgtttaacagctgggcaagcatagcatctgcactctcagggccgtcattgttcacgctagggattatgtgctccggtgatatgaacttgacaaattcttgcagttccgtgaagctgctgtgttcactgtacggcacttcatatctgatgattgatccttgttgccaccttttgccaggtgtccttttcttccctttgccaaatgcccaaccagtcgggcagaatgccactatgaggtcaaaccggccagcatattgattggataaatgtttcatccgcttgaagctcgctagagtccacatggggacaacatgtatgtgactttctgcttcattggctgtaaaccaatgcatgatttcctgaggaagctctaagtgtttcaattatttgcagt

SEQ ID NO: 35495 - DNA, 248 bp, Setaria italica
  Peptide Sequence Number=SeqID_101469
tacaacttagctagcagtcgggtaacctggccgggagcgtcttgttcgattccagcatccaaccaaacccgtcgtcgtctacttcgtctctgcttcgtctagaagcattcatcgaagttttagcagccgtatgctgctgcatcctcctatgccgagttacggagttaggctcgatgggccagctggaaatgatgggttgattctccttaggccacacgtgggtgctcctggctatagagtgcttgtgt

SEQ ID NO: 35496 - DNA, 475 bp, Setaria italica
  Peptide Sequence Number=SeqID_101470
tttttagcaattttaaagataatattatatatagaaatttttatgataataagaagtaaatgactgtagtgttattgattggcagtgaaatttaacattgacatgcactacatgtgaaatttgagaaagaagggtgttgctatggtgtgtaaagcttgctggctttgctggtcttggctctagacgcacccgatttacaggtgttgggttttattgtctggttctaaaacataaacgatgaaactcatttttttcgctaaagtacatgatcttatgaatctatccctgtaaggtgtaatagtacgtgcccagtatgtttatatggccttcagacttctttgtttgtttcttcagttcagccatttgatgggagcacgcagtttccgaacttcggtgcctggttgacgatggagccggcgccagagaagtcacatgtccctgccgcacggcctttgcgctggtagtagctgttgaa

SEQ ID NO: 35497 - DNA, 375 bp, Setaria italica
  Peptide Sequence Number=SeqID_101471
ccacacattatttcactctgaaatggaaggagtaagagaaagcatcctttgaaaaaaatgatattatggagacaaaaaacttcaaggtctgacaagcaagtgaccatgtcatgctcatgcagcgaagacatccattttctgaagaagcggatcggagcaaaactacaaaaagagatggaatcctaacaagacaatgtgttcaacatagcaagagaatatttagggatttggatgcattggaaacaccatgccgctagctctagcaagcattaacatatagctaactctccaaaggtgtaagcatctcgacactaaaatataggcaaggtacaacatgaatatggggaatgaagctaacttgctagagttcatacg

SEQ ID NO: 35498 - DNA, 247 bp, Setaria italica
  Peptide Sequence Number=SeqID_101472
atatactgccaaacctgcattgtgaaatcctcaagagctcgagttcccgttgcccaatatgccggcgctccttatctaaagaggacctcttccttgctccagaggtaaagcattccgatgaagatggagcaggcaaacctgtgtctgacagacccctctcttccaaggtgcaagccctactgaagctgctgaagacttcacagaatgaagacccctcgtcgaagtctgttgtttttctcagttcaag

SEQ ID NO: 35499 - DNA, 465 bp, Setaria italica
  Peptide Sequence Number=SeqID_101473
attaattgacaagttcaggagtaccgttacagcactttcttgcgtgctgggatctgcagaataaagaagactcaccaagaagggtatagcaccgtggtttgcaatggcaattctattctccatgctgtgcctagaaagaatcagcagctctcctattgctgatctttggagctcagtagactcatttttcaggtcctcaataagtctacgaacttgaacatcgacaccgggagaatcggatcttgaatccgctggaacagctttatctgatagttgacgccagactaattgacttctagaacgaataccaccaaaccttggcaggcgattcggttctaccattgagcttgtgaccatttgatcatttctagcagtttctgatgcactgctgttacttgagacctgttcctccttatgcttcgcgacagcttcaagatggttgctgctcctcgaaaaagttacctt

SEQ ID NO: 35500 - DNA, 1173 bp, Setaria italica
  Peptide Sequence Number=SeqID_101474
cagtcgtaattacatcagaaggtacacccggggtactccgtcatcatctgaatctagcgtctaatgaccttgccaacttggcgttggttgcgaaaaaagctcagaagaacctgtgccttctctcttgcacgggccgtgcctgattgcgacaacgccaccaaaggcggcatggcgccttcctggagcaccaggctgcagaacttgctgttgttggtgcagagctgcagcagggcagcggcagcattctccttcgcccttgctgagcccagctcgaccacctcaaccagcacgggaataccaccagcctgagcgatgccatccctcccctcctgcaccgtggcaaggattgaaaggacggagacagccttgtcaaccatccctgctgcagggtccatgagctccaccaggggctttacagccccggcctcaatgattcgggccttgttctcgtgaaatatcgataggttgaagagagccgttgctgcatccttcttcccctgtgcattcccatcttctagcaagtctactagtggtttaattgcgccggagcgtccaattttggccttgttttcttcatttactgaaaggctgaagagagtagcagctgagtttgcttttgcttctgggttacccgtctcaagaacgtggatgagaggctcgatggcgttggcacatgcgatggcgatcttgttgttgtcattaattgacaagttcaggagtaccgttacagcactttcttgcgtgctgggatctgcagaataaagaagactcaccaagaagggtatagcaccgtggtttgcaatggcaattctattctccatgctgtgcctagaaagaatcagcagctctcctattgctgatctttggagctcagtagactcatttttcaggtcctcaataagtctacgaacttgaacatcgacaccgggagaatcggatcttgaatccgctggaacagctttatctgatagttgacgccagactaattgacttctagaacgaataccaccaaaccttggcaggcgattcggttctaccattgagcttgtgaccatttgatcatttctagcagtttctgatgcatctgagttaacttagaagaacctagttacctaccttaatagacttacgacgaacaagacttacaaagaataggttagactagactacgaa

SEQ ID NO: 35501 - DNA, 593 bp, Setaria italica
  Peptide Sequence Number=SeqID_101475
ttaatttttttaatttttgttcttctaaccttctggtggaaaccttcatgacgggccttcctcacctgtctctgtctattgtgctccatcttctgaaaaggagcgtaagatttccccaggtttagttgtcaaggttcctgaatttccagatgatgatgatgatgacgacaaagtggaggaagagaaagaagcagaagttggtgatcatgatgattttaatgcacaatatgatgatactctgagcaaaagcattggtgacaacaccaagagcaaaaaacctgtatctatcaatggtgcattggcttccgcattggaggcgttactcacttccaccaaaggaacatcatcttcaacacctgttgtttgcacagccagtgatttaagtgctgaaaatactaatgattccgtgagttgttccctttctcctgaaaaaatggacgagatgtccgctaaagatcgttcagccgaccaatatctgggtacatctggtaatgcaaatttggttggtaccttcagatcttctcaggaaataaacgtaactccacatacttctctctcaaaggaatgttggatggcaaggttcagataaacgg

SEQ ID NO: 35502 - DNA, 225 bp, Setaria italica
  Peptide Sequence Number=SeqID_101476
accccgagtcccaagcccccgaccctcctgcactcctcccctgcaacgcacccacccatcccgatggcccaggccatggccgccgcctccgagctgatcagcaccaccctgaagcgcccgttcgggagcgacgggccactcggcgacgacaacggcggcggcgcgctcgcccacgccgacgagaagcccaaggcgcgccgccgggaggcggaccccgcggcggcg

SEQ ID NO: 35503 - DNA, 218 bp, Setaria italica
  Peptide Sequence Number=SeqID_101477
tcaagttatgcagagtggatattgctgactttgaaataatgttgcaagctgcgtttgcgccaaagaaagaggttcaaaggtggaacaagcaggatctgcaggcagctttcaggatggccatcaacaaacatcctggcagtcttgatagtagaattcgacctgtgtgtagtggagtcgggcaagtgactactacacattttaatgttctgtagaagatg

SEQ ID NO: 35504 - DNA, 354 bp, Setaria italica
  Peptide Sequence Number=SeqID_101478
ggtaagaggggacagattctccgtgtcgtcgccgagttttgtccggcagagagggcaagggcgagcagagcagaggcggcgagatgactcatatccttcccaaccccgattagatctgcgcgttttcatcatctcttacgtttgattgcttgatctgttgttgtttcgattccgttcttgctctgttgcttcctccttgactcggcgcgcacgcggcaaccagagggaacgcgaccgtgagcgcgcggcggcgcggaagcccaacgccaaggggtcccagggaacgggactacaaccccggaagacaagacgaccgacgaaagaaaggtaagaacgtaagtaacaaataacgaa

SEQ ID NO: 35505 - DNA, 703 bp, Setaria italica
  Peptide Sequence Number=SeqID_101479
cacaacccagcatcggctgcggcgcatcaatccccacctcaaattgccccccatgggccagcgcctggcgcggaggagagagaggaagaggggacagattctccgtgtcgtcgccgagttttgtccggcagagagggcaagggcgagcagagcagaggcggcgagatgactcgcggcaaccagagggaacgcgaccgtgagcgcgcggcggcgcggaagcccaacgccaaggggtcccaggacgggctcaccccggagcagcgccgcgagagggacaagaaggcgctggaggagaaggcggccaagaaggcgcagcaggcggcgggcggcggcaccgggacctccacggacaacaagaacaagggcggcggcaagaagtaggggccgcactgggcgcccgcggcgcaactctgtacgattatcgatgccattagcttgtgtgccttcgcatccacgtagatgcgatgtttgttgggtcataaactcattcgtcgtctgcaagcttgcagttactctgatacatcatgaatttgtgatggcaataaatacgtggcgttttggttttgtgggttatgttctgtttgcctttgcgttccgtggtctgtgtgattgtgctatcgttggacctcttgagtatcacaactagcatacaagatgcatgataataagagatgtcttgctacttgtaagcatctgtctaaaa

SEQ ID NO: 35506 - DNA, 504 bp, Setaria italica
  misc_feature (402)..(504): n is a, c, g, or t
  Peptide Sequence Number=SeqID_101480
acatagaagtgctggagcgtgagaaggcaatgctgctgcacaagatacacgagcttggttccgaaatcattagaacatcatcaggccctccaaggacgccgtactaggttttgtttcttgatgaaagaatgcgccccactgaacatatacgtatgggcaggccaagacctcattacacatagaactctttgcttcgatctgcatatagtacaagtgaacattatagttttgtaagtaggccaggtagaaagtaaagagaaagtagaaataaggaataggaagacttaactgaagttgccccactaatgtacatgaagcctgaaatctgaattgatgatccaacggtcagataaagagatgatcctgtaaacctgcaggtgaacaaaaaaaaaaaaaaaaaannnnnnnnnnnnnnnnnnnnnnnnnnnnnnnnnnnnnnnnnnnnnnnnnnnnnnnnnnnnnnnnnnnnnnnnnnnnnnnnnnnnnnnnnnnnnnnnnnnnnnn

SEQ ID NO: 35507 - DNA, 427 bp, Setaria italica
  Peptide Sequence Number=SeqID_101481
ggatgcgatatcaaatcttgatggctctatgagttctcaatctcatttgttctaactgtttttttctacactcgtgtcttttaagattgatttctcacattgccagaaatccattcatctacttgtatgcattttttttgttgaggtgcaaagctcctgctggttagagttctacgcatgtgttttctttgatgaagccgtactgtattcacgaaataactgaagggctgcatgctatgctgttggcagtatatcatgttacgccggatagaaagaaggaacaatctgaatctgttatccgaaaaattctcattttgacgtctgaatcatcttatggtggaaaagttgtgatccacacggtggcagaggtgatggagagggtcactggcgaggtcgccgacgcattccctatcaatgaaaatctcaa

SEQ ID NO: 35508 - DNA, 1815 bp, Setaria italica
  misc_feature (1413)..(1413): n is a, c, g, or t
  Peptide Sequence Number=SeqID_101482
actagggtaggtggaagtaggatgatagttgtgcgacagaaagattacgtgaaactggcaatggaaagaatctgttaccaagtgttcaagtttccaaatagctaggtcaggaaccactgccgtggccggttccacgtgtgccagccgagctgcaccgatcacctgctccgggagctcctcgtacgtgttggcctaaatatacaatagatcatcactcctttgctcagcaggtaagaaattaaagaggtaagtaattaaagagtttctaactagtacctgtattaggaaggccatgtcaactactaatgttgtgaccacaccaaagacaaggcccagaactccatttgctaccgccgaagatccaatgtcaacgtccacctgataaaaaaaacaccatcaatatagagtagatgaaaatgagacaagaaaaggttccaattactacctccaggtatccaggaccgcgaacatagctacaatctacagcttttcccaacaaacaaggggtgcttccgacactctgccgcactatccaagagccctgaacaacttattttcattattatgctgttatcaaatatgaatcaccgggaataaatattctctgggaccgagagttactaccagaccttgggaacggaaggtataagcttcagtctgctattgcggaactcatcatcgccgtcaaagaaacgctggagtaacgatcccttcttcaaggaactcgctacaaaatacatgaccaagctgtactgggtcgatccaggaatctacagtgcaacatgacagtatcaaacttcacaccaaatttgcttcaaatacatcaataataaatgagatatatattccctacaatttacctgtatgtttacaacaaatgtatgcatccctttctcagcagcaacctaattaacaaagtgccaaaagtaaagtactccacattgtatatattggacctatttcgatgaggccgtgtaactaatagtggacaagaaaccacaaatgtctttcacattcaaaaggattgcttacctgagcaacacaacctttctgcctggcaacgttatccatacgctttgtgtccttaaaccaatcgatggctgcgagctccatcaaataactcgctgcaggtatctgtgacttggatgataccagagtgttaatgttctttatgctatctctccttttttttttagaaaaagaaacccggttctggacaccatctagaatgcatgcttcaatcaaaagcaataaagcaaaagctggaagatttagacctttgatttgtcctgtgggaagttcttgctacgaactttaaagatcttgctatcgggtactgtccaacagttgcggcttttctcatcagcatcacggtgaagaatcccggaaaagcaagataaatcaattttttcnggaggatcatctgcagtaatgattacactgtcacagttatggcatgtcctggggaacttcatagcagatatgacaatacaagcatgtagagcaacatggggaaccatacctgtgcgcttagcatcactgtcagatttgttcggatcttcctgtacattggttttgatcaaggtttagtatgatgatagaaaacatttgtaagcttgtagggtttgcttcagggtgaattgccactctattgagtgttacatactgaattatcccaacttatactaagtaaagcaatcatagaagtttgcttgtagtggggtctagtagagtaaacacctctagatcagcttcaggaacttgatactcatcatcctcatccgactcttcgtcaatcattcccatgcttctatt

SEQ ID NO: 35509 - DNA, 674 bp, Setaria italica
  Peptide Sequence Number=SeqID_101483
gtgaggtgcaaagctcctgctggttagagttctacgcatgtgttttctttgatgaagccgtactgtattcacgaaataactgaagggctgcatgctatgctgttggcagtatatcatgttacgccgaggtgatggagagggtcactggcgaggtcgccgacgcattccctatcaatgaaaatctcaaggaggctgccaaagcctcgaagattaaggcggtcaccgatgtgatggaggaagatgctgagaaagccaaggctctgatccagaagttgccagtgtgagggatggtggtcgtgctgatggagacgatgacgggaagtggcagcaaaggaggttgccgctagctgctagcagcacgccagcatggagcttgctctgccagcatctgggtggtggaagtaggatgatagttgtgcgacagaaagattacgtgaaactggcaatggaaagaatctgttaccaagtgttcaagtgttcaaatagctaggtaggcattctattttttgacaattatttgtacttctgtttaaacaaagtgaatgcttctattatacatgttacaaaaaattatacaatgaaaattaacgtttatggaaaggatttgtttcgcccgtaccaacgcacgggcatgataacctaaaaaaaaaaaaaaaaaaaaaaaaaaaaaaaaa

SEQ ID NO: 35510 - DNA, 950 bp, Setaria italica
  Peptide Sequence Number=SeqID_101484
actttctaaaagcataccttactcattgaaataacatggatcaacttattgcagatctattgagggggatttggagatgttgtctcaagcaaaaagaaggaagtgagaagttgcttggacaaattgtgcctacattttgtttgctttcaggtttaaatttctgatccatagtatggtggtaacatgtagatcattaccatgtagacatagttaactctgcatcaggagcttacacctaaagttgtttgtaattattagatgtagttaactctgcatctccacatcactgtttccgcctaaagtttacaaggaagcttgccacctaaaccatcatttctatgtcgagttgccggctgtcatgagatttctgttgcatgtatccttctaaaccaatcaggactgttatccgaaaaattctcattttgatgttctgaatcatcttatggtggaaaaggtattgcaagatggtcatttctctgcttatcttgttccagtctatgctcgtagctgaagtaagaaattggactgaatttaacttgcttcatattgtactggctctaagtaaaaaaaggtttggttgtttaactcagtctatcagataggttatccttggcatattgggtggtaaacatttgtcctggtggaggtaatgtttagaattttgtgagcacctaatcggtggctaaaccaaagaaagctgtatttcctatattgatatgataatgtcagggaagctaatcccagtgctctgctcaaatagctcaaggaaagctgatcccaccgcttataatcctctattttcatttgggtgttataaaacctgttttgtgtcattatgtcttaatatagtgcccatccaatacctgttgctctgggttacccacatcttggttatttcatttattggcataacagtcatttgataaattggatcaataattttagtaact

SEQ ID NO: 35511 - DNA, 1669 bp, Setaria italica
  Peptide Sequence Number=SeqID_101485
ccggagatgacgcaggtggccaacgaattcgatgacgataaggttctccgtgagaacatagttttgatacttcacatctgttttgagaacgagcaactttgtattcaaatggaactatgtgattgttgtctatctgtgaatctaaaccagccactgaagcattgggaagccttggaacttctgtatcaggttggagaccgtttagtactttagtaattactaactttttttatttcttcttgatcacttatcaaatgaatacattcatctttacttccttcatatctaatctaagccacctacctatttaatatttgactgtaaaaagattactttattgtagtatgaatttagatactgcattgacctccgttagaaaggattggtgtacttgtttcaccaaatatgggctgtaattggccacccacaatttctgaaagaacaagtcaacaaaaaaacttgccaaaacaggaggagcgatcatttcaagaaccatgatctttagtactttatgttaaagtttattatttagttctacctttattgatgatacggtacttggttaattcttttgtctgaagtctgaactgcctgacctgtcctacttttataaatataagtggggcataatgctcttgctgccttgtcggtaccttttgcctatgcaaggaatgtgagagcaaggtgagcttctaccctctctgtaagatacttcccatggagatatatatgtaggatataatttatatacaaatatgactatcttactgggtatttctatgttaacacattaatctataattgtagaacctatgtcaaattacaagtctgcaatgagttataagctgttctcttctagcccatttacttttaaacctttgagaattggacaatgtttcggattgccacacattttttaacatcatgaactgtaattgaaattatctacaaagttagcttcttccgataagataaaatgttgtggtattggctatacgcatctttactaaataacttgcgattcattggttttctttgcaggatttaaggcttggaaactttttttttgcaaaactgaagcataaaagcaagcacatttggcaggaaaaaataattaagaaagatttcttttgtacaaattcagttttaatattatgtctgagtagataatttcctcctgaaacggaatcctttaggtcctgctccggtgcatccatcaaaattaccagtgtccatcttacctattagagaatgcttgcagatgaactgattttggtacttgattcatcatttggagattttgtctcatgttaaaaagaaggaagtgagaagttgcttggacaaattgtgcctacattttgtttgctttcagttgggatccacacggtggcagaggtgatggagaaggtcactggcgaggtcgccgacgcattccctatcaatgaaaaatctcaaggaggctaccgacgcctcgaagattaaggcggtcaccgatgtgatggaggaagatgctgagaaagccaaggctctgatccagaagttgccagtgtgagggatggtggtcgtgctgatggagacgatgatgggaagtggcagcaaaggaggttgccgctagctgtcttagtctaagttacttaacgttaccttaagttttaattttaggtttaaa

SEQ ID NO: 35512 - DNA, 1435 bp, Setaria italica
  Peptide Sequence Number=SeqID_101486
aggtcaaggggatttaatcctgtcacatattcctctgatgaggtgcttgaggatgcgatatcaaatcttgatggctctatgagttctcaatctcatttgttctaactgtttttttcacactcgtgtcttttaagattgatttctcacattgccagaaatccattcatctacttgtatgcattttttttgtgaggtgcaaagctcctgctggttagagttctacgcatgtgttttctttgatgaagccgtactgtattcacgaaataactgaagggctgcatgctatgctgttggcagtatatcatgttacgccggtaagtgcactctgaccactaaactccagtgtccaattccttccacttgtctcagaactgcagcgtgaattttttgcgcaatcactgatatgattcgattggtcccacacctttggattttcaaggatagaaagaaggaacaatctgaatctgttatccgaaaaattctcattttgacgtctgaatcatcttatggtggaaaaggtattgcaagatggtcatttctctgcttatcttgttccagtctatgctcgtagctgaagtaagaaattggactgaatttaacttgcttcatattgtactggctctaagtaaaaaaggtttggttgtttaactcagtctatcagataggttatccttggcatattgggtggtaaacatttgtcctggtggaggtaatgccagggaagctaatcccagtgctctgctcaaatagctcaaggaaagctgatcccactgcttataatcctctatttccatttgggtgttataaaacctgttttgtgtcattatgtcttaatatagtgcccatccaatacatgttgctctgggttacccacatcttggttatttcatttattggcatagcagtcatttgataaattggatcaataatttttagaactcatctggaaatagttgtgatccacacggtggcagaggtgatggagagggtcactggcgaggtcgccgacgcattccctatcaatgaaaatctcaaggaggctgccaaagcctcgaagattaaggcggtcaccgatgtgatggaggaagatgctgagaaagccaaggctctgatccagaagttgccagtgtgagggatggtggtcgtgctgatggagacgatgacgggaagtggcagcaaaggaggttgccgctagctgctagcagcacgccagcatggagcttgctctgccagcatctgggtggtggaagtaggatgatagttgtgcgacagaaagattacatgaaactggcaacggaaagaatctgttaccaattgttcaaatagctaggtaggcattgtattttttgacaattatttgtacttatgtttaaaacaaagtgcggcaatggaaagaatctgttaccaagtgttcaatagctaggtaggcattcta

SEQ ID NO: 35513 - DNA, 658 bp, Setaria italica
  Peptide Sequence Number=SeqID_101487
caccattatccaagccctatttaaccatgcgaggatcatcaaattatgatgaaataaatgtcaacaagcaggatttgcattcttagttctgcccatgacctgctcatgcagtgttatcttctgtgaacctgcagcattcttcctttgttggtaagactgcatgacttcatctttggcccaatggtcacacaacatttcccatcattttggtttatccatagagggacgaatggtttccatttcagcggatcttcatgctcgagaaccaccattgactcatctcgttgctctttgtctgaatcttctctaacatcatcctcttctagctccatttctccacgggccctaggagctggtgaagatttcttgtccttttttgctgctaacacctgtctaatcctttgcctctcgtggcaaaagagattaactactgtctgactgcctttcggttaaatatcttttgacactcctcttcatggccaggggaccacttgtagcatttaaggaattcatccaatatagttactcacaaggaattcatccaaaacatgcccttgtatctggtgggcattggtgccagtggtaaaccacatgttcacaggattggccatttccactggtatcatctgatacatagactcccaggatagttctgctt

SEQ ID NO: 35514 - DNA, 489 bp, Setaria italica
  misc_feature (1)..(48): n is a, c, g, or t
  Peptide Sequence Number=SeqID_101488
nnnnnnnnnnnnnnnnnnnnnnnnnnnnnnnnnnnnnnnnnnnnnnnnttttttctttggactcaaaattgttatttctgttggcccaacgcagagaaagataaagtagtaaatcatcacaggattttcaatatcatagtttcagactgtttttattaggaaaaaaaatagccgattcatacgtaatccaagtagaatcttttgaacaataatcaagaattaacaggcaaaagcacatgttatgaggtagcagcacatattttcgggaaaacttttctgctctgctcaccatgtgtgctactcagtgaccgccaaaacattctcaatctgttcaatcagctggttagcaggcaatgctccctcaaaacgatggcaaggtttcccgttcttgaagatgataaaagttggcaatgcttcaattctgtaacgatttgcaatgcttgtgtacttctcagtatcaattttcacaacttgaatcttgtcgcttaa

SEQ ID NO: 35515 - DNA, 663 bp, Setaria italica
  Peptide Sequence Number=SeqID_101489
tttatcaagaaatgacgacatcaattccattccttcttcattcagtgtcaaagaataatgtacatcccatttgtttctttaaacaaaaaaaatgtgcatcttgtgtgaaaactgaaaagaaaatgcgccgttactcttatcctcatttcagattcttcatgatcagaacgatagcttctttccaccaggacgagacgagtggccctcaaatcatatcactcgtcattaccatcgccacagtacatgtgtgctactcagtgaccgccaaaacattctcaatctgttcaatcagctggttagcaggcaatgctccctcaaaacgatggcaaggtttcccgttcttgaagatgataaaagttggcaatgcttcaattctgtaacgatttgcaatgcttgtgtacttctcagtatcaattttcacaacttgaatcttgtcgcttaacttttcactcacttcttgaagtatgggaaccatgtattggcatggaccacaccaagttgcatagaagtcaactagtaaaggcttctcagacttctccagcaactcatcaaatgaagaaaatgtttgcttcttagcttccacccggagcgcggctgaaccccgcctagaaggcccggtggtcccacgcctgaggccaagggtcggcggcgagcagcggagcg

SEQ ID NO: 35516 - DNA, 283 bp, Setaria italica
  Peptide Sequence Number=SeqID_101490
gaacagtcgacggctagaccgccggctcctccttcctccctccctcccaaaatcctccgctggatcctcccctcgctgccgcgccgccgcaattcctcccggggcgcgccggtcgatccctcccggcatccttcttgttagctaaacaatgaggcagcagactggtaaacgtccccgccaacatagggaatatgaaagagaagaaaggaaggaccaaaacaagaggccattttcccatgctcaggaaagctctaataatgatgggctggttgtttaccgtatt

SEQ ID NO: 35517 - DNA, 395 bp, Setaria italica
  Peptide Sequence Number=SeqID_101491
gtgttctagagggggaactatccaacataagcaatgacaatgctagtgagtcagatggttccagggttataatggccatcagacactctagcaggcctcattatggagtgcagtttcatccagagagcgttgctactcattatggaagacagatttttcaaaacttcaagaagatgacaagagattttggattgcactcatcatggcttcaggaaacaaaggttcacagtattggtaaactggaaaaatctcaagtactatctgtggtgaagttgtttgatacaaatcccctttatgcatcattttagtagacatttctgttgttccgcaggtgaattctgctggccaatgtggttctgtctcccatgatttgttgcatactgaaagactggaac

SEQ ID NO: 35518 - DNA, 671 bp, Setaria italica
  Peptide Sequence Number=SeqID_101492
agaaactagaatagtcaagtacccttaccttcctgggatcgttggacaacaactttatggcaatccctctagaacacagtatcagttgtggggaactatccaacataagcaatgacaatgctagtgagtcagatggttccagggttataatggccatcagacactctagcaggcctcattatggagtgcagtttcatccagagagcgttgctactcattatggaagacagatttttcaaaacttcaagaagatgacaagagattttggattgcactcatcatggcttcaggaaacaaaggtgaattctgctggccaatgtggttctgtctcccatgatttgttgcatactgaaagactggaactccaggagcctaacggggcttgcatgcttgcacagagagccattgggaaaaagtgtttacggttgcgatggaagaaaatcgataggttcctttgttcctcagttggatcagaagacatatttaccgctctttttggccatcaaagcggtgaagacacattttggctggatagctcatcagttgatcagaatagggcacgcttttcattcatgggtggtaaaggtggatccctatggaagcaaatgacattccacctatctggtcaaagagccaattgtggaggaacccttattatccgagatgcttgg

SEQ ID NO: 35519 - DNA, 1713 bp, Setaria italica
  Peptide Sequence Number=SeqID_101493
aattttggtgattgcaggatcgttatcgacaacgagtcctcagcagaggccacgattgtcagggtagacagcgcaaatgaatatgggatactgctagaggtgatccaggtcatgattgatctcaaccttgtcataggcaaggcgtatattacctcagatggtggatggttcatggatgtcttcaatgtgacagataaggaaggaaagaagatcaaagacgatgtaacccttgcgcagattgaagactacatcagaaaatccttgggtgcagattcaagatacataccttcacgccggagatcagtaggcgttgctgctgcagctgaccacaatgtcatcgagttgatggggacagaccggccaggcctgctctctgaagtcagcgcggtacttgccagcctcaagtgcaacgtggttagtgccgagatctggacccacaacacaagagcagcagctgtgatgcgggtgaccgacgaggacactgggctggcggtcacagaccccgacaggctggagaggatcagggagaggttgtcatacctgcttcggggaggtgacctgtcccggggagccgccatggcggtgtcatcggagactgccaccatgcacactgagaggaggctgcaccagatgatgcttgacgacggcgactatgagcagctccagcggcaggccccagagcagtctcagaggcctaatgtcaccgtgaggaactggaatgacaaggactactcggtggtgaccatccggtgcaaggacaggtcgaagcttctgtttgacacggtttgcactctgacagacctgcaatatgttgttttccatgcaaacattgatgccaaggataatcaagcttaccaggaattctatgtaaggcatgtgaatggatcaccgatgaacactgaaactgagagattgcgagtcatccagtgtcttgaagcagccattgaacggagggtatctgagggtgtcaaacttgagctgtgcactaatgacaaggtcggcctactatccgaggtcacccgcatcttccgcgagaacagcctgactgtcaccagagcagaggtaaccacgagaggcaggatggctgtcaacacgttctacgtccgtggctctgcaggtgaggcggtcgatcagaagacaatagactccatcaggcaagccatcggccagaacctccaggtgaaaggccagcctgagccaccggtggcgcagaagaaagagtcccccacatggttcctcttcgccaacttgttccggccgaggtctctctacagcttcggtttgttcatgtgctgatcacatcacctgccatgtcctgaaaatcaccatgtaaattcattagccatgaagccagattcagggaaactgggggatcaggaagagcaagcgttctccaatcagttctagtggtgcaggatgtattcgggtctagatagcatatgtgaatgtttatatatcatcgttatctgtaaatatagtcagtttcgccaacctcacgttgtacatacatttataatgtagataaaggatgtaaatataagctgtacagattacaggatataattgaatcccagatcgttgccacctcagaaagctggtgcctttttttcctaaatattttcacgcgaaaaaggcatgtggcaatctctttacatatcttccacgaaatgagaggccgaattggctcgctttgctcgaattattgaagttgat

SEQ ID NO: 35520 - DNA, 1025 bp, Setaria italica
  misc_feature (1017)..(1017): n is a, c, g, or t
  Peptide Sequence Number=SeqID_101494
tttttttttacagaaattaaagggactcctgcacaaagcatagcttaaggacagactactagcaccactttccataacaaataaccaggtcaacaaaaaatcttggaccagcaaggtatatgttgccatcagaggtatatttgcacaattatgataggagttccaggcctgttctcccaacaaaaggaaactaaagggcagcggcactcagttcccaatgaactccttcatgttcttcaaccaaaccacatactccttctcatcctttttcatcatgtactcgtacagccagtcatgcagtgagtgtttgatccccctcgtctcaaggtacctgtgcaaggccttctgcaagctctcgtccaaatccgaaaatggtggtccctcatacgcatgctcaacatctaggtcatcacggttcagcaccctcatattttcaattgcaagttcatcatcattaaagttgcagtcaaattccaggattggcccttctgatttttcaacagtgacaaccatctgaattgctggcttgaaagattccttatcgttgtcactcccgtcatcctcatccaagtcttcctctgtatcgaagttggtgtagacagcagatttaattgtctccccagcaaactctcttttgagggttatggactgatcaccaggattgtctatgacctcaaaagggaagtcatctggtagatcaatgcacttgtcggctaagctctcctccgactggacaacgcactcgatctccgactcgatgactcgcctcagattttcgtcggcgtcggccttggaagaggacgccggagactgcgacgccagaaagcggcgggcggcggccgcgggagacgaggcggcagcggggagacggcgcgggaggggaacgggggcacgccccaagtggagggcgcggcgcgctagggtggagagaggagaggaggcggtggcggcgcggcggaggagccgggcggcgaggaacgccgtcgacatggttggtgatttgttgggttctcaagnggcaaacg

SEQ ID NO: 35521 - DNA, 967 bp, Setaria italica
  Peptide Sequence Number=SeqID_101495
tctgctgaagcacgacatgtgactatacataatatatctcgtgaggccgactacaaaggaccatattttcagtaccgaattgtgcatgaagccatgaaccaagaacaagaatggcatcatgtttggcaagtgcactttcaattctcttggtagacctactgagcagtcactccgtgtccacaagaggagactgctatcagagagaaacagcaccagcaaggtgggacgtctcccacacttccacaccttgcatattttctcttgtcagaaacaagcgatctccaccccctgccatcatctgtatcattccacgtttagcgtcctcttccgtgtccacatagcaactcctataaaagctttcatcgattccttcacttctgggtccttcctttgttcctgattgctctgcgaagtcgcctgtgtcgtgaagctgttctcccaatcgggaccaaacctccagtccatccttccgactgacaaatacttgagactgatggcaatgcagaacactgccatagcctcctccactccgtatttatcctgatgacatatacgcccaagggtcgttaccaagggatctcaggtctgccactgcaacatctcctgattttgaacaaaccttgtaaattgcctgctgcttgacatccacatctgcatctgcaaatggatccccaaacctactgcttcttccagctccccctggttcgcttgtctcccacaccacattcccagaccgaatatcccacagcctcatgtagccagagtagccgaatgccccagaactcacaaatgatgcaaacaccagcccaggtgccggcaggtgcaccactcgacatggtgtcgatgactttgccgcactaccactctgccggccaatctcctgcattggcttcagtgttacagggtcaaccaccaggatgcagttctcccgatgagggcactcaaatgttgcaagatgggtgaattc

SEQ ID NO: 35522 - DNA, 255 bp, Setaria italica
  Peptide Sequence Number=SeqID_101496
cgagctggagaatttttggaaccattttcaggatattctggcttagttgagaatgaagacctcctcttgctgcctttaaggctttcagtagaaagaggttcttctttggacctctgttccgtatcattcaccaaagcattttcttcattgttaatgtcttgcagtggcataatttcagctggtgatgttagagagaatcggaacctgtatggatcgagttgaacaatctcagtccccgtctgggcatcctgtgcc

SEQ ID NO: 35523 - DNA, 621 bp, Setaria italica
  misc_feature (606)..(606): n is a, c, g, or t
  misc_feature (611)..(611): n is a, c, g, or t
  misc_feature (616)..(616): n is a, c, g, or t
  misc_feature (619)..(619): n is a, c, g, or t
  Peptide Sequence Number=SeqID_101497
cactcgccgtcactctcttccttcctctactaatggtaagatggtttcgcattctccacgtacacaaaggccaaccaatgctggtggaaaggatggagcgaagggtgacaaggctatgctgtcatcaagagatgcaagtgagagacccctgaaagctgagtggagacgttgaagaggcgcaccaaactgtgaaatccccatttgatcagcgcaaccgtttggttggaaggtgtctgcagtttgctcagattgttttgcttgtgatgtaaaaaagatgttctcatcatcccgcgacgatggctttgttgtcctgaacgcctgaacctgctgcaagttgtgacttatttatagggttttccgtccagccttttgtgatgtatagctgaagtgtcttcccagtttgttttttggtcccgaggacatacccccttcctgcttgttgagagagctgctgatgttagagagaatcggaacctgtatggatcgagttgaacaatctcagtcccgtctgggcatcctgggctgcgttttgactgacggttgtgtgccatccatgatttgatgtccttgattgctacttacagtagaaaaaaaaaaaaaaaaaanaaaanaaaanaanaa

SEQ ID NO: 35524 - DNA, 2460 bp, Setaria italica
  Peptide Sequence Number=SeqID_101498
cctctttctactgaaagccttaaaggcagcaagaggaggtcttcattctcaactaagccagaatatcctgaaaatggttccaaaaattctccagctctgcccagctacatggctgcaacacaatctgcaaaggcgaaactgcggggacagaattcaccgagactcagctctgattcagcagagaaaaatggcttcactcgccgtcactctcttccttcctctactaatggtaagatggtttcgcattctccacgtacacaaaggccaaccaatgctggtggaaaggatggagcgaagggtgacaaggctatgctgtcatcaagagatgcaagtgagagacccctgaaagctgagtggagacgttgaagaggcgcaccaaactgtgaaatccccatttgatcagcgcaaccgtttggttggaaggtgtctgcagtttgctcagattgttttgcttgtgatgtaaaaaagatgttctcatcatcccgcgacgatggctttgttgtcctgaacgcctgaacctgctgcaagttgtgacttatttatagggttttccgtccagccttttgtgatgtatagctgaagtgtcttcacagtttgttgcgcctcttcaacgtctccactcagctttcaggggtctctcacttgcatctcttgatgacagcatagccttgtcacccttcgctccatcctttccaccagcattggttggcctttgtgtacgtggagaatgcgaaaccatcttaccattagtagaggaaggaagagagtgacggcgagtgaagccatttttctctgctgaatcagagctgagtctcggtgaattctgtccccgcagtttcgcctttgcagattgtgttgcagccatgtagctgggcagagctggagaatttttggaaccattttcaggatattctggcttagttgagaatgaagacctcctcttgctgcctttaaggctttcagtagaaagaggttcttctttggacctctgttccgtatcattcaccaaagcattttcttcattgttaatgtcttgcagtggcataatttcagctggtggagtaacaacagacagttcatcaactttttcttcatttatgactggatctgaagcaatttcctcatcaggctggagatcaggtaccagaatagccatctttgcattatccaatagattaacattctggggctcttgactctcggggtgaaccggaacttgctttgcacttcttagtggtctgtcacatcggacctcttgatcatcagggatctcaggtgctggattagatacctttgaggtttctgccatggaattagtaaccttcctaaggctacgtttaaccttctcaagttcagttaactgtccatcaggcactgaatcagcaggagcactactcattttccttggaatccgttttgtcttctcaatttctgtggttgtatttgtttgtgaaggctcaaatggtgttgcagagctcttcctagcattgcgttttaatttcgctgactcagtttccattgcataactggccttccttgcatgtggcttcgcatcagtgccaactctctttggttgggaaatgggcttccagacatgactaatggtccacctctccaaccagttgaaggctgaattagggtccatctcatcatactgaaagtgaagagcttcaaccacaattggtgaagatagaagcttacgagcaaaagcatttgaagataatttctccttccataaatcaggtttagcacccccaaagttctgttgggtcagtttccgactggcatgaatggcagcttgagaaagtctgacattccttccacggatcagggcttgaaaattcacaatcaaccatgttgcccggagagttgaaacagcttgcctccttacaagatgcccccgaatcagagcctgaagtcttatgatccctttcaatgcacggaatgctcggcgtgccagataaccacggaacgcagcttgcgccttcacagccgcttgctcttccctcaacctctcagcatcattggatgcatcagaacccacagtgtcatgcttctccaaatcttgattgacatcaggcactgcaacttcaccttgcacgctggaattctcaccctttggcacctcccgcacggcctcattgttgtgggcgctaacaagcacaggctccgagataaccggagagctctcggagaatgcaggctccttaccagcataccctttgttgcttgcacccttcgataagtccttggccttggtggagccggaccttgacgacgacttcttcccgaagagcacggacttgatccacttcgccggagacttccccattggagccaaatccgccgcacgccggagggttcagaggctgaggcagcggcggcgcgaaaccctagctccccctctctctctcctccctccctcccctcccccctgcctgcctgcctgcctacacaacc

SEQ ID NO: 35525 - DNA, 289 bp, Setaria italica
  Peptide Sequence Number=SeqID_101499
gagttgaggaggaggtagggccgagctcggcgaagttgccgatgagcgaggagcacccgggcccgccttgtaaccatacgagcagcggtgcggcggtcggaggtgcggtgaccgggtcagtggcctcgtagaaggcgaagtagagggagttggtggaggtgacgttgaggtagcccgacttcgttgggcgcgccctcgccgggaacctctgagccgccgccgggctagtgctcgtggtcaccgtcaggacgaggacgaggaggagagcggcggtggcgacgcgagaagg

SEQ ID NO: 35526 - DNA, 584 bp, Setaria italica
  Peptide Sequence Number=SeqID_101500
cgctgaagcggtgggaggggacgctgaactgctcgtagagcgccatcttgttcctgggcggcgcgcggggcccgcccttgacggtgtcgttgacgtgaaggcgcgggaagagagggcccatgaccttgtccggcgcctcatccttgccggcccccgcctcatggctccgccggtggcctcttagtagtagcagccaagcagcagcagcgcggcaccgggcgcgcccatggccaggtttagaagacaaggacgaggacgagggaggattcgacggggctgacgatcctccgcgcgcgcgcgcgcccctcgcgggcgagaggatccaccaccaatcccgatcgaggcagaaatcggcgaggcttgcgggaagaatccgatctccgcgccgagaagcgggggtgccagggagcggtgggcgagacaggaggtggggcgactggaatcggggaccggcgcgaagggaattcgggggcgaggtggagaaatatctggccgcagcagctgccgaaggccgcggcggtgtggggatggggaggggaaaggaggcggacgaaagggagacggaggagggggagacgacgacg

SEQ ID NO: 35527 - DNA, 413 bp, Setaria italica
  Peptide Sequence Number=SeqID_101501
cccaaaccacttccacttgaacatcttcccaaatcgaagcacccatcagcgcgcgaactctccaagggcagagcaaaggcgaccgaccgatcgatcaaatctatcaatccggcactgacgaggagatccatggacgcgggagcggaggcggcgtcgtcgtccccgtcgaagctggggcacaggctgcggaccacggtgtgctgctgcttcggcggcggctccggcgcggggcccgagagggtgaggtggcggcggaggggcgcggcggcgggggagttccggtacgacgcgctgagctacgcgctcaacttcgacgagggcggcggcgacgatgacgaagcgtgcgccgccgaccccgccgcggccttccggtaccggaacttcaacgcgcgcctgccgccctcgccggccgc

SEQ ID NO: 35528 - DNA, 654 bp, Setaria italica
  Peptide Sequence Number=SeqID_101502
ccatggaaatatcggattgttttcttcactaatgatctcaatctcttctcttctttcatcttttgttttgtctcattatctgcatattccacaaagcattccaatgagcggcggaatccacttttttcttctatcgttgcaatttcactcaggaactcctttgatttcagcaactcatgtctaaggttcaccacactggcagacaaagcttcagcatctagtgcagctaccctcttgacattgtccatctcagtactgagtcctgaaacaatcttaaggccacggtgggagtagtaatcaccatcttcttcaacttcaagagatccattggaattgtcatctgatgtactcgatggacttcttccactttccatggccgaccttgcttcacggacaccttcagaccggatgatctcttgaacaacaaagtgaagcaatgttgtctttccatcagcacccttgacatctgataatttcagaagggtgtcaagtttgaacgcattagcaccaccacggaaagtcccatcattcaaacggtttccggttttgagaacagcttctagtaactttagaaaaagccgatgctttaattccccacaagcagcctccaactggaggaatgaatccccgagacttgaagcatcttcttgtaag

SEQ ID NO: 35529 - DNA, 451 bp, Setaria italica
  Peptide Sequence Number=SeqID_101503
tagcggcgggtactcggagaccgtggccgtcgaggcggtgaccgcctaccttctctacctgtcatggacaccggacaccctgcgcgccatgttcgcaagcaagtactggctccctgagttgccgagcatcgtcaggatgttcgcgagcgagatgactgtcgcctctgcgtggatccacctcctcgccgtcgacctcttcgcggcaaggcaggtgtaccacgacggcctcaagaacaacatcgagaccaggcactcggtctcgctctgcctgctcttctgcccggttgggatcctggttcatgtggctaccaaggtactggcaggggcagttggccgctcacattgatgattggaattgggtggttgtatgtaggattccattgtttagctggtggattttgtgatttgaatatcaataaaattgattcagtgtgccgattcttttacaaaa

SEQ ID NO: 35530 - DNA, 246 bp, Setaria italica
  Peptide Sequence Number=SeqID_101504
tgatcttgttcctcctcagctcgacggcgccggccttcttgcttaggaggccgaggaccatcgccgtcgcgccacccagcgccactgcgacgcggccgacgttcttggagacgaaggcgcggaagaggcgccttatcctgagaatcctgaggagggccttggttggtgggtgttgctgagctctgagcttgatatcgttggatggatgcgtgtggagtagttggtccgccatgagagtgtttggct

SEQ ID NO: 35531 - DNA, 795 bp, Setaria italica
  Peptide Sequence Number=SeqID_101505
aagaaataacaaagactagtaacactttcatgtgaagaagagatataacacgttcatattgtaggtgtattggatgagcgtgttatgtttagcgggaaaaggaacaagcgaagatatgaaagctggtaagtgctacttactcttgaaatctaaagtcatcgttcctggttactgaatgttttgtattgaccaaattatatttgggccattttgcactcggtcaatattttgcaattaaatatgcttaacacagttcagattcttattcattttggatggtgtgtttaagctgctaattatagccaggcttcatggagtgcctaaattgtttctacatgcaatgggtgtgttgttttgacattttcttttgtcttactaactgaattctccattttatctgttgttttcatgtcctaggaacaaaactgctacattgtggggaggggaggcccatacataaattttataaaaccatgcagaaaactgtagatatgcaagtgatagaactgagaccagtcctgaacaaaagaagtacccaatttatcataatcaggaaagaactataatgccaacacttgggcaggtgaagtataagataatttgttattgtgattccaaatcgatcaaatttgtggtgacagttgctggaacggtggagttgggtaaggacgtggtggtggcagcaacccaagtagacctaataacttttggtctcagctccaggagcttgagaaagagaaagagcaagaggttggactccggagaacaccattcaaatccatggaaatacctagt

SEQ ID NO: 35532 - DNA, 296 bp, Setaria italica
  Peptide Sequence Number=SeqID_101506
cgtgtctcaggttgcgctcgagtttgcaacgttttaccgccaatttatccactgggtctcaatgtttgtttaaattcataatttcgattgaaatttgacgtagtatgtggttggggaccgttgcgattgcgtatttacaatttgagtgcattggccgttgtgcatcacctatcctagcaagcagcaaccaccaaagctgtcaagttcacgagcaaagatatgccatcagatacgggttgtcatatcgtccatgtacttctcatatgggctgcgcatgctggaccatttgatgagag

SEQ ID NO: 35533 - DNA, 389 bp, Setaria italica
  misc_feature (364)..(364): n is a, c, g, or t
  Peptide Sequence Number=SeqID_101507
tttttttgttttttttcgttttttcgtttcttgtcttcgtccttcccttccgtctacctcgacctcaccggcaacgccttctccggcccgctcccgcccgccttccccccgaccatccgcttcctcatgctctcctgcaaccagttctccggcccgataccggagggcctctccaagagcccgctcctgctccacctcaacgtgtccggcaaccagctctccggatcgccggacttcgccggcgcgctctggccgctcgagcgcctgcgaacgctcgacctctcccgcaaccagttctccggccccgtcaccgacggcattgccaggctccacaacctcaagaccgtcagcctagccggcaacnggttcttcggcgccgtcccgcagga

SEQ ID NO: 35534 - DNA, 316 bp, Setaria italica
  misc_feature (19)..(19): n is a, c, g, or t
  Peptide Sequence Number=SeqID_101508
accgcgccatcgggttcgngccccacggcacctactggcgcgcgctccgccgcgtggcgtccacgcacctcttctccccgtggcaggtcgcggcctccggcgcgcagcgcgcggtaatcgcgcgccagatggtcggcgccatcaagggcctgtcggacgccggccgcggcggcgacgtcgaggtccgccgcgtcctccgccgtgggtccctgcacaacgtgatgtggtcggtgttcggccagcggtacgacctggagctggaccccgccaaggagagcccggagacgcgggagctgagggccctcgtggacgaagg

SEQ ID NO: 35535 - DNA, 249 bp, Setaria italica
  Peptide Sequence Number=SeqID_101509
ccaaccaaagccgaaggcagaacagatagactcagagagagccctgagtccctattgctcactgctggcctgctgctctggcaggtctcaactgtgacccgaggaatggaggcacacagcagcaagtccggcaccatgccgccgaggaacgctgaggccgtcgcccaccccaaaccgccagttcgtcccccggtcccgccgccgcggcgcagcgaggtggtcctcccgccgcttgagacgcagctccac

SEQ ID NO: 35536 - DNA, 664 bp, Setaria italica
  misc_feature (605)..(664): n is a, c, g, or t
  Peptide Sequence Number=SeqID_101510
tacgtaccgtaacgtacttagacttaacgcggccacctgggggctccacatgggcggcagcagcaatctgcgttaccagactctgaatgggatcgagtacgtcctcggcaaggtcgcgccggcgcccgtgttcaaggcgtctgttgttgctctccggtgcatcaacaacgtgcttggtggcatgtccttcgtgttgcttgccaggttgacaggagcgcaaaaatcagataagccagcgacggttgcagaagagaaggaaacgttgatcgctgtgggcaatgctgccgcagatgccatcagtgaggcaaaggaaggagagggtaagtaagtgggtagaggagagtgcagttggatggatgcgtgcatgcttgcgtcgtgcatcaactgatcttcctttgctgctgcttgacatagaccaacaaacatgtagacgataagtgagtgggttggaataaggagtgaggctcgaacattttcttcagtctgtttgtggtttcttggtatcgccggatgacatgcggacgacatgcttagttgatcttagaataaagtttctctcttgttcatttgatctttgactcaatggatagcctgcttgcagtgtnnnnnnnnnnnnnnnnnnnnnnnnnnnnnnnnnnnnnnnnnnnnnnnnnnnnnnnnnnnn

SEQ ID NO: 35537 - DNA, 874 bp, Setaria italica
  misc_feature (869)..(874): n is a, c, g, or t
  Peptide Sequence Number=SeqID_101511
ctcggcgtcttcctggccgggtgggccgcccgcgtcgccgcggacccgcagttcccgttcaaggtgctcatggaggaggtcgtcggcgtcaccgcctgcgttctcggcgacatggcctcccgccccaacttcggcctcaacgagctcgacctcgtcttctccaccatcgtcgtcggatccatcgtcaactttgtcatcatgtacctcctcgcgcccaccgccgccgcctcgtccgtggcctccgcgctccccaattacatgttcgagcccggcgcctacacgctcggctcccgcgtcgccacgctcttgtccaagggcgcgaccttcacgatggtcgggttcgcggccgggctcgccggcaccgctctctccaacgggctcatcgcgatgcggaagcgcatggacccggcgttcgagactcccaacaaggcgccgcccacgctgctcaacgcggccacctgggcgctccacatgggcgtcagcagcaatctgcgttaccagactctgaatgggatcgagtacctcctcggcaaggtcgcgccagggcccgtgttcaaggtgtctgttcttgctctccggtgcatgaacaacgtgcttggtggcatgtccttcgtgttgcttgccaggttgactggagcgcaaagatcagataagccaacgacggttgcagaagagaaggaaacgttgatagctgtgagcaatgccgccgcagatgccatcagtgaggcgaaggaaggagagggtaagtaagtgggtagaggagggattagagagcaaatcgaaggaagctgtgtgggccgagtgccattcggcaacctacctgtaataaagtactgatgttagtcatcgccacaggacttgtgctgctnnnnnn

SEQ ID NO: 35538 - DNA, 585 bp, Setaria italica
  misc_feature (426)..(426): n is a, c, g, or t
  Peptide Sequence Number=SeqID_101512
ggggtacttgttctttcagtcttaacttgttatttccattgttgctgtgctgataacacagtcatagtttcccacaaacacatcgacatttctgtagacaaggtctgccatcaatagtttatcactactgaatcttggaagtttgcgctgatatatccctcagttgtttagttaatctcatgtgacattacatttgatgtgccatcttgtagcaaagtgcaccatcttttgatcacaccaagttcttccatgggttggtcgctcaagttaatgagaagatccgtggcttccaggtagttcttgttgcccatacctttctccaaatatttcattgccaaatcacctcgattgctaacatagcaacattggttacccattctcatctctgttccaggcgagggtatcagagctatggtacgttgaagngtatgatgttcttgcgctggccctgaatggaaagatgaaagtacggaggctccaccttgactgcaatcgtagggcaatgaaaatccataaagaggtcatgagaatgggaaaagaattaggatatgcactttgcaaagcagtggtcaagcaaaaatttcg

SEQ ID NO: 35539 - DNA, 1217 bp, Setaria italica
  Peptide Sequence Number=SeqID_101513
cggagctgtacgcgaagatggcgcgggacctcgacgagcgcggcgcggcgttcctccggggcggcgagacgtcgcagtcgctcacgctgacggacctcttcgacaccgccgacgacggagccgtcgtgcccaggctcaaggccgccgacccaccggtgcgcgcgaatgtgctctatctggacccggagttcgccgctgtgatctcgaaggctgtcaaggaagtatttcttccttattttgatcaagttatctggttccaaaatacaagcatgtaccacttcagtttgtttcacgcctcccatcacttggagcccattgttgcaactgatgacgagattgaagccgaagtggaggcagtaaaaaaagtcaccaagactatttgtcctcttaaaattgtattggatcgagtggttttgacgtcaactggtgtgcttcttggcttgtggcaggttgaatctggtactgatcctgcagaaatccgctcaagattgagagaagctctccttcgagcacctcaaaagcaactgtatgattctgttctgcttcacacctcctttgcacgaattctggggcatcctaagcttccacaagagcaaagtgcaccatcttttgatcacaccaagttcttccatgggttggtcgctcaagttaatgagaagatccgtggcttccaggcgagggtatcagagctatggtacgttgaagagtatgatgttcttgcgctggccctgaatggaaagatgaaagtacggaggctccaccttgactgcaatcgttagggcaatgaaaatccataaagaggtcatgagaatgggaaagaattaggatatgcactttgcaaagcagtggtcaagcaaaatttcgcttgcaatgctttggctcgcctaaaggatcacctcgcccttcgttctgccaagcaccagattctatccaagtctgaaactggaagtgccaaggacttccaagccatatcgactaatgttatatgtaggaattgtatgcattttttgttgtatgtaatgtaatttgtttaagcgcaaagttttagctatgtagtatgccacttttgttaatatgttagttttccttattagaaacattagattattaacactgaaaagtttgccgatgtatgaactagatgtatctagctcaaaggccaatactcagactaaaaggtgatgtcttagacatcaacatgttcctagatgctaacg

SEQ ID NO: 35540 - DNA, 313 bp, Setaria italica
  Peptide Sequence Number=SeqID_101514
tctttgtgttgcaagctgctttatatcttggcgaactaatgagctcggccaagtgccaaacactggtgaatgtgaagtttcacataagtagagaaacatagtaacataagctaacatgtgatggctttactgtcaggtgtcaagatccattggtgatttttatctgaagaaaccggagtacagcttggaccccttgtttcggcaagttggcccccctgttgcattgaagaggccagctctaagtgctgaaccatcaattcaagttcgcaagctgaaaccaaatgacctattcctgatatttgcttcagatggt

SEQ ID NO: 35541 - DNA, 252 bp, Setaria italica
  Peptide Sequence Number=SeqID_101515
tgcggccgcacgcggcgggggagttctcgatggccgcggcgcaggcgaacgtggccatggaggaccaggcgcaggtgctggcctccccatccgccacgcttgtcggcgtctacgacggacacggcggggtcgacgcctcccgtttcctccgatcccgactcttcccccatgtccaacgcttcgcgacggagcaggggggaatgagcacggaggtgatccggagggcgttcggcgcggcggatcacctccgtg

SEQ ID NO: 35542 - DNA, 422 bp, Setaria italica
  Peptide Sequence Number=SeqID_101516
tttgtcgtaattcttagccgaaaacaatctcactgaccagtaggcagcagcgccgtcgtgctcaccggacacgcagaagatggccgcgtcggcgctccaccagaccaccagcttcctcggccaggccctggtctcccgccccgccgccgccgccgatgccggcggccgcatcaccatgcgccgcaccgtcaagagcgctccccagagcatctggtacggccctgaccgccccaagtacctgggcccgttctcggagcagacgccgtcgtacctgaccggcgagttccccggcgactacgggtgggacaccgcggggctctccgccgacccggagaccttcgcgcgcaaccgcgagctggaggtgatccactcgcggtgggccatgctcggcgcgctggggtgcgtgttcccggagatccttg

SEQ ID NO: 35543 - DNA, 246 bp, Setaria italica
  Peptide Sequence Number=SeqID_101517
ctagaattttttgagattactctaactgatatgcgacttctcctcttctttccaataccttgaatgggctaatgtagtgaggtgcaacttgcctttgaccttgaatctccgtaatcctcttataggtgacacattcaaatatacataatcacctacttcaacggtcaattcgctacgacgggtatcagcatagctcttttgccttgattgtgcagttctcaaattatgtgtgttgcattcatgtcg

SEQ ID NO: 35544 - DNA, 233 bp, Setaria italica
  Peptide Sequence Number=SeqID_101518
gacagaagttgccccccaagacaaaagggactctgatgttactcagggatggaatttagaagtctcatgctggggaggcatgagttcccagggtgaacacaggaactggaggtgaggggtggtgctgaaatgggcctcgaagccagcttccagcaccagcatgtgaagtcctgaaccaagggagagagggggtggcaggaggtggatgggacatggtttgggggtgggggtgg

SEQ ID NO: 35545 - DNA, 1301 bp, Setaria italica
  Peptide Sequence Number=SeqID_101519
caccatacaatgatcacagtagagatcaatcatgcaattagatgcataagggttggcatcagtatccagtgatctgagtagcttgtatgtttctcgggcctctgcaacataccctacctttgtatagagctttatcaaagaattgtagattgtagcactctcacataagccatcttttttattaaaccaaaatatgctgcagcttgttggacctttccagcttcagcataagcatcaattaagatagagtagagaaaaacatcagcacggatccctgaggtgatcatttctctaaacaggtactcaaccattcgtaaatcaccattcttagcaaagctactaattaccatagagtatggaacacagtctgacagcagttttactgcttgcatttttgtcaagtagtgaagagccttctttggcagtttagcagttgacagaagttgaatgagagaactgtaagtcacgtaatcaggcaaaatgccatagctctccatgccatcagctacctcacatgcctcatccagcttctctaccaacccatatcctttgatcataacattgcacacagaaacactgagcatcttcttctttaggcagcatataaaagccttctctgcaagaactatgtatcctttctccccaaatgcatcaatatttgcacaaaagcattcagaattcatctggtgatggaacctgtcaaaccaatgccatgcttgctcaagcatcccagcatttacatacatcctcgtcaaagctgattgtgtgtactcatctatcaaaaagcccctctcatccatttcttttagaagggcttccgctttagtgaccatgcccctgatagagtatccatataagagtgtgcggcagctcacaacatctggtaccaaattttctgctttcatcttccagaagtagtactctgcaacatcaatatcgttgcattctctgtacagtgagatcagtatattgtaagtccttctgtcaggaaagcactggaattcctccatcatcttcaccaaagaagcaactcgctccattctatggtgcttaccccaaacatgaatcattgtgttgaatgtaacaacacttggcgcaacaccttctctcaacatttggttgaatgtatctgatactttctcgagttgaccagcttttccataagtatcaatcaaggtgttgtaagtgtacaagctgtagcgagggtgcccctccatccttctacttgaatctgaggaccattttctgaagaagagctcggccatttcatactctccagccttcttatgtgcctgcagcac

SEQ ID NO: 35546 - DNA, 290 bp, Setaria italica
  Peptide Sequence Number=SeqID_101520
gatgctgtccatggtaataacaatgtctacaatgccaccttattccctcacaacgtcggtcttggagctacaagggatcctgacctcataaaaaggattggtgaagcaactgctcttgaagtgcgggcaacaggcattcaatatacttttgctccatgtattgcagtttgcagagatccaagatggggtagatgttatgagagttacagtgaagatcacacggttgtccagcagatgacagatatcatccttggtttacagggagagatcccagtcaatcataccaaagg

SEQ ID NO: 35547 - DNA, 246 bp, Setaria italica
  Peptide Sequence Number=SeqID_101521
taattcgaatcgacatgcctccggtgcttgcatggtctgccagttagactaacagcatcacattgctgccttccagattcccatattgtccggcactcatcttccagcttctttgagaataccctgacggctggtcctttaaccattgagcaaaaggatcgcaatgccttctgtagctgcacttcatgtgtgctggtggggtaaaaggcaggtaaacctttcaggtacatctccttagcagctagg

SEQ ID NO: 35548 - DNA, 254 bp, Setaria italica
  Peptide Sequence Number=SeqID_101522
taccgcccgacgggcgtgctgcctctggtcgtggtgcggttgatgatgatgtaccccaccaccagcgctaccgcctttgcgggagggcggagggggaggcgatgaacctccgtcgctggagccctcgccgatgtgtagcttcctgaggaagttcttcatgccgccgccaacgccgccgccggggccgaggtcgccgtcgcagctatctcctcgcccgctgttactggcgctgctggtgggtgggtggatccgac

SEQ ID NO: 35549 - DNA, 171 bp, Setaria italica
  Peptide Sequence Number=SeqID_101523
ataaattacttcgaaaaatagattaaaagttatgtgacaatcatatccaattaagtggtgaaaccatggtgtttgtaggctcgtgatcattgttcggatgggcatcttcgttctgtttttcaagtggcgaatcagcacagcccgtgcgataatgagctcccctgccaccga

SEQ ID NO: 35550 - DNA, 492 bp, Setaria italica
  Peptide Sequence Number=SeqID_101524
caagattcacagaatcagcaacagcaacagcaacagcaccagcaccagcaccagcagcaaatgtcgatgccctacaaccagcagcatatgttgccgcaaacacagccgcagcagcagccggcggtgaagatggagaatggaggtggcatcttgggcggggtcaagttggagcagcagatggggcagcccgatcagaacggccccgcacagatgatgcgcagttccagtggtggtgtgaagctcgagccgcagctgcaagcgatgaggggcttgggtgctgtcaagatggagcaccaaagctcagacccatcggtgttcctgcagcaacagcagcagcagcaacatatgttgcagctgtctaagcagaaccctcaggctgcggctgcccagttgagcctcttacagcagcagcagcagcggttcctacatctgcagcaacagcagcagcaacaacagcagcagcagatcctcaagaacttgccattgacagag

SEQ ID NO: 35551 - DNA, 610 bp, Setaria italica
  misc_feature (577)..(610): n is a, c, g, or t
  Peptide Sequence Number=SeqID_101525
tagtaccgtacaacaacggaacaaactaccgtggtcaccgtgctcctcctcgaccgcgacgtcggcgggctgcaggtgctcagggacggccggtgggtggacgtccccgtgctccgccgcggcgagctgctcgtcgtcgtcggcgaggagatggagatcatgagcaacgcggtgttccgggcgccgacgcaccgcgtggtgacgagcgagagggagaggatgacgctggtgctgttctaccagccggagccgaacagggacctggcgcccgccgaggagctcgtcggcgaggaccggccggcgatgtacaggaagctcagggccaaggccttcgccgacgggttctgggacgccttcgcgctcggcgagcgcaccatcgacttcctcaagatcaaggtcgagcaggagcagctggaactgaaggcggcttcttgagcgcgtacgtgtcagtgtcattaacaccgtatccacgttgtacacttcgtctcctgtcgttcgcgtgtgaatcatcagtatacgatagtacgagatgtggcgcagttctcttcacggaataatcttgatggatgtgataagnnnnnnnnnnnnnnnnnnnnnnnnnnnnnnnnnn

SEQ ID NO: 35552 - DNA, 1505 bp, Setaria italica
  Peptide Sequence Number=SeqID_101526
ggaaacatgaatgatttcttctagatggctgtaactttacattattctcatggtttgcaacaaaggaggaggatgctccacaatttgagtttcttgccaagttgaaaggaatacctccagtgtagaacattcttgcaatagtttatttagccatttgttgaagttcaagatggaaacactccaaaatgccagactgtcttttcttctttgttgacttggacttgaaggagtggatgagcctgagaattgctggccgttcctcaagcatctctagtgttgcagtagaacatactgatgtgcctttgtttggctccttcaataaatgtcctctgactctaaaataactcccagggataatgttacacaaaaatggcattctgattttgcttcctccagaggtgcttttttttttctggagtaatctaacatgcctccacagagttctgtgccgcctttcttcatcaatagcattactagcatcagcaccagtttgcgcactaagggattgtgatcccacttgccatctctaatctctatagcaaaaagcagggaaatgattcaatcctgaatcacctgatactccagaaagggtgatgttcccatctctgatactggtttcagaaattggacccaaaacgcccaaatccattgcattatagctattatcttatcgctttcgagcttgtctatcaacatacagtatacttgttcaatgtgaaacctgctcgtggtgtggacagaacacacctgtttaaccataacccatgtgcccatctactgcagtgccacacattgacagttctgagttttcactcatcaatgagtccagttacgtcaaagctataacgccccacatcttgtctgcaaagtgcaaacttcagaatcatagtattggattgacacactatatccagataaaaagtgatagttgagcacatagatcttctatctgaggtctcttgcagtgaaaatgtttgattttccagaaaatattgagtgcataactatagtgttggtgaagcagatgcatagggttgatgaagaagtgcatctaattgaaaaacaacacatctgaagcatggcacttactggctaagtggctactgtaaattgccttgcttctgttccttttagagagaaatgaaaaacaacacatctgaagcatggcactctggctctagttaaatttgtacctgtgggaactatatgggtattccagttaacatcttctgtgcactgtgcagagcagctggctaaggatgcagagttgtttgcacagcatgctggtcgcaagtccatcaagatggatgatgtcatactcacaggtacttgacagtatcctgttctgctgattcaggaataaacgagtgaaaaatgtttggcttcataaaagtacgtcttgttcagtttaggcttgtttgaactagctttgcgctatcttttcctagtagtcaatctaactagctgcttattaattggttattcttgttagttaaaatttggta

SEQ ID NO: 35553 - DNA, 328 bp, Setaria italica
  Peptide Sequence Number=SeqID_101527
ttgatgctctgcatcaggagcagctggctgctctgatgtgttccccattctggttcaactgatgttctgcagtgcaggaatgctgtgcagatgcccgatcctttgaagcatcctcctgccactctggctggaacttctgcagcagcaacgtgagcagcttctgcaactcgggcggcacctcatcggggaagagcttggggatgtcgtccttggagacgttctcgctgacgcaccgcctgatcagtatcctcaggcacaccagcagggggtcaagctcggtcgttcggtaggtcgtagtcttgttcttagggttcgtttcgttcgggtt

SEQ ID NO: 35554 - DNA, 210 bp, Setaria italica
  Peptide Sequence Number=SeqID_101528
gtcggtcacatctgaataagctccttgccagcatagctgaggttgaacaacagagtgagatggatgctcgagtttcaacgtggaaagaaagaatcgagcttgccttggaagagcaggataaaaacccaccttttgatattagttcatatggagaaccaaatccttgacacgctttcatcaagaactgacggtatggggattgcaactttt

SEQ ID NO: 35555 - DNA, 1976 bp, Setaria italica
  Peptide Sequence Number=SeqID_101529
gagggttccaacttccaagcgctgcgctctctgtggtgttcgcgaatgcttgtgatggattgaaattctgagggggtttcgtttctgggtttggattctggagaggtagggccacaggggaggatcgttttggtgaggtgtatgaagggctgctgcttttgtagttagtatcagaactgacattaagcttccgaaggcaacatggctgaattgaaggctgcaacagcaagtctcgacgcccgaacgaccaagatcagaaatgttcccattgctgtaaccccagaaggattctggtgctgcccgtcccaggccgtgctccagaagacggcgaagaaccaaaaccagcaggcaaaaaccaaagggggtgcctctcctcctgcatcaaaagcctcgtcgattcaaagggcaccaacaatctcatcagagagacgaacgcattcgactccgacaaggtccaaaatcaattcagaggagcagaggtgcttgtcgggggagaatgccgcgacgaatccaccaaaggcagtgaatgaaaggccacagaagcagcacaagatatctgttggatttggccagcatgagataagtgacttgaaggttgtgctgtatggtaaggatggagttgcagttaagatgagtgtccacaagaacatcctagctgaaaacagtaccttctttgctgacaagctttcaaggcaaactccagtgtcgagcttagaggtgactgattgtgaggatgtggagatttatgttgagactgtggggttgatgtactgcagtgatgtcaagcagagactgatcaagcaaactgttccccgtgtcctacgaatcttgaaggttgcagagttgttaggtttccaagcgtgcgtcgtttcatgcttagattacttggaggcagtcccttgggtaggggaagaagaagagaatgtgatctcatctgttcggaatctgcatagtgagaactatggtgttagtcccgtactgaagagggtagcgtctgatctaacgaccccaccaaatgacacattttcacatatcattgaattagttttgagaagcaatgaggatagggggcggcgtgagatgaaatccttggtacagaagcttctgaaggagaatagcgcaacctgtactagtggatcttctgacttatgtgctgagactctatacaaatcatctcagaactgcctggagtctttgttgaccttgtttcagcaagcaactggcagtgattttgccgagcaatctctgaatattaaagaaccagttttccgacaaattgctctagaagcagataatctcctctggttagctgagattttagctgacaggaatgctgctgatgagttcgcggtcatgtgggctagtcaacgtgacctggcggggctgcactccaagttaccagtcaagtcgcgccaccttgttagctgcgtcacggcgaggctctatgtggcgattgggaaaggagagatccttccttcgaaggacacacggcggcttctcttggacatctggttgcagcctctcatggatgactataactggttgcagcacggatgcaggtcattcgatcggaaagtggtggaggaagggatcgggcggaccatcttaacactgccactggaggatcagcagacgatcctgctctcgtggcttgggagcttcctgaaggttggggacagctgccccaatctccagaaggcctttgaggtttggtggaggaggactttcataaggccctatgctgagcaacaaggtaatcggtcacaatctgggcggagttgagatatcgattggtgtaaaaaaataacgttgtttcctaatgtagcgtattgatgagaaattagagtggtaatttcttacatggcaggctgtttgggagatccccagtatgtggaagaaaatgggagtgtagggtaggattagtactgttgacttgtgaggcttgagaaaatgtgtgcatttgttgtctttgtcgt

SEQ ID NO: 35556 - DNA, 1192 bp, Setaria italica
  Peptide Sequence Number=SeqID_101530
gtacaacacaattttctatgaagattttttttccaatcaacaagaactttccttctcttattctactcctcatgtaacaagcatacaaaaatcagtgactgttacaaatcaagttaagcaactcatgaaacctttttgtaaatttcaggagaaaaaggctctggtaatttctctttaattaatcccaaaatgtacactccctacccgtatgccgagctcaagtctgaaaactctcaatggcccagccatttcttcaagtactcctataccaaatccaagaagcagagaagcagcaatggccactagatcgcgcactcctcccgggcgcccgtgccggcgtcaccctccatcgccgcgacgtgcttgtcgtgcatcgccgtcaagtccgggtgcccgtacctcgccgcggcgacggcgtagcacacaagcacgtacaggaaggccaagaacacgagcccgaacagctggaagttcgccagctgctcggagcgttcctgcgcggcgtgtaaatggcactcgatgtggccgtcggcatcacgggcacagcccttggggagcatgggaccgtacagcgtgaacgccgtctggtagaaccagagaccctgcagggcgatgaggatgccggaggcgaggtcgacggggaagctctccggcaggagcgcgccgaggacggtggcgacgatgcagaggccgacgaggacgacgaggaggtagtggtagtagccctccaggcccatgtgggtggtggagtggaagtagaagagcacgaactctgctgtgaacgctgtcgcagccaacaggcagagcacgccatcggtcaacggcatgtacctgggcttgagctgggacgcgagcgcgagcgccccgaagaggaagaacatgaggagcatcccgccgtgctcgaggtcgttgaggtgcgccgggttgatctccccgccggagaagatgtggaggtgcgtggagtagagcacctcgacgcacatgtccgccagcgcgccgcccgcgatcacgtagagctccagcagccgcagcggcgacgatggtgacgcgacggagacggggttccaggcccggacgcggaaggaggacggctcggcggcgaaccgcgccaccgaggaccagacgcgccacaggccgacgaggaggaagagcgtgcccggcagcacgtggcccttgaacgaccccatttttt

SEQ ID NO: 35557 - DNA, 208 bp, Setaria italica
  Peptide Sequence Number=SeqID_101531
tggcaacttccaaattcatttcaaagtttctaaccacacctaccaaaatagtgtttgtacgtgcttcatggatcatgaacataacattcgctctggactctggttgagaatttgagatgaggatcaatacatgatacatcatcccacaagggtaagtacatatgaatcgtatgatctgctttgtgatctgttcatgaggaggcgtaaa

SEQ ID NO: 35558 - DNA, 838 bp, Setaria italica
  Peptide Sequence Number=SeqID_101532
cttccctccacgggcacggccaccgcatctcctcccgcttcctattcctctgcgcttcggccgctcaccgccccccgcctctcgcctggctgccgaggtttcacctgataatgcagaaggagctgtcttaatcatagaacataacaatggggatatccaaggtgactggcatcgctgcaacagcttttcttgtcacatctgttagcttgtgggagctgggcatgagaattgctacgcttcctttcctattcaccggcattgttgcttgcatcgtcacttttgcatctcatgatgctgtcaacctaccttggatcttggggaagaactcagtgggaagatttccttgttggtcaattatactgtttggtcccttcttgatgcttgctcggacatatgcgatggttaagagattcatgaggaaggagtctgtgcatgacaagatcgtggaagggctgtatctgggaggatggccatttctgctgaagcatctgccccctggaaacccctctgtcatagattgcacttgtgagctgccaagaagttcctttgtcccgaaagatgagtatctttgtcttgcaacttgggatacaagagctccaacgccatcccaaatcgaactcgctgcacgctgggcttgtgaaaagagatccaaggggaaacctgtttatgtccattgtgcatttggtcatggaagaagtgcttgtgtcgtgtgtgcaattctagtagcactgggtgtcgctgaaacttggaaagatgctgagaatatcatacgtgaaagaagaaagataaaaatgaatgctcttcaccggaaaaccttggaagagtggtccaagcatcg

SEQ ID NO: 35559 - DNA, 935 bp, Setaria italica
  misc_feature (886)..(935): n is a, c, g, or t
  Peptide Sequence Number=SeqID_101533
cccccatcggcggtcttcccgaagtcgtctaaaccctaatccccctaaatccccgacgcaaaacaacacgcagcgtgccggagctctcgaggaggaagcatgagtcgccatcccatcaccaagtgggcgcagaggtctgacagggtgttcttgacgatcgagctgccagatgccaaggatgtgaagctgaacttgaagcctgagggccatttcaacttctcggcgaaaggctctgatgacttgccctatgagttggacctcgagctgtttgatgctgttaacgtggaggagagcaaggcagctgttgccccaaggaccatatgctacctgatcaagaaagctgagagcaagtggtggccaaggctgccgaaaaaggagggcaagccacctgtgttcttgaaggttgactgggacaaatggcaggatgaggatgatgaggacgtcggatttaatgactttggtgacatggacttctcgaaactggacatgggtggtgctgatgatgatgatattgaggatgatgaagatgatgtggttgaaagcgctaacaacgatggtggtgctaaggcagaggagagcaagggggagggagcagttccagcagccgccactgcagaggaagcaaagccatgaagaaggaaatgagttcgctcggcaccatcggtgaccgagcatgatatctagctagactagatgctcccttagatttttggtgtaaaatctggaggattggattgatcactcactgcatatgaagtaaagaaaaccaaacagtcgtgcactctgctgttgtagttttcggctgaaccttgtgaactgctggtataatatttggtcagagcttatttgcatcccccataggagatgctttcgctgttggagactnnnnnnnnnnnnnnnnnnnnnnnnnnnnnnnnnnnnnnnnnnnnnnnnnn

SEQ ID NO: 35560 - DNA, 531 bp, Setaria italica
  Peptide Sequence Number=SeqID_101534
tgtaataccttggtctatgtgtatttccccgtatagagaaacatgcttgagtggaggtgatgacgacgagggtgagaagaaagacaaagaaaagaaagagaagaaggacaagggtgacaagaaggaagatgagtaacggttaaggtaggatggtggtgaagatgaagaaggcaagaaaaaagacaaggagaagaaagataagaagaaagacaagggcacaaaggagaagattaacgatccggtgaagctgaaggcgaaactggagaaggtcgacgccaagctgcaagacctacaggctaagagagaggacatcatgaggcagctgaaagagctggaagagggtggcaagggaaagaccaatgaagagaagcctgcacaggtgcaggaagacaagggaaagataagaaaaagaaggaagacaatgaagattcaggaaaggtggataaagataagaagagtgagagcaaggagaaagacaagaaggataaaaaggctaaagataaggaaaaggataggatcggagtcgaaggg

SEQ ID NO: 35561 - DNA, 520 bp, Setaria italica
  Peptide Sequence Number=SeqID_101535
tcgaagtttggtctctataacccagaggaataacctttggagcagaagcacaactcccaaagcaatttctctcccaaattccttcatatattacttacaagctaccaaaagttcctcctgtaggaaccaaacgcccaccaaactgcgcaggacaatctcatcaggtgtcccatatcatgacgacggcgatgacggccacgcccagcaccacggcgagccacctcccgaccggcgtgtccacggcgacgggcctccggggcttgtaacccttggagaggaggtggttgatggagacgtagacgaagatgcccgtggcgaggcccatggagatggcgaagatccagtcggccacccggccctgcgtggtggcgtcgatgacgatgccgatggccacgccgatggggctggagatggcgaacgcgaaggcgtaggcgaagcaggagaggaaggccggttcgggagcaataccggaagacaagacgacgaatagacccaataggacgtaattacgtaccgacta

SEQ ID NO: 35562 - DNA, 495 bp, Setaria italica
  Peptide Sequence Number=SeqID_101536
atgagcagaatgctgtcgcccagggtgttcgcgttgtgcagcatcgatgcaaccgagtgatcggatccatgtgcctcagctggttgtggctcagagctggtgccatttgtggtgctcaccttgccctcctccagctctgcgccgccggcggaggatcccggtgcggtgctcttccgaccgctggaccctacctccggcttaaccgtttccagggttggcaggccgttaagcagaaaagataactcttcccgaggcccccgccggcgtctccggacttcctaacgttaccgtcaaccaccacgtcccggctcgggaaatcttaacccgattccctttcgggcaacgcgcgtgatcgcgctgtctgccggggttaccccgtcccttaggatcggcttacccatgtgcaagtgccgttcacatggaacctttctcctcttcggccttcaaagttctcatttgaatatttgattttagacttaacttaacctaacctaa

SEQ ID NO: 35563 - DNA, 562 bp, Setaria italica
  Peptide Sequence Number=SeqID_101537
cgggagcatccggagcagcgcgatgcccatggcgatcgccgcgaagatcttgtgcaggctgatggtccacagcgccttccacgcatcagccttcgtctcggcgactccgatggcgatgccttcgaagacggagtgaaagcagagggcggcgatgagcagaatgctgtcgcccagggtgttcgcgttgtgcagcatcgatgcaaccgagtgatcggatccatgtgcctcagctggttgtggctcagagctggtgccatttgtggtgctcaccttgccctcctccagctctgcgccgccggcggaggatcccggtgcggtgcgcccccgggagacgacgtgggaaacgacgacgtctgcgagcgtggtgacgacgtaccccgcgcaggcgagcatgaacgcccacgggtaggcgctgcccgggagcaggtccccgaacgtctcgttggcgtcgctgatgtagtgcatgagtgcggtgccgaggaagaccccgccggcgaactgcgtgcccagcgcgaggaacgcctcgttccagcgcattgtaagttagggggtactaacccta

SEQ ID NO: 35564 - DNA, 1109 bp, Setaria italica
  Peptide Sequence Number=SeqID_101538
gtctagttcttctagtttttttgttttttttttttttttctttctcccaaattccttcatatattacttacaagctaccaaaagttcctcctgtaggaaccaaacgcccaccaaactgcgcaggacaatctcatcaggtgtcccatatcatgacgacggcgatgacggccacgcccagcaccacggcgagccacctcccgaccggcgtgtccacggcgacgggcctccggggcttgtaacccttggagaggaggtggttgatggagacgtagacgaagatgcccgtggcgaggcccatggagatggcgaagatccagtcggccacccggccctgcgtggtggcgtcgatgacgatgccgatggccacgccgatggggctggagatggcgaacgcgaaggcgtaggcgaagcaggagaggaagggccggttcgggagcatccggagcagcgcgatgcccatggcgatcgccgcgaagatcttgtgcaggctgatggtccacagcgccttccacgcatcagccttcgtctcggcgactccgatggcgatgccttcgaagacggagtgaaagcagagggcggcgatgagcagaatgctgtcgcccagggtgttcgcgttgtgcagcatcgatgcaaccgagtgatcggatccatgtgcctcagctggttgtggctcagagctggtgccatttgtggtgctcaccttgccctcctccagctctgcgccgccggcggaggatcccggtgcggtgcgcccccgggagacgacgtgggaaacgacgacgttcttgcccccgggagacgacgtgggaaacgacgacgtctgcgagcgtggtgacgagtaccccgcgcaggcgagcatgaacgcccacgggtaggcgctgcccgggagcaggtccccgaacgtctcgttggcgtcgctgaggaagtgcatgagtgcggtgccgaggaagaccccgccggcgaactgcgtgcccagcgcgaggaacgcctcgttccagcgcatgaagtagggggacaccccgcccagcagcgtccccgcgaacaccgccgccaggcaccacagcttcgccgccaccagcccgcgcgcgcgcaggtcgggcttcggggag

SEQ ID NO: 35565 - DNA, 490 bp, Setaria italica
  Peptide Sequence Number=SeqID_101539
cagttataaatggtcaattatacaccaaacaacccagcaatgaccttaagacataaacaatgtgaacaaaccatacctaccgacagagatctttgcctacgacagttgcttaatgtgaacattggaaattttgggcacagttgtgtagcaggtagctgttgccatagctacaaatggtcagaataatactaagaatgctgaaaaggaacaaaagcacaatggacaactaaaagaaatgcacaatatcttccacgaacgcttataggctatgactactccacgccattagctgagagccaaccaaaggtatattatcagtcagaattgcctgcaataactttcagatgaaacttgaaagggtttgtttggtgctgcagtgcattggtggaggcagttgtggccatggccggggccgaaactgctcccttccctttggttcatgcatcggcctgaactcccaaaaagctctgcccacaacttgtagacttct

SEQ ID NO: 35566 - DNA, 927 bp, Setaria italica
  Peptide Sequence Number=SeqID_101540
tgtaaagtaaagtctttaaggccccttaggaggcgcagatgaagatttcgagttcctgtcagagatcgagctgctgtcgaggctgaaccactgccacgtggtgccattgctgggttactgctcggagatccagggccggcagctggagaggctgctggtgttcgagtgcatgtccaacggcaacctgagggactgcctggacctgaagcaagggaggaaacccatggactggcagacccgggtgagcatcgcgctcggcgcggcgaggggcctggagtacctgcacgaggccgcggcgccgcggatcctccatcgcgacatcaagtccaccaacatcctcctggatgacaagttcagagccaagatcactgatcttggcatggccaagtgcctgatgaacgacggcgtgacgagctgctcgagctcgccggcgcggatgctgggcacgttcgggtacttcgcgccggagtatgcgatcgtggggaaggcgtcgctcaagtcggacgtgttcagcttcggcgtcgtgatcctggagctcatcaccggccggccgcccatccacaagtcgtcctccaccagggccgacgagagcctcgtcatctgggcgacgtcgcggctgcgggacagccggctggtggtggcggagctgccggacccgactctggagagcaagttcccggcggaggagatgcagatcatggcgcacttggcgagggagtgcctgcagtgggaccccgaggccaggcccaccatgaccgaggtcgtccagatcctctccactatcgccccgccactccacggcgccaagcgccggaacctccccatcgccgccgccttcaacctcacgccgtctccgcacgtagggaggtgtgacccagagcccgtcgacatcgaggcgccgcaggagtgctcgacggcgtccttccg

SEQ ID NO: 35567 - DNA, 457 bp, Setaria italica
  Peptide Sequence Number=SeqID_101541
tggggttgtaggagtaaatttagcttatctgatagtccattgtcagcatcttcgacttgttggattagtaccttgcagaactgttttatggagagacgggcctcggatacgatctgcaaaaatccttccaccataactccatgactgacgggcaaggaattgtctctgctgccactaactgatctagctgatctctttgagtgagattgcatgttcttcgtgcttgttgcttgctttaaagccttcttcagttccgaacagtatgcttccaggctcactagcttggtagtcaattctcctaatgatgatttcatctccgatacttcttgcagggcggcgtccctgtgctcattggcttcaacaacttctttcttcagggagtccagcgagaacacaccccactccttaagaagctgtgacatgttctcgcattcgatggtgtttggtgacatgtctg

SEQ ID NO: 35568 - DNA, 1553 bp, Setaria italica
  Peptide Sequence Number=SeqID_101542
ggcctgatttgaaaaaggggatccctaatgatgtcgttgaaacttgcacaaaggagatagatgaagaggagattgagcttggtggcatgttttttgaagactcgtctgcttgggacgcagtggctccagaaatattgaaacagcaaaaaatagagaaattatcacatgatggttatggcaatcttcttgggaacatagatgatatatggaagaagggagattctggtaaaatgccaaaagcagttctacaaaagttttgtcagagacttggttgggaagcaccaaaatatagtaaaatatctgagaaaaatggtaaatttgtgtatgctgttaacgtgttgcggggtgctactggccgtggtaagagtcggaaggctggaggcttgacgaaaattcagttacctgaaatagatgaagaatatggatctgttgaggaagcacaaagtcgagttgcagcttttgctctatatcaattctttgctgatcttccgctacgccatctgcttactgagccatactcatcacttgttttaagatggcaagaaggtgaattgttgtcaacatcaagggtgcttgatactgaagacagtcgaagagctggctttgtagatatgttattgaatatggatgcagatacatccctaatcgaagattcttctgctggtggaatatttgtagattctagggatactgaagataacaaatctgtacatgagaagagagaggctgccatgatgagttgtatgggattgaaatccccagagcatgcagagagtgcaattttgaaaaagcagttggaagacaaaaggaagctaccaaattacttgaaaatgctggaagcaagagcttctctaccaatagctaaacagaagcaacatttcctacaattactgaaagagaatgatgtaattgttgttagtggagaaactggatgtgggaaaacaactcaggtgccacagtttattttggatgacatgattgagtctgaacttggaggttattgcaatataatttgcacacaaccccggaggatagcggccatttctgttgcggagagagtgtctgatgaaaggtgtgaatcttcacctggatcgaatgattcactggtcggatatcaagttcgtcttgacagtgcacggaatgagaggacaaaacttttgttctgcactactggtatccttctcaggaaattatctggaaacagagacttaagtgatgttactcatgttgtagtagatgaagtacatgaacgtactattttgagtgacttcttgcttattgttcttaagaatctcgttgagaaacgctcctatcaacaaggaaggaagttgaaagtgattctcatgtccgcgacggtcgattcaagcctatttgcacgatattttggagaatgccctgtgattaatgttgaaggaagaacacatccggtgtcaactcactttcttgaggatgtttatgagaaaatggagtactgtcttgcattggattctcctgcatcaggagcgtacttcgcacaccatgggggaaaagtggaagcatgcgagcagctcagt

SEQ ID NO: 35569 - DNA, 1049 bp, Setaria italica
  misc_feature (994)..(1049): n is a, c, g, or t
  Peptide Sequence Number=SeqID_101543
ggcggctagcggggggatcggagtggagaatccgaccggagccggagacggaggagggcgagggggaggaggaggagggcgagggggaggaggacgaagacgaggaggaggaagacgaggatggggatagcggcggcgcccggaagaagcagcgatcggataaaggtaatggtggcaagaaaaggggtggtggctttacaaaattatgcagtctttccccggcacttcaagagtttgttggcgcctctgagttagccaggacagaggttgtcaagaagctttgggcatatattcgagaacataatctacaagaccaaagcaataagaggaagattttacctgatgagagattgaggaagatcttcaatgtcaattccattgatatgttccaaatgaataaagctttgaccaagcatatctggccattgaattctgagggtcctgtctctcctgacagatcaacacccaaagagaagccacaaaagagagacaggaatgaaggaaagaagcaaaagggtggctcctcaggggctggatctggtctacttgtgccccttcagctttccaatgatttagtgaaatttattggcaccggtgagagtatgttatcacgatcagatgttgtgaagagaatgtgggaatacataaaagagaacaacctgcaggatccttctgaccggaggaaaataatctgcgatgagaagctgaaggacctattgcaagttgaatcattcaacggcttcacagtttcgaagctgcttgccccgcattttaccaagacgaagtagcaacctgccatccagatctgctaaaacccaaaagtctgggtgattttgttttgcagaatgtgtaatcatggaacagttaggagctatgtgagcgatgtggaattttaacttgtgggagttgttggcacttttcgaacaatactggtagtaggttcctcaatgtctaatgaagttatcaaccgttgactaaccgtttcactctccgnnnnnnnnnnnnnnnnnnnnnnnnnnnnnnnnnnnnnnnnnnnnnnnnnnnnnnnn

SEQ ID NO: 35570 - DNA, 284 bp, Setaria italica
  Peptide Sequence Number=SeqID_101544
ctcccggtgcggcgagggtgagcgagcgggcaagcaaacccccgcggcggaaatggatgccaagctgctgctccccttcccttccccgcccgccgctctccacccggcggcggcggcggtccccaagtccctcttccttggggcctccctccctctccacccgcgcgcgccgccgccgttcccgctgcgcctccgcccgcggccggcgctggtggtggcgcaggccgccgtgaagcgccgcaaggaggtccccttgacaacgtgatccagcgggacaagaagct

SEQ ID NO: 35571 - DNA, 231 bp, Setaria italica
  Peptide Sequence Number=SeqID_101545
ctttgtgatctctagtagctcattccattctttgatatctgcttcacataatcatttatgttcatatttcaggcttgtaaaaagctaggaaaaattgagctgtctgactgcgaaatttatgcatcctgtgagccatgcccaatgtgctttggtgcagttcatctctcccggatcaagaggttggtttatggcgccaaggcggaggctgccattgccattggattcgatgac

SEQ ID NO: 35572 - DNA, 330 bp, Setaria italica
  misc_feature (300)..(300): n is a, c, g, or t
  Peptide Sequence Number=SeqID_101546
caatgctcactcagaaggaatactacaatgctcaaatttccattgcttcggaatactatccgtccaaatgttttacgttccgaggataccccaatttcttgtaaacttacaaggcagttcattgctgccgcttaatgtgcagttaatggaattcagtttctgtccttctcatggtgccttacatacttccttagcaggttctgaatttgagcttgaactagcatagagttgtcatggtgccattgcatatttgagaatgaaatataccactttggcctacaaaaaaaaaaaaaaaaaaanaaaaaaaaaaaaaaaaacaaaaaaactaga

SEQ ID NO: 35573 - DNA, 290 bp, Setaria italica
  Peptide Sequence Number=SeqID_101547
gcctgcctacctgatttctttgaggttagctaggaaagaaaatttttaaggtacaacgaaggatctatgctcagtttttttttcttttgtggaatcagttctattattattgttagctgaaaggtccatactgcttatgattaatcatgatctaaatgttctttccgtttttttttttactctagttgttcagtcaaaggatggaaccatctcggttgcttctgcatttgctggtcatcagcaagccatacaagacagggaccacaaattcttgacaaaagcagtggaag

SEQ ID NO: 35574 - DNA, 751 bp, Setaria italica
  misc_feature (727)..(727): n is a, c, g, or t
  Peptide Sequence Number=SeqID_101548
ctatcagttggttcgatggggtcatccatcagcatgccacaatgctatatatgtactattgaacaggatgagccttacatgaaacctggactggctgacatgaagaacgcggtccttgtaccacacattgcatcagcctccaagtggacacgtgaaggaatgtcaacgctggctgctctcaacgttcttggtgggatcaagggttaccctgtgtggggaaaccccaatcaggtggagcccttcctgaacgagaagatgacgccaccgcctgcttgcccaagcatcgttaatgcgaaacaacttggttggtgaccctccatctactttacatggcaaatcaataccagtctatctctatcacgcattctgcattcatgtggtgtgctgtcatccatcttgtcgatcctgctgcttggacaagtacataggatgcacatggatcttaattatattgttgcctcttcaaataattgtttcaatgtgtatttcaggtctgccatcttcaaagctttagaacaagggcgctgctagctagctacaagtgaagatgctgtatacatggagggatggcatggcaataatatagcatcagatcgatcgagcagctgcactgtagatgtcttctgtcagagcttcttccatatatcatcaccctcgagtttattaattaattagcatttgtatatatatagatgcagctgcctgcactgagacacgcaaaaggggntaggcaaggcacacaggggatagg

SEQ ID NO: 35575 - DNA, 1652 bp, Setaria italica
  Peptide Sequence Number=SeqID_101549
gcctcggccttccgtccatccatccgataacgcaagaggctaccgagaccaaagaaggaacggaagaaagagcagccatggcgacgaagcccatctccatcgaggtgtggaaccctagcggcaagtaccgcgtggtgagcaccaagtccatgccgggcacgcgatggatccgcctgctcaccgacaacgactgccgcctcgagatatgcaccgaggccaagaccatcctctccgtcgacgacatcctggcgctcatcggcgaccgctgcgacggcgtcatcggccagctcaccgaggactggggggaggtgctcttctcggccctcaagcgcgccggagggactgccttcagcaacatggccgtcggctacaacaacgtcgacgtcgcggcggccaacaagaatggcatcgccgtcggcaacacgccgggtgttctgaccgagacgacggctgagctcgccgcctccctcacgctggcggcagccaggaggatcgtcgaggcggaccagttcatgagggctggcctctacgacggatggctcccgcacctcttcgttggcaacctgctcaaggggcagactgttggagtcatcggagctggtcgcattggctctgcttatgcacgcatgatgatcgagggcttcaagatgaacctcatctactacgacctctatcaggccacacgccttgagaagttcgtcacagcatatgggcagttcctcaaagcaaacggtgagcagcctgtcacctggaagagggccgccaccatggaggatgtcctcagggaggctgatgtgataagcctgcatccggtgctggacaagaccacttaccatctcataaaccctgaaaggctggccatcatgaagaaggaggcgattcttgtgaacgcgagccgagggcctgtgatcgatgaagctgccctggtggagcacctcaaggccaatcccatgttccgcgttgggctcgacgtctttgaggatgagccttacatgaaacctggactggctgacatgaagaacgcggtccttgtaccacacattgcatcagcctccaagtggacacgtgaaggaatgtcaacgctggctgctctcaacgttcttggtgggatcaagggttaccctgtgtggggaaaccccaatcaggtggagcccttcctgaacgagaagatgacgccaccgcctgcttgcccaagcatcgttaatgcgaaacaacttggtctgccatcttcaaagctttagaacaagggcgctgctagctagctacaagtgaagatgctgtatacatggagggatggcatggcaataatatagcatcagatcgatcgagcagctgcactgtagatgtcttctgtcagagcttcttccatatatcatcaccctcgagtttattaattaattagcatttgtatatatatagatgcagctgcctgcatgaattgggttcccggccgtaacaataagcagcagctatatatatgtagcatgttacgtatatacatacatgcaacttaattagtttttgatccatctatcagctggagccacactctacgttgcatatcatcatgtattcatctacatgtatgtatgtatgtatgtatatggcatgcatatgtattttctgcgctgaacgtacaataacttattgtt

SEQ ID NO: 35576 - DNA, 398 bp, Setaria italica
  Peptide Sequence Number=SeqID_101550
ttagttaacctagtaaagttgcatcatcagcggattgggactttgattttggatgttcagtgtgcaagggagctggttgtgtgtgtgtttccaatacgcaaagcttgtactgagcatgtagaatagaagtcgtctccaaggtttttctatctttcttgttaagtaagtgacatatttgttgctcagctgctattgctcaggaccaggtattgtttctaactgcaactaccataaatatgatcattatcaataggatatacaaacgtttgaaaaaaattggtaggtgggttttggcagatccaccattttcggttctgcttctgcaagagccattgcctctctgggagagcatagctcatctagagttttccaccagcacccagccacaacttgccatt

SEQ ID NO: 35577 - DNA, 268 bp, Setaria italica
  Peptide Sequence Number=SeqID_101551
cagatacatgtccaagtcactagcgccgaaggaaacccgatggtgaggctggccgtgggcccgcccgcgctgctggttgtctcacctagattgcttaccgccacgtgtgagcctccgttacgattcgtagtaccaccaggagcaacagcactgctggccgtactgccggcaccgccagcacctccgccgccactgacaccaccagcacctccgccaccagctccaccagcaccgccagcgcctccaccactggctccaccagcacccg

SEQ ID NO: 35578 - DNA, 443 bp, Setaria italica
  Peptide Sequence Number=SeqID_101552
cttttcatctgttgaattaattacatacattccgcgagagagctttaggcaccgctgatctgcattaagttaggattgtaccatgctactgacggcattattttggctgatagtacttctgatatccaggcaaagtagtacaattgtgatagaccaattgtgttcctacaataagtgacagtgcaaggacatgttctagagcttcatcatataatcattggatgtcttatcatcaatgcatctcctttcctttcctttccacactttctgaactgtaatggttggggatgcccgtgatgatttacgctaatggtgaattctggatgaatgtgcacaggcatggtgatatgcacttccaaagcgttcatctgaggcacgcaatttcgtttaacttaatttctcttttacctgaaacctttgcgtttgatcgccagttcttgtct

SEQ ID NO: 35579 - DNA, 432 bp, Setaria italica
  Peptide Sequence Number=SeqID_101553
ccgcttgttcttgttgccagcaagtagatgctccattctctgaagcttatcaacggactcaggcaaaattatgatgctcgtctcccttatgtcaagtacttccagagactcaagccgactaattttggatgggatctcctcgacgtccgtacggcgcaagctcaggtacttcagctgatgccattttgtcatattttcttggagttggttcaaggacaaatccttgcaaccttcaagatctagcatctgcaatatctgaaacttgtgcaacgtagaatgaagcgctctcaaactccctagcgctgttaaggaccggacatgagacaatttcatcctctctaccatttccttctctttcccattactcttttggacggacaacctgcgcaccttgtagcttggaaatggcgtctgccagtgaccgccaaccac

SEQ ID NO: 35580 - DNA, 643 bp, Setaria italica
  Peptide Sequence Number=SeqID_101554
aatacagaatacatggaacctttttccaaatcatcacaagggcccttttctgcaaccttcccaatttgatatgtacaagctgtgttcgcagaagaggtaccaatcatgtcataatcagaagcaactcccatgtttgacttatcaaggcgctctccagagttagaggctgcggtcgtagctgaggtaccaattgttccattgtcatagttacgaactggtgccacatatgacctattgttgcgttctacagcattagaattgtaatgctttgcagctgaccaggccagctgagatgatgatgcaacattgttgataacatttctgcgaggaactgacccctcagcaaagttatactgcttgttgttggaaatgtcattaaaagcagaccaattttttatcaccaatggctgctgtgatcttgcagggaccggagctacgttctctctacgcctttggaattcattgtttctgttgtctggtctctttaatgccactgaacttttcccaggtccaatatccctcaaaggattaagatctgaaaataatcttttgcactcctccttgtcttgtgagttttgaagtaatttcaagtcttgtttccgctttaaaagcgtaccagcagttgatggttgatctgattgca

SEQ ID NO: 35581 - DNA, 440 bp, Setaria italica
  Peptide Sequence Number=SeqID_101555
gatatagaggaaagacctgacttagctgatcctgaggctgctcctcctgaaattaagcaggatgataatgagactgaattaggcagcagcagcagcaacttgagcaagtctggtcaggagcttaaaaagctgctccgccaagctgctggggaagagtctgacactgatgacaaaaacacagacgaagacgagcccgcatcgccagaatgtgctccaaaacaactgcttgaacccaaaagtgaaccagtggatagcaaccctagtaaactaacgccatcagcgcaagctcagaaccctacacctccatctaaatccactcaaaaaaggagatcagggggtggtgatgcaaatacttctaatggtgcagcctccaaaaagataaagacagaacctgaaacccgaacgatgtctgtcaaggacgaaactccatcttctttgga

SEQ ID NO: 35582 - DNA, 474 bp, Setaria italica
  Peptide Sequence Number=SeqID_101556
tgtacagtttcagaattagtgttcatcaaatcattgttgttgtctactatgagctttattgctcgctctgcataacattttagcaatgacattggggtgtttgtggaaccatcgtaaatgtatagcagtgaaagcaatttcactgccacttgaaatggtgaacgctgaataatggcttccaagaattggtcaactgtagctgatggatctactctaataaacctccatctgtggtcacaatgcatgatagctcttgaatagggccagtagtcagcaaccaacgtacaaaggaacccagtgtaggagcaaacagcagatcccaatgcgaccaaatatgcaaatcagacaacataggagccctaagtaaacaattaattgcctctcgtgaacaaactgttcccaaataataatgttgttcagcaacatcgttgcccagaacatcaacattttcatgtctacctggcaaatttccaa

SEQ ID NO: 35583 - DNA, 350 bp, Setaria italica
  misc_feature (17)..(17): n is a, c, g, or t
  Peptide Sequence Number=SeqID_101557
aaaggtcgagaaacggnacccaaagctggctgttacctgtatggggacactgttggcatagacccgggtcttaaccccatgcgaggggccttcttgtattggcagcctcataactggaggacttaccaccatacttcagggatgttgaccccactagtttcatatttatctgtcttctcaggaatcaggatgcacttgtggtcacctctgtaagaagccacatattaatccttcaactatggcttgaattcccaattcagatctcatcattggagtagacaaaagatgagatctgaattccacagttttcttaagaaagtgacaagtgatgtgttcttagcatgtgaagc

SEQ ID NO: 35584 - DNA, 973 bp, Setaria italica
  misc_feature (970)..(973): n is a, c, g, or t
  Peptide Sequence Number=SeqID_101558
gtcgtcccttacccgtccggccgccaccaaggccaccgcgccgccgccgagtcgccctacggggtctactccgagcacatcgccgccatggccgcggtcgcgccgccaccgccgccagccaccgcgaggtcgctcgagacggggacgaagctgcacatctccaaccttgacgccggcgtcaccgtcgaggatgtccaggaactgttctcggaggttggtgagctcaaacgttattcgatgaactatgacaaagatgggatatccaagggaactgcggaagttgtctttgcaaggaaagtggatgctttggatgctatcaagaaatacaatggtgttctacttgatgggaagccaatgaatatagatctcattggaagcaatgcggaacgaccttccatgccaccgttgatacagaaccgtcctttgcagaactataatgatatccatagcagtgtacctcaaaaccaaagaggtggtcagcgaaaagcacctcaaggcaatggtcgtggtggaggcagtattcagaacagtggcggccgtgggcaggggaaaggccgaggacaggaccggaaccgcacgcccttatctgccgcagatcttgatgctgaactggacaattaccatgcatcggctgtgaaagagaaatgaggtgctggcattctgtttattgtaccggtgggaaggctgagctgctttgttttagaagtttgaagttgttactatcctagccatagtgttttgtactagataatttttcatgcagtgatagaaccattcagatatcttatttatgcactacgattcttgagtggaccataattgagtgtccagttaacgtgacgtccagtatgtaagtggtgctaatttgcatgatcacatttttgcggccttttaggcacagttgagagcactttcgaactctgctttgctctggctctaacctggttgtggatcttgtttcttgtcttannnn

SEQ ID NO: 35585 - DNA, 250 bp, Setaria italica
  Peptide Sequence Number=SeqID_101559
tgttacattgctgtgcttaagcttgggttttggttatttcagcaagtaacccgagaatggttctaatacattctactacttcactgacaaagcacacttcttactactatcattttcgtgcctccagcactacattatcattctttttcagatgaattcacttgcgtagataaattactgctacctttttttcataacaagctaccttacacaggtgcttttattttattttgcttttgctgttaccgta

SEQ ID NO: 35586 - DNA, 391 bp, Setaria italica
  Peptide Sequence Number=SeqID_101560
cttgagatgaaaagagagattagctaggtctaggagagagaaaggtaaagacgctatagtacggatcaaaagagaagataagaagatccttcatgtaaaaggcatcgatgatacacaaacttttttccccgtctttctcctgtcagattagagatcggaaaaaagtgggcagggggaaaagaccacaactgcaaccgagatgccatgccatagtttaaagaaagaggagggaaagcatgcaggtattcagagtcaagaatcctcatgattacaccaatctgctgcatgctatacagcacgaaacccaacacaacgcggaaacattcgccgatataatcatatcctaatcatgcatggttctagcggcggaacaagaaacttaagaaccgaa

SEQ ID NO: 35587 - DNA, 787 bp, Setaria italica
  misc_feature (1)..(15): n is a, c, g, or t
  Peptide Sequence Number=SeqID_101561
nnnnnnnnnnnnnnnttttttttttttttttttgttaagaaggaaatatggacaaatattgcatttccaagcacatcaaccatctcaagatacatataaaaacaatgaatttcctgtttgtcatatcaatgtcaactacacatccattattttttatgatgacggttggctgatgtcataacaataataccatgtaaaccagtccaactaatacatgcgactaccaccgacctgatgccactctatctcgaagcaacatatctctctcctctttcatcttattcgcaatctcaattacctttgggttatagaaacggtccataacatacttcttttcctctgcttgtatttctttgatggcacttgggtatgggtttggtggtgcacttgggtattacatctgctacagccatcacataatcttcactgactccttgttctttcaactccaagacacgccaagcaaaaactcgcgctggtggtggatcaaatccacttatcttgattgcatcgtggtagagcgaatctggatgcttcttgaagaacttctttacgtacacatcctctggcagctcaatcttcttgacctttccatcgacacgaggaaatgtcactggaggtgcctcttccatggccttgagccatttgggggcgggcttggcgagaaccttcaccagcttccgcgtcttggtcagcaggtcaccgcgcatgtacgacgtctccctcctctcgtgcccgaggacctccccgtcggagagactgcggccgcgccggcgccgccgcaact

SEQ ID NO: 35588 - DNA, 904 bp, Setaria italica
  misc_feature (1)..(59): n is a, c, g, or t
  Peptide Sequence Number=SeqID_101562
nnnnnnnnnnnnnnnnnnnnnnnnnnnnnnnnnnnnnnnnnnnnnnnnnnnnnnnnnnntttttttaatggacaaatattgcatttccaagcacatcaaccatctcaagatacatataaaaacaatgattttcctgtttgtcatatcaatgtcaactacacatccattattttttatgatgacggttggctgatgtcataacaataataccatgtaaaccagtccaactaatacatgcgactaccactgacctgatgccgctctatctcgaagaaacatctctctctcctctttcatcttattcgcaatctcaattacctttgggttatagaaacggtccataacatacttcttttcctctgcttgtatttcttttatggcacttgggtatgggtttggcggtggctcctttccttcactgcgggcgatttctttcagttccttgtatgctttcttctttgctttcttttctttgcgatactcaaaatctgctacagccatcgcataatcttcactgactccttgttctttcaactccaagacacgccaagcaaaaactcgtgctggtggtggatcaaatccacttatcttgattgcatcgtggtagagcgaatctggatgcttcttgaagaacttctttacgtacacatcctctggcaactcaatcttcttgacctttccatcaacacgaggaaatgtcactggaggtgcctcttccatggccttgagccattttggggcgggcttggcgagacccttcaccagcttccgcgtcttggtcagcaggtcaccgcgcatgtacgacatctccctcctctcgtgcccgaggacctccccgtcggagagactgcggccgcgccggcgccgccgcaactggtgaagtcttaagacctccgcgacgcag

SEQ ID NO: 35589 - DNA, 411 bp, Setaria italica
  Peptide Sequence Number=SeqID_101563
ttaacgaaaaataagggtagtagaaagtaacaagacaagattttgcaataagagctgagaaacccaccctgtgaccagctccttgctggatgcttctgaatttagcatatctgcgattaccgtccatgataaacgcaatgtgcttgggcatcgggccatatgagaggacagctatcaggcacttgcgtaggaaattctgaagactcgcaagaacaccagttgtgaccatctcatcaggcttctctaccttcagatccactgaaggagagcaagagataagtgaccctgccattgtagcaatgaggggaaagctgagggttgggaggccggcgacgaggcagagagggagggagggagggagaggggacggaggagataaggagtggtggagagtgagaatcaggaagggga

SEQ ID NO: 35590 - DNA, 373 bp, Setaria italica
  Peptide Sequence Number=SeqID_101564
cacgcacgggtcgatcgacggggagcttgtcatcacaggtttctttctgttactacacggatcgttttttatgctagcatgttgttatcgcttgggattgggaccctgacgacctgtccagctgcaggctctcatgccgaatcttgctccactgcttggcgatgaactcctcgatcctcctgtcatcggctagctccggcgtctcctccgcggcggtgtctacgtcccgctcgtcgctcttctcgccatccgtcgtactcgcagaagtcagatgaagctcaacgaccgccgcggcgcgatcatggtcgacgaggacgatctctttgctggtcagaggcggctgctgctgttccggttgtttcggtttcttttt

SEQ ID NO: 35591 - DNA, 367 bp, Setaria italica
  Peptide Sequence Number=SeqID_101565
gctcgacgaggcggggcatccagaggtagcgcatgacgtccttgaactgctggctgttgacgtcgcacttgagctgcttggcgtgcttctgcacgcgcgtgcgccagtagttcttgatctcgttgtcggtgcggccggggagatgctgcgcgatcttggaccagcggttgccccagcgcgagtgcagctcgaggatgagcagctgctcctgcggcgtgatgttgccgcgccggaggtcggggcggaggtagttgagccaccgtaggcggcagctcttgccggtgcgcttcagccctgcatgacaggaacacacaaagattaatcatccacacgtcacatcacgccattgctgcccagtagtaatttg

SEQ ID NO: 35592 - DNA, 405 bp, Setaria italica
  misc_feature (2)..(2): n is a, c, g, or t
  misc_feature (50)..(50): n is a, c, g, or t
  Peptide Sequence Number=SeqID_101566
gnggaaaaaagcgttacacacagtactgccagacttttcatttaacatanaattttgtattccaacctcctttagggcatgaaaaagagcttttgcctgcgctacttaaataattttttttaggtaccattctctcttttttggttaaatgatcatgaccatttcgtggttaattccttatggcttagcctacctcatagcaactcttttctatctttagaatttaaagcttttctggacagtttttctattattttatttctatagcaagtgtatttagtttttggcgggatgttactaacagtttcttgcaatggtgttctcatgtgacggtgcttcagtttatctaggaagttatgatactgaggagaaagctgctaggtcttatgatgttgcagctcttaa

SEQ ID NO: 35593 - DNA, 1769 bp, Setaria italica
  Peptide Sequence Number=SeqID_101567
ttttcgttgtttcccgcatcactctccactaagccgagccgccgcccccctctctccacgcgctggtgctcgtcgcttcctgcccaattcggcgtcattcgcccgcccccctattaattccctgcctcgatagtcgatggccgattgccccgtgaaatttccggttttgttgcctcgccggtgttaaatacccacgccgctagggttcaatcgtcgtccggaggcttccccgtcaatctcggcgtgggtacgggcggcggctcaaaggtggtttgtgaatagggagatagatagatagttagggttctaggaattgtttccatctcccgtattggatggaggaatcggtggcaggggttaatcttgcgaagcaaatggagaaggagaaggcggcgggggaaccaggggatgagggtgcgatagagaggagccactctatcaatctgaatacggtgccaccaccagttgctgtggaggcgaggagcactcaggagaatggtgagacgcatggcgcagaggtgtcaggaacaaaggattcaagaaccgggaagccagagcaatccagtggtgctgatcagaagaagttgcccaagtgtgagcaagtcgactatgaaagtgaaactgaaggctgtgagaaccctgccgagaaggctgccctggttactgtggtgggaaatgaagggcttgctgattttggtgatgaggatgagagagctcaggtcctcactattgtcaagaaggatgagcctgcagatgaaatcggtgattctatcaatccgttggcaggggcagggtttagagaagagaagggtgttgttggtgcttctgctgaaatttctgcagtgcgacctgctggctctcgatcatcgagtttccatggagtgaccaggcatagatggagtgggaaatatgaagctcatctgtgggacagttcttgcagagtagaaggacggagaagaaaagggaaacaagtttatctaggaagttatgatactgaggagaaagctgctaggtcttatgatgttgcagctcttaaatactggggtcaaaatacaagactaaactttccgatttcacaatacgaaaaagaactggaggatataagggacttatctcgagaggaatgcgtgacatatttgagaaggaggagcagctgcttttcaagaggggcttctatttatagaggagtgacaagaaggcagaaagacgggagatggcaagcacgcataggactggttgctggaactagagacatatacctgggaacattcaaaactgaggaagaagctgcggaggcttatgatattgctgccatcgagatacgtggcaaaaatgctgtgaccaactttgaccgaagcaactatgttgacaagggtatgcactgtatagaaggggaaggcttgaggctgctcgcatcgaagccagaataataacttgaactaaaatgcggcgtcatctattgagcagttttgcccagagacagatttggaacttagtggtacatacagataggagaactggttgcattttttcaatacttcctgcttttaagtcttaacgattacaattattgaatcacctagcaaaaatcatgtaaggggtttttcgagcatgtaccatagggtttgtaggatagatctttctggaaatgttaccgagtcaatgttcatgttatgtttcggttgcttcgtttttgacaaattgaacattcctcagatctttctgaagaatggccctacctaagtgcattacatattagccactcctat

SEQ ID NO: 35594 - DNA, 417 bp, Setaria italica
  Peptide Sequence Number=SeqID_101568
gttgatggccttgccaaggccgctggaggagcggaacccgccgagctcggggcggtcgcgccacacgcggatgttgcgggagtccgtgcccgtgtagaggaagtccccgccgcggccatggagtagacgtggccgtccgccttgacgagcgagccctgagagctgcgtccagggggacagggcgagcggcgacgcggggtgaggagttggtcgtcgtggtcgtgggcgtggtcggcgtggagcaggcgtagtcgtcgtcctcgttgtccgacgacggcggcggcggcgccggcttgggcgccgccgtgactgccgagtccgggcgcaggaactggataagcttcttgtggttccccatggccgccgcagtttgtgttgcaggaacaatcgaagcaagaagctgaataggagaggctg

SEQ ID NO: 35595 - DNA, 440 bp, Setaria italica
  Peptide Sequence Number=SeqID_101569
caacctatgcagaggtccacaactcgacctactcttaacaatcttttccactcatcgctagcagtgttcatgatgccattttcgttgcagatctttcaagaaagatcatgcgtggtatagctttggcattgggaggggcaattgatgcatttgaaggggaaacagctggagatcctttctgggttttaaggttgattggttatccagtagaaattccagaagagcagcgcactgatactggatgtggagcccatacagattatggactactaacactggttaaccaggatgatgacatatgtgcccttgaggtgcaaaaccgctctggtgagtggatatatgcaacaccgattccaggaacctttgtttgtaacattggagacatgctgaaggtttggtcgaatggaatttatgaatccacgcttcatagagttgtcaac

SEQ ID NO: 35596 - DNA, 664 bp, Setaria italica
  Peptide Sequence Number=SeqID_101570
atgcgtggtatagctttggcattgggaggggcgaattgatgcattgaaggggaaacagctggagatcctttctgggttttaaggttgattggttatccagtagaaattccagaagagcagcgcactgatactggatgtggagcccatacagattatggactactaacactggttaaccaggatgatgacatatgtgcccttgaggtgcaaaaccgctctggtgagtggatatatgcaacaccgattccaggaacctttgtttgtaacattggagacatgctgaaggttttccttcttttcttctttgcaagttcatttaacaatcaggggcttataggttattgttctctgtccaggtttggtcgaatggaatttatgaatccacgcttcatagagttgtcaacaactcgcctcgttaccgcatatccgtcgcattcttctacgagtccaactttgatgctgccatagagccgtgttcagttctgccgggagaaaactggcggtgctgcgaagtatgaaaaggtcgtgtacggggagcatttggtaaagaaagtcctgacgaacttcgtcatgtaaatttcctgggtgcagatgtggtggaaaacatgttactgaaatattggttttgcgatatttcatcaataaaacatgtctgtccatttgt

SEQ ID NO: 35597 - DNA, 1249 bp, Setaria italica
  misc_feature (1181)..(1249): n is a, c, g, or t
  Peptide Sequence Number=SeqID_101571
atcgccgcaagctccaacgatcttatccccaaacctcgagctccctccctctctctacgttcaccatgggttccgacttcaaggcgatccccctgatcgatattggcccgctcgtcgaaaagattgatgatccgaggatggccaacgacgcggatttgctggaggttgtgcggatgctggacgacgcttgcaaggaggccgggttcttctatgtgaaaggccatggtattactgagtcgctattgaaggaagtccgggacgtgacacgcaaattctttcagcttccttgtgaggagaaattaaagattaagatgtcacctcagagtggatatagagggtatcaaaggataggggagaatattaccaagggtaaacctgatatgcacgaagcaattgattgctacactcctattaaacctggcaaatatggagatcttgctaaaccaatggagggatctaacttatggccagaaaacccatcaaattttgaagcactgctggagaactatatcaacctatgcagagatctttcaagaaagatcatgcgtggtatagctttggcattgggaggggcaattgatgcatttgaaggggaaacagctggagatcctttctgggttttaaggttgattggttatccagtagaaattccagaagagcagcgcactgatactggatgtggagcccatacagattatggactactaacactggttaaccaggatgatgacatatgtgcccttgaggtgcaaaaccgctctggtgagtggatatatgcaacaccgattccaggaacctttgtttgtaacattggagacatgctgaaggtttggtcgaatggaatttatgaatccacgcttcatagagttgtcaacaactcgcctcgttaccgcatatccgtcgcattcttctacgagtccaactttgatgctgccatagagcctgttcagttctgccgggagaaaactggcggtgctgcgaagtatgaaaaggtcgtgtacggggagcatttggtaaagaaagtcctgacgaacttcgtcatgtaaatttcctgggtgcagatgtggtggaaaacatgttactgaaatattggttttgcgatatttcatcaataaaacatgtctgtccatttgtgtcaaaaaaaatattttacaaatgaaccttaaaaaaaaaaaaaaaannnnnnnnnnnnnnnnnnnnnnnnnnnnnnnnnnnnnnnnnnnnnnnnnnnnnnnnnnnnnnnnnnnnn

SEQ ID NO: 35598 - DNA, 431 bp, Setaria italica
  Peptide Sequence Number=SeqID_101572
ggtagctccaagcataacgcgcgtgacatatgtgcttaaactttcagtatcacctcttctctgtcttgctgttgtccatttgacttcttccttctgcatggtttgtcgctagttccttgcacctctgcttcacagcctcactgacactgaactcttcacggccgatataccagccatgagcagccatatgttgatgtgatcaatgtacctctcccagtcaaagtcatcgctatggcggcgagccttctccttctcagtcctgtatgaccagccatactgctccatccagtcctgaaacctggccttcatggttgcctcatcgaccttcacaatcacaccgtcttcctgcttcttcacagcttcccggtcactcgcctccttaacagacacctctctgtcgtgcagaggcatccgcccgtaatttgtttgag

SEQ ID NO: 35599 - DNA, 468 bp, Setaria italica
  Peptide Sequence Number=SeqID_101573
cttaggcttaatttactccctcaaaatatttcaattggttcaacctaccacctaatgagatttttctttttttctctgcgtgcaagtttagtttacgttcgaattttgtgggtgataaaggacatatgatatcccaagttagcaaaatactttgagaatttttcatcattatttttcatgcagttttacatctctaaggctaagttaatattcagatgctcctgtcctatgaaaatatgaaaaattattaatgttttttaacataagtcatgaactaatgatgtacataaacttgtaaaatttgaacatgtaaaatttgaacttaaagctcaacttgtacatgaaaaaagaagacatcccattatgaaaggcaattggaccaactgaaatagttcaaggaagcaaatagagtccaattttttttcaaggggctaagcaaaaaaagtaggtcattcaaggtagtaaaat

SEQ ID NO: 35600 - DNA, 355 bp, Setaria italica
  Peptide Sequence Number=SeqID_101574
ccgtggtgccatcacatgatgctgcctgcatcagaagaacacagctgagggaggccaggagaagtttcatgtggagatccatcagctagtgcccaaatagagaatggcgaaaacatcaaataggttccattcactgaaagctccaaatacatgcagagcacaatgaacaagtctcatcacgttttgaaattaatcaagtacatggttgactgactgtatcataatatacaacaacatgcctgagagaataggtaaaacagaaaacaaagaggcggtaaagatgaaagatggggagtgatgaggtttaagaactgatagacaaagaggggcagcttatatgcaatgcaggaaattt

SEQ ID NO: 35601 - DNA, 554 bp, Setaria italica
  Peptide Sequence Number=SeqID_101575
taggagaatactatatacacattcattcatttcatttgctattgtgcctcggtattcattcatttcatttcgctgatgcacaaaactgtagccaagcctctcatctattgatctccagatagaggggtgtggtgcgtgattgtgccttttttaatatcatgccgccaagcccttagaaacaagaggaaaagacatgcaagcccaaatgcttgaaatatcatccccatagccagagggttcatcgcgaagacatcgtcgtcgagaatacggtactcggtaagacggagagtgcagttgccaccgaagaagaaggcctccctgtggaacgggcactcgagctccacctgcttgaaggcgtcagcgatgcaggcggcgcagtcgctgccgctgctctggcagctccagtctgcttgcaaccggttgggccagtacccgaagatatggtacgtgtcaaagcggtgtgcggcggctgcctcggccgggacgacggccgccaggtggtggaggttggcttcgtaggtgctgttggccgtgtagctgccgtcgctgccgca

SEQ ID NO: 35602 - DNA, 368 bp, Setaria italica
  Peptide Sequence Number=SeqID_101576
tacccgtgcagctaaacaaatgctgcgtatatatacgacgatcaacacttttcccacaaacagtacagaaggcaggaacagataccttgctcaatcatcaagtaatgccgtctttattaacagttgatgcagtctatttcttgagtaccactctgcatgtagtaacccacacaaactgcaaccactagcaccaccaaaatcaacagccttagcacaagccacagtgtggaccccttggtaccatccttagtgaagaatctgctaagcagttgtgccagtggccacatgccatgcttcttgctttgcccccggctttcatggcaatatgatttctaaactgagcaaggttgaagatacagaaggcaatg

SEQ ID NO: 35603 - DNA, 1574 bp, Setaria italica
  Peptide Sequence Number=SeqID_101577
tttttttttttaaaaaaagttttttctttttttttttgttcattatgacgtcacgaaagcttcattgatagtagtatatataatatctattacactagtaaagttcaccgatacaattcaacagctcctttacactctacccgtgcagctaaacaaatgctgcgtatatatacgacgatcaacacttttcccacaaacagtacagaaggcaggaacagataccttgctcaatcatcaagtaatgccgtctttattaacagttgatgcagtctatttcttgagtaccactctgcatgtagtaacccacacaaactgcaaccactagcaccaccaaaatcaacagccttagcacaagccacagtgtggaccccttggtaccatccttagtgaagaatctgctaagcagttgtgccagtggccacatgccatgcttcttgctttgcccccggctttcatggtcattgccttctgtatcttcaaccttgctcagtttagaaatcatattgccatacaatttggcgtcccttcttttgtactccttgactgtctccttcagcctcctgtaccccatcttcacatccctgttgtctggatctatttctagtgctttcttgatatctgcctctgccaaatcaagatcaacaagatgggtgtgtgcctgtgcccttctgtacaaggccttcacatttgtgcagtcaagttccagaacctcagtacacagttcctttgcttccttgtaatctttaagttttagtttgcatgcagcattgttgagcttgcagcttatcttaagtggtttcgaaagctgcttctcttcttcgctgaaggaactgtcgtactcaacaaagctcaaagcctttttatatctcttagaagccctggcatacttccccactttaaaccacacattcccttcatctttcttcttagcagctgcttcaatcttctcagaattgttctttaaatcccatgagtctttctccttatcaaatgacacaagctccacttcataataaacagatgagttaggtggaactgtagccagatcttgatctgtttcattagctccgaaggcatgatggggaggaatagtcaccaaggcaacttcacctttcttcatgctaagtactgctttgtcaagcccttcaattacttggtcttcatcagtcttgaactcaaatggctcctcaccatcatgacctttgttgacaaacaaggtaccatccgctaacttcccgattagtttcactctgacaactgcacattcattgggacgatcatagccttcaccctccttaaggatcttcttaaggacctttttatcatggcctatttcagttactgtcttccaggaaaccacttgaagatcaatgtgcaatgtagcatcaggaggcactgcagcttcctctccagaggctgacctaccttgctcaccaaagccatattgtggcttgacagtaaggaatgccttctcattcttcttcatagtcttgactgccttcgatatggcagggcagaaaagcccatctttcacagtgaactcaacaccatcagatttgtacaccacagttcca

SEQ ID NO: 35604 - DNA, 353 bp, Setaria italica
  Peptide Sequence Number=SeqID_101578
aaggagttccaggtcctgaaggaggaggccggcggcgccgtccacgggaagggcggcgacgaccctgtcttgcaggccgtcgcggcgagctcgctgcagaggaagtgggaggagttcaagaagtccgacgagtcgtggaaagaagccccgaggaacttccttgacttgggaggcgtcgacagggacgtcgactcgatggtgggcgtcctgaagcagggatcgggtgttggatgcgtctactcgtggctgtcgagctcccagatgcagcgcgcgacggcggcgacaggcttgccggcagccggccggttccgcacgccggcgatggccgccatggtgcgggaagcccacaggca

SEQ ID NO: 35605 - DNA, 245 bp, Setaria italica
  Peptide Sequence Number=SeqID_101579
catgtggctgcacgccggcgtcgtgcacctggtggccaacatgctcagcctcctcttcatcggcatgcgcctcgaacagcagttcggatacggtgagcccaatttcacaatttgcctgtccctctgtctgtcccccacacatagtttcagttgcaaacaaccttgaataatgctactgatctatcccaatcaattctctgacgcttgcagtgaggatcggggtggtgtacctcctgtccggcctc

SEQ ID NO: 35606 - DNA, 1372 bp, Setaria italica
  misc_feature (1366)..(1366): n is a, c, g, or t
  Peptide Sequence Number=SeqID_101580
cgctcactccaccacccccaccctccacctctctctctctgactctctctctctctccattgcccagcgccccctcatccgcttctcgatcccatcacccttctcgcggtagcaagtaagcaaatggcgacgcgcggggacgtggagaagggcgccgtgcggaaggaggccggcaaggtgccgtcgtcgctgtacccgcagcacgagggggagcgggagtgggtgccgtggatcgtccccgtcttcttcgtcgccaacatcaccgtcttcgtcgtcaccatgtacgccaacaactgccccgtccacaccccggccaaggacggcaagtgcatcggccgattcctcggccgcttcgccttcgagccgctgcgacagaacccgctcctcggaccctcatccgccacgctcaccaagcttggggccctcgtgtggcagaaggtggtgcacgagcaccagggctggcgcctcctttccagcatgtggctgcacgccggcgtcgtgcacctggtggccaacatgctcagcctcctcttcatcggcatgcgcctcgaacagcagttcggatacgtgaggatcggggtggtgtacctcctgtccggcctcggcggcagcgtgctgtcgtccctgttcatcaggaacagcatctccgtgggcgcctccggtgctctcttcggcctcctgggcgccatgctctctgagctcctgaccaactggaccatctacaccaacaaggtggccgccgtgctgaccctcctgttcgtggtggcggtgaacctggtgctgggcatcctcccgcacgtcaacaacttcgcccacatcggcggcttcctcacggggttcctcctggggttcgtggtgctgatgcgcccgcacttcgcctggatggagcgctacagcatgcccgccggcagcgcctgcacatccaagaagtacctcctctaccagtggatcctcatggccgtcgccctcgtcctcctcgtcatcggattcgcggtgggcatggcgatgctcttccgcggcgccaacgccaacgacagctgctcctggtgccgctacctcagctgcgtgcccacctcgagctggaagtgcaccaactgatgatcgaacaccacaagacaatccagagagagatcgaattattccaacaaaattttcttcgtacatccagcgttacacatgtatacacacgtattccttccgggcactgtagatagatagcgtaaaagggaaaggaggcactcactcttgatgggctgtgaactgtagagtcttgttgagatcttatctcttgttcgtttgattcattctttacatgatgcaatacaattattgaggtttggaatacaaaaaaaaaaaaaaaaaaaanaaaaaa

SEQ ID NO: 35607 - DNA, 335 bp, Setaria italica
  Peptide Sequence Number=SeqID_101581
ggagagaggaggagcgcatcgtggcaacaggcagcaaggtacacacgcttccctccagttctctccctccctctcatcactctcgccactgctcccagctgttgcaacctccgaacatccaaagcaagctcctgcacccctgtcagtcgtagctccagccaaaaatcgttggctccggccgcctgctcctccgccctgcacacctcccacgaccttccacgcgacatgattgcattgcagccccctgcggagctcagctgtcctcccacgccgctgacgccttcttgttgcctccccgctgctgcgctcaaccgaaaggccttcctctctttgct

SEQ ID NO: 35608 - DNA, 379 bp, Setaria italica
  Peptide Sequence Number=SeqID_101582
taacttaacatggacctggagagggagagagggatcaccatcaaattgcaggcagctcggatgcgttacgtcatgaataaagagccttactgcctcaatttaattgatacaccaggccatgtcgatttctcatatgaggtttcccgttctcttgctgcttgtgagggtgcacttctggttgttgatgcttctcagggtgttgaagctcagacgttagcgaatgtgtatcttgcattggaaaacaaccttgaaatcataccggttctaaacaaaatagatcttcctggtgctgaacctgaccgcgtcgcacaggaaattgaagagataattggattggactgcagtgatgcaattcggtgttcagcaaaaggaaggtatt

SEQ ID NO: 35609 - DNA, 491 bp, Setaria italica
  Peptide Sequence Number=SeqID_101583
ctccgtttccccggttccggaagcaaagatggatttgaacattcaacagtttcaccatctgcacagttcacacggtaaaccacactcggtgcagtaattattaagttcaaattgtactccctctcaagcctttcctgaacaatttccatatgaagaagaccaaggaacccacatctgaagccaaaccccatggcactagaagattctggttcaaactttagggcagcatcatttagctgaagtttttccagcgcttcacgcaactcctcaaactggatctgcatctatgggaaagaagccacagaaaccattggagtggcttctgaatatcctggtaaagcagaagctgcttttttttgagtagtgagtaattgtatcaccaaccctggcatctgctactgatcgtatagaagcagagatggttggtgatttctttgaccaactgaaatctcgaagcaaaggatatgccagtatggaatactcacttgtcg

SEQ ID NO: 35610 - DNA, 527 bp, Setaria italica
  Peptide Sequence Number=SeqID_101584
caggaacttctgcatcattgcgcacatcgaccatggcaagtcgacgctggcggataagttgctcgagctcaccggcacggtgcagaagagggagatgaaggagcagttcctggataacatggacctggagagggagagagggatcaccatcaaattgcaggcagctcggatgcgttacgtcatgaataaagagccttactgcctcaatttaattgatacaccaggccatgtcgatttctcatatgaggtttcccgttctcttgctgcttgtgagggtgcacttctggttgttgatgcttctcaggtgcaatatatattttcttcctggtgttgaagctcagacgttagcgaatgtgtatcttgcattggaaaacaaccttgaaatcataccggttctaaacaaaatagatcttcctggtgctgaacctgaccgcgtcgcacaggaaattgaagagataattggattggactgcagtgatgcaattcggtgttcagcaaaggaggtattggcatcactgaaatctaga

SEQ ID NO: 35611 - DNA, 683 bp, Setaria italica
  Peptide Sequence Number=SeqID_101585
tgtctagttaatttaatttaaagtttctaaaatttgttacttcccttctcaagccttttcctgaacaatttccatatgaagaagaccaaggaacccacatctgaagccaaaccccatggcactagaagattctggttcaaactttagggcagcatcatttagctgaagtttttccagcgcttcacgcaactcctcaaacttgatctgcatctatgggaaacaagccacagaaaaccattggagtggcttctgaatatcctggtaaagcagaagctgctttttttgagtagtgagtaattgtatcaccaaccctggcatctgctactgatcgtatagaagcagagagataaccgacctcgccagcatataattcgtcaacttgcatctgatttggggataaaacaccaatttcatcagcaacatattcctttccattggccataaaacatatcttgtcccctttctttatactgccatcagtaacacggaagtacacaattacacctctgtatggatcataatagctgtcaaagataagagccctgagaggatcttttgatgtatcttttggttgggggaattttggtcacgagggcatctagtatttcagtgatgccaataccttcctttgctgaacaccgaattgcatcactgcagtccaatccaattatctcttcaatttc

SEQ ID NO: 35612 - DNA, 932 bp, Setaria italica
  Peptide Sequence Number=SeqID_101586
taaagattgaaatgcttacaccgaaggattatattggcccaataatggagctggctcaagatagaagaggcgaattcaaggaaatgaacttcatcacggaaagcagggcaaaaattatttatgagctaccgctagcagagatggttggtgatttctttgaccaactgaaatctcgaagcaaaggatatgccagtatggaatactcacttgtcgggtacagggaaagtcagctagtaaagttggatatacaaatcaatggtgatcctgtggaggcattgtcaacaattgtacatagagataaggcatactctgttggcagggcgctgacacaaaagctcaaagaacttatacctcgacaaatgtttagagttcctattcaagcatgtattggcacaaaggtcattgcaagtgaagccctgtcggccatcaggaaggatgtcctgtcaaaatgctatggtggtgatataacgagaaaaaagaagttgctgaagaaacaggccgaaggaaagaagaggatgaaagcgattggaagggttgatgttccccaagaagcattcatggctgtgctgaaactggaaaaggaggtgctatgaaagagctcatgtaatctttctaaagtctctcctttctgctgtaaagatctctgcttgggagcgacacacgattatacagtccaagagaacaggtcgttgcttaacttcccagttcccatgctcgtccagacccaagcaattaacctgatattcactggtattactttgtatgccaggttatgaagccagaaaatttcgtatggcacaattttggcaggaaaatgtacgaaactcgtcagctttgtggcgaaggccattacgtacttcaattacatgtaatgctacattatgacatgtttcatagttgaatatatcttctgaaatttatgtagcaagcat

SEQ ID NO: 35613 - DNA, 1156 bp, Setaria italica
  Peptide Sequence Number=SeqID_101587
aaaaaaaaattgtgctaatcagtcatcgtcttgtcgcccagctcaccagggtttcctctccgagtccttcgcctcacaagcatcgccctcgcgccgctccggccgattccgccatggcttccgatgagagcaaaaatacgaaaccagagaagccatctgcagcggctggtgcaggcctccccaacccttttgatttttcttctatgagcagcttgctcaatgatccatcaataagagagatggcagagcaaattgcaagcgaccctatgttcaaccagatggctgaacagcttcagaaaagtgctcagggtgccggagaacagggtatccctgcgttggatcctcaacagtacatggaaacaatgcaacaggttatgcaaaatcctcagtttgtgtcaatggcagagcgtcttgggaatgctcttatgcaggatcctgccatgtccagtatgcttgagaacttgagtagtccagctcataaggagcagcttgaagagcgaatggctcgtatcaaggaagatccatccttgaagccaattcttgatgagatagagaatggtggtccatctgctatggtgaagtactggaatgaccctgaggttcttcaaaagattggccaggcaatgggagttaaccttccaggagattctagtgcttccactgtactctctggacctgaagaaactgaggaagaaggcgggtacgacgatgagtccattgttcatcacactgccagtgttggcgatgaagagggtctgaagaaagctttggatggtggagcggacaaagatgaagaggatgcagagggaagaagggccttgcattttgcatgtggctacggcgagttgaagtgtgcggaaatccttctggaggctggtgctgcagttgacgccctggataagaacaaaaacactccgctgcattacgctgctgggtatggccggaaggaatgtgtggatcttctgttaaagcatggcgctgctgtcacggtccagaatctggatgggaagacccccatcgaggtcgccaggctcaacaatcaggatgaggttctgaagttgctggagaaggacgccttcctataagaacccctgggctaaagcgcatcaagctgtcaagctattggatttacatgggtcagacacgaccacactgg

SEQ ID NO: 35614 - DNA, 647 bp, Setaria italica
  misc_feature (629)..(647): n is a, c, g, or t
  Peptide Sequence Number=SeqID_101588
ttgtttatttaagtttaactttaaaaactttacttttccgtttcttttgtttctttattttacgttctttgttctttgaaggaaccttaagaacaaattttttgcattttgcatgtggctacggcgagttgaagtgtgcggaaatccttctggaggctggtgctgcagttgacgccctggataagaacaaaaacactccgctgcattacgctgctgggtatggccggaaggaatgtgtggatcttctgttaaagcatggcgctgctgtcacggtccagaatctggatgggaagacccccatcgaggtcgccaggctcaacaatcaggatgaggttctgaagttgctggagaaggacgccttcctataagaacccctgggctaaagcgcatcaagctgtcaagctattggatttacattggttcatttatttcggttcagtgtggtcgtgtctgtaacttgtgaattttggtgttcttttcatggttatgccgcgtttcaactagtccatgtctaaggagtgcctgtgctttgttcgtgttcatccatatggagatgtcacacaagtgttacaggaattgattgcaaggtcaatttgaaggcaatttttaaccaaaaaaaaaaaaaaagnnnnnnnnnnnnnnnnnnn

SEQ ID NO: 35615 - DNA, 1378 bp, Setaria italica
  Peptide Sequence Number=SeqID_101589
tgttcttaaagttacttttactaagttctttactaaagcttcagctagaccatggcgtcctatgcttcggcttcgttcatgctcttgctgctcctgcaactatggtcttgcagtgaagcattgcccggcggtcaccttgtcgacccgacctgtcctccggagtggccatcagtggtggccatgtcctccgagcacggcgagccgtcatgccagccgccagcgccacgcatcccggtggccgtgttcccctacgatgttgacccgatgcagttcgccttgaacctggagttcaccgaggtcgagttcttcctgcacggggcgtacggcgtggggctcgacaagatcgcgccgaagctggcgctgggcggcccgccgtccgtcggcgccaggaaggccaacctcgatgaggtgacatggcccatcatcgccgagtttggcctccaagaagttggccacgtcaggtctatccagcgcacggtcggcgggattcctcggccattgatagatctcagcgcccacaacttcgccagggtgatggacgaggcgttcgggtacaagctggacccgcccttcgatccctacatcaacagcctcaacttcctgctggcctcctacgtgatcccctacctcggcctcaacggctacgtcggcaccaaccccatcatcgacggctacgagacgaagaagcttctagctgggctgctgggggtggagtcagggcaggacgcggcattccggacgctcctcttcgggcgccgcgacgaggccgtgccgccgtacaacgtcacggtggccgagttcacggaccgcgtgtcggcgctgcgcaaccggctggggcggtgcggggtgaaggacgaggggctgacggtgccccgcgagctgggcgccgagggcgccatctgcaccaacgtgctctccgccgacagggactcgctctcctactcccggacgcccgccgagcttctcaggatcctttacctcaccggcgacgagcacgtgcccggcgggttctacccggatggcgccaacgggaagatcgccaggtcgttccttggcaaataaaccacatcatgagccaacgaattgcctgcaggaaactagctaataatagttgccattgctttggtagcttctttatgtccatgaattatgagttttaatctgatcgagtgaagtgttgagtagcgtgcgattggtttgtctatgtattgaagtacatattgcactgcttatgtgcagctcgaactataagtacatgatgtataaggtgtagaagcgtagaatgctgcaaccggagcatatatacggttagttcaacttgcaagagttgctgaataatgctgcatgattacgtaacaaagaaaaaaaaaaaaaaaac

SEQ ID NO: 35616 - DNA, 228 bp, Setaria italica
  Peptide Sequence Number=SeqID_101590
ttggacaagcacggcgcttgtcgcgcggggcgcagggccgtcgctgatgcggccgagcagcgtctcaagtgcagatgcgcagcgcagtgacacggaggtccaggtcccttgcccacccgcagaaaacctccccaacggcgagtaggcattgcagcacggcagaagagctccttgtcatcacagaaggcagcaacgctcctttcagcatgcgcaatcacggcccatgga

SEQ ID NO: 35617 - DNA, 507 bp, Setaria italica
  Peptide Sequence Number=SeqID_101591
acagatggtgcattagcatctgctatatccattggtgatgcaggatcctcacttatggcagaactttttcttttcctgtcataattactcttttcttggtcccatcattcacctgtccattttgggggttggtttcctcagcaaccttagcactgtcttgcttagccaatgcaacatcattatcttcatcactgcagctatcaaatattgaagaagcattgcgcttgacagcaaccttagcaccgtctttgttacccaatgcaacagatattggcacgttatcttcttcatcactgctgctatcaaatattgaaggagcattgtgcttgacagcaggcttcatcactggagaaccatcatcattgtcatcggtgctatctacttggtacttcttcttcaagtgccgccgtctttcagccttacaagtcttttttcacaagctatttgtacaaaattggaaacttgttataaaacattaggattgaactgtgagcagatatctttttg

SEQ ID NO: 35618 - DNA, 473 bp, Setaria italica
  Peptide Sequence Number=SeqID_101592
ttttaaagttaccttaactagcagttaatcaaccgctttagtgggctctggtcaagtaaagattggtttacccctttttcatgtttttggccggtcatctcaaagggtgttcccattaggaaatggatttttgctatgccgtctgataataatacttgaaattggattcctgctagttactggccattttgttcctacaaaatttatagccactattttttaacaagtccattgtattgcttgccatactcttttttcaatacacttctgatattggtccactctgctgagggctcgtttgttctactcgctttaatccacatgtttagtttgatattctgacaataaatacttttgcacttatcctaattatacacagaaaaatctcggttgctcaagcagaagcgcatttctgatgcaaagagaattgataagaagaatattaggtctggtgtcagatcaaaatatgattg

SEQ ID NO: 35619 - DNA, 2104 bp, Setaria italica
  Peptide Sequence Number=SeqID_101593
ctaatatcactattccgtccgcgaacggtccggttctgaacttctgatcacctttcggtaaaccagcagatcgtttagtactgattttctatcaaaacggaaagcagctcgaaaacacctctctcgctcgcacctcgttatctaccgccgcgagttagtatccatgtaagagggaagaaaatggagggcgtatgagcccaacctagaccatgtactgcatcgccacctgcatcagcctggtgtggggtatgctcagcgtcgcgatgccccgcctgcagttcttcctcaggaacgcgtagaagtagttgatcaccagcttcttgaggaagaaggactccttccgggcccggatgtcgccgtgccccaggaggtacaccacgcccgactccttggccttgtggatgaacgagagctcattgtccaggctgcgccgcccgttcatcgcgtcgtccagggatccgtagtcgatcgacgcgcttgatccgagggccgagttgtcggcaccggcggactcagcgagggggacgcccagcgagtagatgctgccgttggggccaacaaggactcttgatgacgaagatgcgatctcctcttcagagtctgtgtcgtcattatgatcgctctccagagagcgttcctgggcctcccggcgtatgaacttttccaggctttctatcagaagctgttcaaacgcttgggggttctccttgcgtacatccttgtacccatacctagcaatgcagcggaacatatggtagttctttgggcagacccgacgaaagagaaacctctcattctgtggcacaactggaactggaacccatttgatgcagacaaaaatgatcattgaatgcatggctggcagtgtggtgaggaagtgactaaagattgaaggaacccccctgaccagttcattataaagcaatccaattccaggtgctctaactgtaccaagattgcagcctagctgcatcaacaaatccattgaaagcttctgcttgacctcagtttcgtacttcaatttggtaccatagttccatatgtacattaccaaatacagtacagctgcaaataccaaaagaacccaacttccatctgctgcacttcccaaaactgaagaaaagaaaaataactccagccccaggaagagggtgagaaagcatagaactacaacgatgttgacctgccatatcaaaagcattataatggtcaccaggacagtagtcatcatcatgacgccaagttctgccatgccatatgcattgccaatctcatttatgctcccaaatactgtaacaaatgccagacaagaaaccagcaagaaccagttcatcaccgggatgtatatttggcccatgaactttctagaggtgtgaataatcttgaggcgtggaaaacagccaagagctgttgcctgctttatggttgagaatatagcagttgtcattgcacgactagcaattagtgcagccaaagtagctacaaataccactggccaaaatgcctgacctgggatggacaaaaagaagacctgctgacttttagttaagttctccataagaaatgcagcttgccctagatatcccagtaaaaggcatggaagaacaagaaacacaaaggtaagctgaaccgatctaacagagaagtagcataaatcagcaaacatagcctctgatcctgttgcacataaaagacagcctccaagggacatccaagcttgagtgggatttctttcaaaatagtagtagatatacacaggattgaatgcatgcaatacttctgaaccgtatattctaatgttataaattcctatcccagcaaggcagcaaaaccatatgaacaaggcaggcccaacagcaagccccactttgctcgttccaaacctttgtagactgaagagaacaataagaaaggcaacagttatcatgaccacttcaccttcattaacacttgatattccaaccttcaaaccattaaccgcagacataactgacattgccggtgtgacaacaccatctgctatcaccattgaagtaccaaatagaacaagcatcaaaagcagcttctttaacatagatgaagtctcaagacgctccttgatctt

SEQ ID NO: 35620 - DNA, 451 bp, Setaria italica
  Peptide Sequence Number=SeqID_101594
cgtgttcggcaactcgttcgtgacgatcctcgggcagttccccatcgggatactgggcgtcatgctgctcttctctggggtcgagctcgccatggcgtcgcgcgacatgggcacgaaggaggagtccttcgtcatgctcatctgcgccggcgtgtcgctcacgggctcgagcgccgcactggggttcatctcgggaattgttttgtacttgctgctgcgcctccgagacgtcgactaccgagggctgctcggtcgttggggcgctggccggcggcaaaccgggaacaaagctggaggagacggtgacgaagatgcttgatcaacaacacatatcaggaatcaaggttacaacttactccctccatcccaaattgtaagtcattccaagaatcttagagagttaaagcatctcaagtttaaccaaaattatagagaaaattttaaagattta

SEQ ID NO: 35621 - DNA, 853 bp, Setaria italica
  Peptide Sequence Number=SeqID_101595
tgctaaacataatatggttggattcaacatgttcaacaaagaaaggatcaagttaagtgagcttcttactttctgcctgcagtttagttcatagcctactctagatggcctccttaaatttcttgtacatataaaattatttgtttctttgtacttatgaactggaaaatggtgcaactagaatatataagaatgtaattttacggctgggggctccaccctttttttatatatagaacttgtggttctagagctgatatacaaactttctagagttacattgcactgaagctactgttgagtgtgttacagttcattgtatagctgtacaaattcagctaggtcattctggttaattttctttctagtcatactcactttccaatagataagaggtacttgctgaatgtgttgtactacctagtactgagacttggaattctaatctacaagcacttaagaactcagcagggtaatgcactcaaatagttctttacatatagcctaactaaattatcatgatggtctgttttactaatttactttaatgacctatgttttccagttaaattctgaggagtcatggttatcatttgaccaagaagctaaagagctccataacaaggtgcgggcattttcagggtggcctggaactcgtgcaaagctacaactcataaatcaaaatggtgaacccgatatgctagagattaaggttaacagtataagggagtaattttcatgtgacaaggtcggagatgaaaacgagatactattctccgggagttccttgctgattccttgcagtggatcaacctggctcgaggtgttggaacttcaactccctggaaagaaa

SEQ ID NO: 35622 - DNA, 245 bp, Setaria italica
  Peptide Sequence Number=SeqID_101596
accccagcagcgcgccattattaggatgataatggtcctcctcccccttccctaccactaggggcatgccattgatgccatcttgactgttactgtactctccaacctctcgtctccgctcgctcttccagatctcatccgcttctcccttttggcattgtactgtttcttgctgctccttgtctccgcgtgtgatttaaggagtctgacttccgtctgctggcgcgtcttgctttctttcttgg

SEQ ID NO: 35623 - DNA, 2085 bp, Setaria italica
  Peptide Sequence Number=SeqID_101597
gcttcctcgtatcaaatctagggtttccgatcgaaatcctccgcctccgccgccgccgccgccgccgccaccaccggcgataatgtcggccagcgccgagcctgagaaggacgccgcggccgcggccgccgagggcgacgagaaggcggaggcgaagggcagcggctccggctgggagctgctgtactgcggcgggacgagcttcgactccatgggccggaaggtggtgggcggggcgcagggcaacctggtgtcgccgacgcggttgcgcccgctcgtgggcgtcgacatccgcttcgtcggctctggctgcaccgcttgccactgtgttgctttggatgctgaaggcagatgttatacatggggtcgcaatgagaagggacagctagggcatggggatactcttctgcgcaacctgccaactgttgtttctcaactgtcaaaatacaaaatcatcaaagcaagtgttggaagaaatcatacagtggttgtaactgatgatgggaaatccttctctttcggccacaataagcacgggcagttagggacgggctccttaaggaatgaaattgagtcatcaccagtgccctgtatcgttgccgaagcaaccactgctgtctgtggagctgattttacggtctggttgtcgtcagtggaaggctcttctatacttacagcaggccttccccagtatggtcaacttgggcatggaactgataatgagtacaatgctaaagattcatctgtcaagctgacgtatgatcctcagccccgcccacgggcaatagctgcattatctgggaaaactgtagtaaaagttgcatgcggaactaatcatacagttgcagttgattccagtggctttgtttacacctggggttttggtggatatggaaggttgggccacagagaacagaaggatgaatggcaacctcgccttgtagaagtcttccagaagcaaaatgttctgcctcctaatgctattgtctcggctggttccgcaagttctgcatgcacagctggtggtgggcagttgtacatgtggggaaagatgaagaatacaggcgatgattggatgtatccaaagcctgtaatggatttaagtggttggaacattcgctgcatggcttctggtaacatgcaccacgttgtgggtgctgatgattcatgcataagctggggtgttgcccagaatggggagcttggttatgggcctaatgggcagaagtcatctgcaaatcccaaaaaggttgacattcttgagggaatgcatgttacaagtgtcggttgtggatacggactgtctctaattgttgtggacagggcaaatattggtgatcgacttgataagctggagatttatgatggtgatacctccactgaagtagaggtggaggtgcaagcagccaagaaggcgtctaccagcaccaattcccgtgccaacaagcgcaagaaaaccaaggatgattctgaatctgaagaggatgatgatgaggatgaaagtgaagatgatgagaatggggaaatagaagaggccaagggcaagcgtggccgcaaaccctctaatagggggagaggtaggggagccaaaaaggcagcccccgagccaaagccatctggaaggggcagaggccgccctaagaaaactgagagtcctgctcagaaagctggaagctcaggcggccgtggtggaaagagaggaggaaaaagaggaagaccccggaagtgatcatatggtctgcactaaggtggtgttgaagtcagatcaagtggattctaactcctgatgtgagtcatcatgattaacactgatatcaaccctgtttctttacttgtatgttgcagttgcagttgattccagtggctttgtttacacgtatgtgttttattcaccatttcttaacacaatttcaagctgaaatagttaataggaatgggtgcctctttatatgctgtatgaagtccacatatgtgcaggacatatcaatttttcagttctaataatgttttctattctcttactgtgttttcttttgtgtgtgtttggcagctggggttttggtggatatggaaggttgggccaca

SEQ ID NO: 35624 - DNA, 297 bp, Setaria italica
  Peptide Sequence Number=SeqID_101598
tgcacgccgccgagtgcgcctacttcggccagcccagcccgccggcgccgtgcccgtgcccgctgcgccaggcctggggctccctcgacgcgctcatcggccgcctgcgcgccgcgtacgaggagagcgggcacccgccggagtccaaccccttcgcggcccgcgccgtgcggatctacctccgcgaggtccgcgacgcgcaggccaaggcgcggggcataccctacgagaagaagaaccgcaagcgcaagcagcccgcgccgacgacgggcccaggggaggcgtcgtcgtcatcgg

SEQ ID NO: 35625 - DNA, 357 bp, Setaria italica
  misc_feature (351)..(351): n is a, c, g, or t
  Peptide Sequence Number=SeqID_101599
ccatttgttgaacatctcacggctgaatcgaatgcgtttgagatcgttgccaccttgcgccagtgagacgaaggtgatgagcacgccaggctccacctgcgccacccactccttcgcgtcgtcttccttgccgccgccttctgacgccatctcgtcgtcctcctcctcgtcgccggcggggaaatccgtgcgcacgctcatggacggcgtggcgtccccgcttgacagggcggcgcctccggcgcgcaatcgcggagtcgaggccgccgagctcccggtcgcggcggtacgcgtagtggaagcggtcggaggccgagccggcgtcggagcccccgaagccgctgccgccgnggtggt

SEQ ID NO: 35626 - DNA, 207 bp, Setaria italica
  Peptide Sequence Number=SeqID_101600
cgcaggttctgcttggtgtatacaccagcggacacaatcgtgccagaaagcagcgaggaagttattagcaagtaaaacatgctgccagtacagctagttgcatgcatggtttgctttttgtgcctgagattaggatgcgatttgcatcctctgccattgggttgaataaggttctgcttcaatccatgctggcaaggattgaataag

SEQ ID NO: 35627 - DNA, 330 bp, Setaria italica
  misc_feature (275)..(275): n is a, c, g, or t
  Peptide Sequence Number=SeqID_101601
tgatcatcttatgcaatgggtttaggaggagagggctatcttaatttcctggaataaacttaccacttggaagtctttgcggaaataacaacagttatgacaaatgccgtcgaagatttgacctgggtgacgcggactaccttaggtaccatggtatgcaagagtttgatcgggcaatgcaacatcttgaggaaaaatatggattcatgactgatgatcaccagtacatttctcggaaacacgaggaggacaaggtgattgtattcgaaaagggnatttggtatttgtgttcaacttccattgtaacaacagctatttgactaccgtgtt

SEQ ID NO: 35628 - DNA, 550 bp, Setaria italica
  misc_feature (225)..(225): n is a, c, g, or t
  Peptide Sequence Number=SeqID_101602
ttttagttttttaggttttactttttagttaccggtaagtaattcttggggttgttattaaggttggttctttggtacttctagtacgtctggacttcttcggtggattcggcaggatccatcacaccgcagagcacttcacggacggttcgcatgacaacaggccccattcgttctcggtgtatacaccaagcagaacctgcgtcgtctatgctccagcggacncaatcgtgccagaaagcagcgaggaagttattagcaagtaaacatgctgccagtacagctagttgcatgcatggtttgcttttgtgcctgagattaggatgcgatttgcatcctctgccattgggttgaataaggttctgcttcaatccatgctggcaaggccagacatcttgctgtgtgttgtcctctcagtttagtaggtcgtcggtacccttcaggatgtcggttaaacatagcaattttgttcctttcataatgctagatgcctggttttgaattctgttcttctggtacgcagctcgttattaacaaaaaaaaaaaaaaa

SEQ ID NO: 35629 - DNA, 661 bp, Setaria italica
  Peptide Sequence Number=SeqID_101603
tttccaagaggtccgcaaagacttccaagtggtaagtttattccaggaaataacaacagttatgacaaatgccgtcgaagatttgacctgggtgacgcggactaccttaggtaccatggtatgcaagagtttgatcgggcaatgcaacatcttgaggaaaaatatggattcatgactgatgatcaccagtacatttctcggaaacacaaataccaaatctcccttttcgaatacaatcaccttgtcctcctcgtgtttccgagaaatgtactggtgatcatcagtcatgaatccatatttttcctcaagatgttgcattgcccgatcaaactcttgcataccatggtacctaaggtagtccgcgtcacccaggtaccatggtatgcaaggtagtccgcgtcacccaggtcaaatcttgaggaaaaatatggattcatgactgatgatcaccagtacatttctcggaaacacgaggaggacaaggtgattgtattcgaaaagggagatttggtatttgtgttcaacttccattgtaacaacagctattttgactaccgtgttggctgccggagatctggggtgtataaggtggtcttggactcagacgctggactcttcggtggattcggcaggatccatcacaccgcagagcacttcacgg

SEQ ID NO: 35630 - DNA, 1039 bp, Setaria italica
  Peptide Sequence Number=SeqID_101604
ttggttttactttgtattgttggtaaatgatctaattcacggactttatcctgaggctgtaaccattggtgaagatgtgagtggaatgcctacatttgcccttcctgttcatgatggtggagtaggttttgactaccggctgcatatggctgtggctgacaaatggattgaattgatgaagcaaagtgatgaatcttggaagatggccgatattgtgcacacattgacaaatagaaggtggttagagaagtgtgttacttattctgaaagtcatgatcaagcactggttggtgataagactattgcattttggttgaatggacaaggatatgtatgatttcatggctctcgacagaccttcaacacctaccattgaccgtgggatagcattgcataagatgatcagacttatcacaatgggtttaggaggagagggctatcttaatttcatggggaatgagtttggacatcctgaatggatagattttccaagaggtccgcaaagacttccaagtggtaagtttattccaggaaataacaacagttatgacaaatgccgtcgaagatttgacctgggtgacgcggactaccttaggtaccatggtatgcaagagtttgatcgggcaatgcaacatcttgaggaaaatatggattcatgactgatgatcaccagtacatttctcggaaacacgaggaggacaaggtgattgattcgaaaagggagatttggtatttgtgttcaacttccattgtaacaacagctattttgactaccgtgttggctgccggagatctggggtgtataaggtggtcttggactcagacgctggactcttcggtggattcggcaggatccatcacaccgcagagcacttcacggacggttcgcatgacaacaggccccattcgttctcggtgtatacaccaagcagaacctgcgtcgtctatgctccagcggacacaatcgtgccagaaagcagcgaggaagttattagcagtaaacatgctgccagtacagctagttgcatgcatggtttgc

SEQ ID NO: 35631 - DNA, 1061 bp, Setaria italica
  Peptide Sequence Number=SeqID_101605
gggtgacgcggactaccttaggtaccatggtatgcaagagtttgatcgggcaaatgcaacatcttgaggaaaaatatggagtatgttcttttttttggggggggtctgtaaatcattgtttttgctaacatcaaacttggtattcattccctctataatgtcatttagttcatgaccattttgctatttcaatggactagtaataataagctaggaaaaatcagtaatgaattcttatatgttgcatcactaactctatttatggtgtctgattttaactattcttttgcgttaatctattaacttggcaaatcttagttccatgatcataacagcaatgaagattttctgatgaaattggctatgtaattgcagttcatgactgatgatcaccagtacatttctcggaaacacgaggaggacaaggtgattgtattcgaaaagggagatttggtatttgtgttcaacttccattgtaacaacagctattttgactaccgtgttggctgccggagatctggggtgtataaggtggtcttggactcagacgctggactcttcggtggattcggcaggatccatcacaccgcagagcacttcacggacggttcgcatgacaacaggccccattcgttctcggtgtatacaccaagcagaacctgcgtcgtctatgctccagcggacacaatcgtgccagaaagcagcgaggaagttattagcaagtaaaacatgctgccagtacagctagttgcatgcatggtttgctttttgtgcctgagattaggatgcgatttgcatcctctgccattgggttgaataaggttctgcttcaatccatgctggcaaggccagacatcttgctgtgtgttgtcctctcagtttagtaggtcgtcggtacccttcaggatgtcggttaaacatagcaattttgtttccttttcataatgctagatgcctggttttgaattctgttcttctggtacgcagctcgttattcacctcatgatcttgtgtctgcacttctttcataaagttgagcactgctgctattagagttgatc

SEQ ID NO: 35632 - DNA, 2549 bp, Setaria italica
  Peptide Sequence Number=SeqID_101606
tccggttggaggaggttcgcggaggcgcggggccatgcgcgcggcggccgcgtccgggaaggtggtggttcccgagggcgagaacgacggacttacgtcttcggccgactcggctcagttccagtccgacgaattggaggtaccagacatcactgaagatcagatcgagtcctcagagacaatgcacgttgcccgtgaggctgatgctcaagccttgaacagagaggtactaggatcagctccccaggtgaaaccacgaactgttccaccaccaggagatgggcagaaaatattccagattgactccatgctgcaaggctataagtaccatcttgagtatcggtacagcctctataggagaatccgttcagatattgatgagcatgaaggaggcttggaagccttctcccgtagttatgagaagtttggatttaatcgcagtgctgaaggtgtcacctatcgagaatgggctcctggagcacattctgctgcattggtgggcgacttcaacaactgggatccaaatgcagaccgtatgagcaaaaatgagtttggtgtttgggaggtttttctgcctaacaacgcagatggttcatcacctattcctcatggttctcgcgtaaaggtgagaatggatacccccatcagggataaaggactcaattcctgcctggatcaggtactcagtgcaggccccaggagcaataccttatgatgggatttattatgatcctcctgaagaggtgaagcatgtgttcaagcatcctcaacctaaacggccaaaatcattgaggatatatgaaacacatgttggaatgagtagcccggaaccgaagatcaacacatatgcaaacttcagggatgaggtccttccaagaataaaaaaacttggatacaatgcagtgcaaataatggcaatccaagagcactcatattatggaagctttggataccatgttactaattttttttgcaccaagtagtcgttttggaaccccagaagatttgaagtctttgattgataaagcacatgagcttggtttgcttgtgctcatggatgttgttcacagtcatgcgtcaagtaatactcttgatggattgaatggttttgatggtacggatacacattactttcatagtggtccacgaggccatcactggatgtgggattctcgtctgttcaactatggaaattgggaggttataagatttcttctctccaatgctagatggtggctcgaggaatataagtttgatggtttccgttttgatggtgtgacctccatgatgtacactcaccatggattacaagtaacatttacggggaacttcaatgagtattttggctttgccaccgatgtggatgcagtggtttacttgatgttggtaaatgatctaattcacggactttatcctgaggctgtaaccattggtgaagatgtgagtggaatgcctacatttgcccttcctgttcatgatggtggagtaggttttgactaccggctgcatatggctgtggctgacaaatggattgaattgatgaagcaaagtgatgaatcttggaagatggccgatattgtgcacacattgacaaatagaaggtggttagagaagtgtgttacttattctgaaagtcatgatcaagcactggttggtgataagactattgcattttggttgatggacaaggatatgtatgatttcatggctctcgacagaccttcaacacctaccattgaccgtgggatagcattgcataagatgatcagacttatcacaatgggtttaggaggagagggctatcttaatttcatggggaatgagtttggacatcctgaatggatagattttccaagaggtccgcaaagacttccaagtggtaagtttattccaggaaataacaacagttatgacaaatgccgtcgaagatttgacctgggtgacgcggactaccttaggtaccatggtatgcaagagtttgatcgggcaatgcaacatcttgaggaaaaatatggattcatgactgatgatcaccagtacatttctcggaaacacgaggaggacaaggtgattgtattcgaaaagggagatttggtatttgtgttcaacttccattgtaacaacagctattttgactaccgtgttggctgccggagatctggggtgtataaggtggtcttggactcagacgctggactcttcggtggattcggcaggatccatcacaccgcagagcacttcacggacggttcgcatgacaacaggccccattcgttctcggtgtatacaccaagcagaacctgcgtcgtctatgctccagcggacacaatcgtgccagaaagcagcgaggaagttattagcaagtaaaacatgctgccagtacagctagttgcatgcatggtttgctttttgtgcctgagattaggatgcgatttgcatcctctgccattgggttgaataaggttctgcttcaatccatgctggcaaggccagacatcctgaagggtaccgacgacctactaaactgagaggacaacacacagcaagat

SEQ ID NO: 35633 - DNA, 463 bp, Setaria italica
  Peptide Sequence Number=SeqID_101607
cgcatacttgccatagattttatctaattcctgatgaacagaactgatggtacttgctcttttatgaacctgcttcagatgcctaattgtctctgtatcagctgggatcgtgtggttaaagcccatacacatgagcacattggcacgggtgaatggcccgaatccagatatggcagataactctttattcagtctctcacaggcggattcgatagtagatacctcttctgcagctggtacagatattctacacatctcttcaagtttttgtaggcataccttcccttctacgacgccccgtgcaagcattacaattctcttagctcgatatccaagattgcagcgcttggctaaaaagccctcatcaagatttgccaattcttctggcgtggggaaatcaccaatgcagtcttccaagccaggagcattgttcaagctaagctcagaattatccaatgatggc

SEQ ID NO: 35634 - DNA, 444 bp, Setaria italica
  Peptide Sequence Number=SeqID_101608
gacttgctgtaatcagtgagaggagtccagtgaccatcatcagatttcccagattccttggctaccttcttctttcttctgcagatgatgcacacaccaatagaggcaatcagtagcacaacaaatccaccaacagctccaccaatggctgctggtgcagcaacctttgggtttcttccaccaggcttcccatcaggttcaacagatggaatgggacggttgagcccattaagactgttatttccataattctgtatcttgaagatctcgagaccattcaatattgcatcatagtactctggtctcgacgaaagatcagggtgaagggcaacccacaagtccatctgaccggaaccaggtgtgatgataacgtagtctgtgtatgctgttctgccgattcctccgctccatgcgatgacatccatttgctgctgtgctgtctgg

SEQ ID NO: 35635 - DNA, 2802 bp, Setaria italica
  misc_feature (45)..(45): n is a, c, g, or t
  Peptide Sequence Number=SeqID_101609
atatatatatatatatatatatatatatatatatatatatatatntaaatccagcagtagcctccaatcaccttccctcgtcaataactccagtcatcgccggtgacggggtgaggggtgcaatcgtctccctctgcgcgctgaactccccagttgtgtcaccggagtagttactggtagcgtagctggtgttcccgcccctgcgctgccactcagtgatgtagcttggcttcgtcaccacctcagtcacctcaatgtctccggtgagcattttcacgaccctcgacattggtggtcgctggtgaggtgatccctgcgtgcagaggagcgcgacatggataactctcgaggcctcttcactgtcgaaatcttcgatccttggatccaatatgccgagtgcttgatccctttcatacatctcccaggcccactcaaagaggtagatcttgtcttcctcctgagaattgtccgtgtttgatcggccagcaatagtctccagtgcaaccaccccaaatgcaaaaacatcggccttttcagtcagatggcctctcatcgcgtactcaggcgccagatagccaaatgtgcctgcaattttagtgctgacatgagtcttcttctcatcgaacagcttggcaagcccaaaatcggagatcttgggggtgaggtcgatgtcaagtaagacattgctggccttgatgtccctatgcacgatgcgcacgctggactcctcatgaagataggtcaggcctcttgcaattcctaaaatgatctcgaagcgtgttggccagtcgaggttcaagccactgtccccgaagagtgctcgatcgagacttccattctcgtggaactcatagaccagcagtggggtgttactgtcaatgcagcaaccatatagcttcacaagattgcggtgttgcacagcagaaattgtggccacttctgtcacgaactggtttttcccctgatgagacgtttgagaaagttgtttcacagctattaccctcccatcaggtagcttacccttataaactggaccatatccgccttccccaagaatattttgagaactgaaattgtctgtagctaacttcagttcagcgttactgaagatgtttggtcttccgaccatgttgtaaagctcttcttgctgctgtgccactcttcttctcttctttaccaacataaagactccaagtagggctgctaatcctaaaactgaagcgccaatcactattccagcaattgcacctgctttacttttctttttaggaacaccatttctcacagtaggagtaaaatttggtgtcacacttaatgctgagatcatcggtccatagtacccttgtgttggaatgcaacaagtgcctttgccagcccagaagagatggatctcgaggaagtttttagacacagtagcattgtatttcttatacactgcaacataagattttccaccagccgtcttccttatgtcaaagttcttttcttttagatgaccctggacatatatatcgaaaactctccttccaatgctttgccaggtcggtgactctggataagcaaactctgcaaactgaagctcaacagtgtaatttccattctcaagtccaatgccataatatctcagcgatgatggtgacatccttgctgtctggaacagttccgaatcctgtgcagtctgaaactgccgggggctatatattatgtaacttccatttggggcttcattaaattttcctacattgctaacaccccatcttgtttgaccagtaacataatatgatgcagctccagtatttgtaggatcaatttcataaaaagtattatttgagcctgtcatagatctgctactgccacagtctaccgcaaaggaagaatattctggagaaccacggaaacaaggaatatcttgctggagacagtttaggcctgaaggtagaatgctgttgttgctgctgccaaggacaaagttgtttgccaccaaattcaattgcaaattattctgggtagcccaagaaggaaagctaccagagagctggttgtatgagaaatctaaattgttcagtaaagggcttttaacatcaggcaggcttccagaaaggctgttattcccaagaaacaagaatccaagcttggccaaattcagtatggatggtggaatttggcctgtgatattgttaaagctcaagtccagtaaggtcaatcccgctagattagaaaagtttactgttgcaagattatcagatatcctgcagtttctcagtattaggacatccaaagatgtcaagttactaataaacgacattgaagagctcccatttacaatatcaccaatccgtaagtttgtcaattttgttagattggacaaactttccggaattgggccttcaaacgaatttccttggaatctcaaaacttctaacttagtcaagctcccaataaaatcaggtatttttcctgtgaaatcgttatctgatgcccacaggatcttcaagttcttaagctttgagaatgttgaagggaatggaccactgaagccagagctatcaaaatatatttgctccagtttggccaagttgcccaattcagaaggaagttcaccagtaaaattattcaagctaatacccaatgagataaggttagtaagattcccaagctcctttggtagtgttccagatagtggattgatagccaaggttaggtactgcataggaaattttccaatgaatgatggcacgggacctgtcaaataattctgcatcaggttcaggttgctgagataggtgaggttctgcagctcgg

SEQ ID NO: 35636 - DNA, 222 bp, Setaria italica
  Peptide Sequence Number=SeqID_101610
atgccatccagaattgccaaaactttgagctcttcatgttcatcccgtgagccttcggtagcctgaagaacctctccctccaactggaccatactttcaagcatccacttgtcaacaccatcagcatctgctctaaggaaccaaataaacagtgtgaattcaattgcggcgacaatgcagagcttcccgtcattggtgtccccagtcatgtagaggtggcct

SEQ ID NO: 35637 - DNA, 419 bp, Setaria italica
  Peptide Sequence Number=SeqID_101611
acatttttgttgtaatggataattgagtaaactgcaagcgacagtactggtgaggccaaaagaaagtttggcagctgcttcacttggaagtatctcaagaaaccaacaccccagtaatggctttgaatgaagccatacaaaagtggaactttcgctttgcaccatggcctcaattcctcagagctcccgtgtacacatatgttcaaatatccatatgcttggaaagcaaagaacggtagcaatatgaaaatggagcgcaaagccgcagccacaagggcccatacagccaacatgggccttttcttttggacagcagcatcatatgcttgtagcaaggcctgaaaacagaaataaccagcattaagtgctccatttgacctagctgaaccagagagagcgagcattatcactgcaacagt

SEQ ID NO: 35638 - DNA, 363 bp, Setaria italica
  Peptide Sequence Number=SeqID_101612
tcgcggcgttcatcatgctccatccgaccaagtacgccgccatgctcgccgagaaaatgcagaagtatggcgccaccggatggcttgtgaacaccggatggtccggcggcaggtacggtgtgggcaagaggatcaggctgccctacacccgaaagatcgtcgacgccatccactccggcgagctcctcaccgagatcgacggcgtgccatcggaaatcctcgacccgatcaacacctggacggacaaggccgcgtacaaggagacgctcctgaggcttgccgggctcttcaagaacaacttcgaggtgttcgccagctacaagatcggggacgacagcagcctgaccgacgagatcctcgccg

SEQ ID NO: 35639 - DNA, 340 bp, Setaria italica
  Peptide Sequence Number=SeqID_101613
cctgggcacgcagtacgccggggagatgaagaagggcctcttcggcgtcatgcactacctcatgcccaagcgcggcatcctctcgctgcactccgggtgcaacatgggcaaggacggtgacgtcgccctcttctttgggctctcaggtaagatactgggggtggatcccaacaggattgtggtgccgtcacctgcccaaaccgcatctgacgtttcgcttagcttatcctatcctatttatgcctcggatttgctgttatgtgatgtcagcgtcactgacctgtatgaataccgttgccgtatttgctgattttggaattctgtggactccccccccccc

SEQ ID NO: 35640 - DNA, 368 bp, Setaria italica
  Peptide Sequence Number=SeqID_101614
caaggacgaggccgccgcgcaggacctctggtggggcaagggctcgcccaacatcgagatggacgagcacacgttcctgacgaaccgggagcgggccgtggactacctcaactccctggacaaggtgttcgtcaacgaccagttcctcaactgggacccggagaaccgcatcaaggtccgcatcatctccgccagggcgtaccactccctcttcatgcacaacatgtaagccaacaccctcccagtcaatactgtctgtcttgtactcttattgcagtactcttatcctaggtcgttgctccaaagcccagataagttcattgacgatgaccccattaaactactacatttacagcatggtgtatgag

SEQ ID NO: 35641 - DNA, 2395 bp, Setaria italica
  misc_feature (2365)..(2395): n is a, c, g, or t
  Peptide Sequence Number=SeqID_101615
ctggtttcctttcgattccaactccacaccgcttcctcggcgcacgtcgttgttcccgctgctccagcgatccctgaccctgaccatggcggcgccgaacgggctggcgcggatcgagacgcacgggaagaagaagcacgagaacggcgtgtgccacgatgacagcgcggcgccggtgcgcgcgcagaccatcgacgagctgcactcgctgcagcggaagcggtcggcgcccaccacgcccatcaaggacggcgccgcctcgcccttcgccgccgcgctctccgaggaggagcgccaccgccagcagctgcaatccatcagcgcgtcgttggcgtctctgacacgtgaaacgggccccaaagtcgtcaagggtgaccctgccaggaagggcgaggccgccgcgaagggcgcgccgccgacgccgcagaagcaccaccagcaccaccaccccgccgcccccaccatcgccgtcagcgacagctccctcaagttcacccatgtcctctacaacctctcccccggcgagctgtacgagcaggcgatcaagtacgagaaggggtcgttcatcacgtccaacggcgcgctggcgacgctgtccggcgccaagaccggccggtcgcccagggacaagcgcgtcgtcaaggacgaggccgccgcgcaggacctctggtggggcaagggctcgcccaacatcgagatggacgagcacacgttcctgacgaaccgggagcgggccgtggactacctcaactccctggacaaggtgttcgtcaacgaccagttcctcaactgggacccggagaaccgcatcaaggtccgcatcatctccgccagggcgtaccactccctcttcatgcacaacatgtgcatccggcccacggacgaggagctggagagcttcggcacgccggacttcaccatttacaacgccgggcagttcccctgtaaccgttacacgcactacatgacgtcgtcgacgagcgtagacatcaacctcgctaggagggagatggtgatcctgggcacgcagtacgccggggagatgaagaagggcctcttcggcgtcatgcactacctcatgcccaagcgcggcatcctctcgctgcactccgggtgcaacatgggcaaggacggtgacgtcgccctcttctttgggctctcaggtactggaaagacgacgctgtcgacggatcacaataggcttctgatcggtgacgacgagcactgctggagcgacaatggcgtctccaacatcgagggcggttgctacgccaagtgcatagacctgtcccaggagaaagagcctgatatctggaacgccatcaagtttggaactgtgctggagaacgtcgtcttcgacgagcacacacgtgaagttgactacaccgataaatctgtcaccgagaacactcgtgccgcttacccgatcgagtacatccctaacgccaagatcccctgcgtcgggccgcaccccaagaacgtcatcctcctggcgtgcgacgcgttcggcgtgctcccgcctgtcagcaagctgaacctggcgcagaccatgtaccacttcatcagcggctacaccgcgctggtcgccggcactgtggacggcataaaggagccgcaggccacgttctcggcctgcttcggcgcggcgttcatcatgctccatccgaccaagtacgccgccatgctcgccgagaaaatgcagaagtatggcgccaccggatggcttgtgaacaccggatggtccggcggcaggtacggtgtgggcaagaggatcaggctgccctacacccgaaagatcgtcgacgccatccactccggcgagctcctcaccgccaactacaagaagaccgaggtctttgggctggagatccccaccgagatcgacggcgtgccatcggaaatcctcgacccgatcaacacctggacggacaaggccgcgtacaaggagacgctcctgaggcttgccgggctcttcaagaacaacttcgaggtgttcgccagctacaagatcggggacgacagcagcctgaccgacgagatcctcgccgcaggccccaatttctgatgatccggaccggcgaagcgatggactgggttcagaataaaaccgtggtgcgtgcgtgcgtgcgttacaatgatgatgacgaaaaaaagtgttggattgatgtgccaacatagtagactagctctgtgtgttatcatgtttatgcgtgtggtgttgttacctgtaaggtttgttctatcagcttgttcggcctggtcctgtatgttatcgtgcttgcatcttgcccgtgtactctctttggtttccagaatttgaatatgaactattttgatttcgatggccagcatgtgctcctacaannnnnnnnnnnnnnnnnnnnnnnnnnnnnnn

SEQ ID NO: 35642 - DNA, 977 bp, Setaria italica
  Peptide Sequence Number=SeqID_101616
gtttttttttttttaggtagaacaactgacaacttttattatttcgaaggaataaccagcaatcctatttgatgggggaacaaatcacattttcttgcattacaatgttgtttgagcaaagggtacaagcagttttcagtacaaacataagaatttcggtgtcaagtctgagttctgaccaaacggtggccaaggtttttatttgttcttcaccttttcagcttgaaatgctccacagatcttcttccaggatctcatggcaatgagcgttggtatcacaacccatgaagcgttcgcacctatgaagtatgcccagaagtagaagggactggcccagaaattgaagccatccaagtaggcggtaatgaagtaaaccaagcatccatagagctgacccaagcagacagagaactgaagaatatggctgtaggacttccgggatgcaatagcgtagacagctagcagcgatgcagggccttccaataccgcggtaatcccttcaaccgtaacagtcgcggtgtccctagcaacgtacctagagtcccccttgctgtactctttccaaacttcatcgaagaaattggggttctccttcttgaagaagttaggggtgaagacgaagggcccctcgattattatatgggtcagccctgtgaatgcccaccagcacatgagcagccgctcggtcttggataacctgccacatcttccggagacgagccagacggcgaggaggacgaagagggaggcaccgatgtaggtcacgaggatctcgccctgcgacagccgtagcggcacgaagcccggcagctccaggtccgccggcgcgtaagggtggcccattgccgccgcccgccggcctgctcgaccggctacaacaaggacttgccgccgccgatctgggaagagccgccgccgcaacaacagcagcgacaacttgacttgagaggcggacagatgagagagatgctgactgc

SEQ ID NO: 35643 - DNA, 625 bp, Setaria italica
  Peptide Sequence Number=SeqID_101617
ttcttactagtaggaaaaggaaagaaaaggaagttagaaataggtagtaaggaacaaagcgtaccagcacagcccaaccagacatattcatgagagaggctttccatcctgggagcttatttgctattttctcaatccaaggtatcaggtcacatttccttagcttcttgtcagagataggcagtcccaggtatgtgcaggggaaagatgtggttgtacactgtaaggtgttgttcacagcctcaattatctccccttcacactgaatagggatcacacagctcttggacaggttggtctgcaggcccgaagcttccccaaagatgtgagagtaaaatataatgttgctttgctagtaggcagtaggcacacataaattattgggccgtgtatacatatacatactccaaatgtataagcaataacaaatcagctttcatcaatcttttgtaatgcaaatcatgcagtatgattttttcaaacaaatgtaaattaggtactaagataattagttagaatctgtacatgaaaagtaaaagagtttcattgcttcttctgttgtaagatacttgtcttggcaccatatacgttcaatgatgccaatgaacaactagtgggaatcgag

SEQ ID NO: 35644 - DNA, 1311 bp, Setaria italica
  Peptide Sequence Number=SeqID_101618
aagatgcaaaattatgtcaaggaaaacagattccaaatacacataaacagacagccagcacaatgataagaacattcgccacacaagatgtgccaattagttactaggtgcataggttttctggggaagcgaatattcaggtgcagataagagagtacaaaatatcatgcaccatctaaaccggctatacctgttgttaaagctgagaatttacccaccactacattaattactgctatttagaatttgcaaaaaccgaaatgtagcagactaccacatctagctaagaatccacaactcagcggcatgtcagcaaagggacaaagacgagctgttggtcaatcttcatcctgagtttcctcatcatcgacattgttgccatacctccagtcatcttcaatgttgttgcccccatcttcttcggtctcttcactgtcatcttcatacccagccttgcccgaccactggttctttacaccactgatattggaaggcatcacacttgagatcttggcattgtagactttagatgagtgggacttgtgtgtcttgcttcttttggggtgtgatgcagtttcaccaatctcagcatagctatactgataggtcggttcattcacaccatggtgaccagcagaagcactgagcttaccattttcctcttggccatgttcgggatgctgagtttttagatgaaggttcaatttgtaactatggatgtatgctttgtcacaaccttcataggggcagacatacgggcgatcggcaaagcttgtggttgctggagtcgaaggctttggtgtgctgtgcggtttttctgctggtggggtatgttgcactgtaacaggagttccagtcttttcatgtgacttgacatggactcttagtttggagtcgcttgtaaatcttttgccacatgctgggaaagggcatatgtgataattctccaatgcatgtgtttttaggtgcgaccgcaagttaaaatccaatgagaaggcctagctatgcgacagtcaaagcatttgtttgttacatagtgtaaatgcagtaatagccagataacacgcaaccattagaatagacatcgattcacattaaaagaaaggaagtggacaggaccagttggctaggtggtttgagtcaggccaccatatcctcgtgcgcccaaatggccttcaataaggctggggctagttaagaaccctactttttaagaggaaagaaaaaactatttctgactattcatggaggcatggctgtgcaaactggaagcttcttgtcgtataacctaccaaattaagacaaaaaata

SEQ ID NO: 35645 - DNA, 1071 bp, Setaria italica
  Peptide Sequence Number=SeqID_101619
tttttttttgttgactcagaggtatcttttggcctggtagactgagcaagtggtcagtgccttgtgttataacctacacagaaatgtgcatctatcaagaaaagatgccatcagccataacaaaccatgactttctaaaaaaactggtgattatttggtattaccaaagctctgcatctaattcagctaactgtactcgtacaacctcaagtgctacatactcatcatcaaaattaaattacattcatcacttacatggaagaaatcttacattcctcgtacggattgctgcttatctctatgccgtgccattgctggactttggaggcaagaagggcttccaccatccaaactcatatttaggatatggagctgtccatttctcaggcttgtcaaatttcaactcaacagggttagaagccaatgcctcttcaactgattctgcgtcgaactggccttgtaagaccctgtctagccttaacttcatgaaagtgatccagttgccgtcgttggagacaagcgcgacggcggggcgcttgaggcgcttagtgatgttggggaacctgtccaggaacttgggctcgatgacgagccagaagtcgcgctctatatcgcgctcggcgtagttgcgcagcttctcggcgagctgctcctggaagtgctcctcctcgtccagcatgaacttggcgttcgccaccaggaagtagtacgtcttgggcttcttctcctgctcgggaggctcgtgggagccttgctgctcggagtcgacggcgacggctcggcggagactaccaaagtgccgcggcgggtgggagacggcgacggaaggggacggacgggtgccgggcgcgaagcaggcgcgggagcggggcagcgcggtgcggggcggcgcgggggccgcgcaggggcggagggagagcgtcgcgggagccaccattggctccggtctcggcttggctccgcgcggcgccggcggtggagtcgcggtgtcggaccgagctgaagtggactgggcgtcccggacccggagaggatagagggagggtgcggactgcggaggcggaaggccgg

SEQ ID NO: 35646 - DNA, 171 bp, Setaria italica
  Peptide Sequence Number=SeqID_101620
acacgacggcaagttcatccgtgtctgctggaactgcctcggcagaggcggcatcggcctgagctccggcgagctggtgctggagacggtggccgtcgatccccgggcgtgctggtcggcgccatcgtagagcacggggttggccggtggaagcgaggagggcttcgtgta

SEQ ID NO: 35647 - DNA, 1270 bp, Setaria italica
  Peptide Sequence Number=SeqID_101621
cgtcattctgctcgcggccacggtgaggcagcggacgccgccaccaatcccggctcccgaaccctctccttgccttctccgtttccgcaccaccacgccgttgaactctcgacgccgctcgcgcacgaagccgtgccgccttccacccaagtgaagccgctccgcccacaattatcctgtactggcagtcctcctccccctctctaccttttttgagcaagctccgcctctctactgtctgccctggcgtggagtggagatccgtccggacttggattgctttctccttttcgccgttgatgtcatcatgctgagcatttgtggtagagacagcaagatcatcttgttgtgttccagcatatacctcctccccagaaaatatgtcgacacaggcctctaaccggtcatacagatatccggacaatacccagatatcgtactacaatggcaatctagtgcatgttgggggcaatggtacttactatatgccacaaaatcatgatgatggtcattacatttcctctgatgatggatcgcagaccagcaattctagagctcaaggttttcaagcacagtactgcaccctagactcgtcctcagccaattgtgtttatcctgcacatagctctacctcttctcagagcataagtgggagtcctctgtctcagcaagagagccactcagatcatgcatatggttcctctccaagtgcgtcgtgtgttactcaggtcccgagttggacacttaaggatctagaaaatgtaatgcttggacctgattctgacataggcagccctgatagctccttactacctggcactgctttgcatgagaacaactggagagaacttttgggaattaaaactggggatttgcggcaggtaattatagcatgtggtaaggctgttgacgagaatgctttctatatggatgcgctgatgtctgagttaaggcagatggtttctgtctctggtgaaccgatgcaacgtctgggagcttatatgttggaaggtcttattgcaaggctttctttcactggacatgccctatataaatctctgaagtgcaaagagcctgtggctacgagttctgagctcatgtcatatatgcatcttctgtacgacatctgtccattcttaagtttggttacatgtctgccaatggtgccagtagctgatgctgttaagggtgaagagcctgtggctacgagttctgagctcatgtcatatatgcatcttctgtacgacatctgtccaaacttaaagaatgg

SEQ ID NO: 35648 - DNA, 264 bp, Setaria italica
  Peptide Sequence Number=SeqID_101622
ccgtcgttgccggctatgacgacgagcgacgccggcgacgacggcctgaaatggatccactccccgtcgccggtctgcacctccaggccgtccaccgcgtgctggcagacgacggtgagcatgctgcagtcctggtgggtcccgtacctgacctccttcccctcggcgtcgccgccgggtgcgttgtaatgcgccatccggaacacgtgccgcatcgactccctcatcgcgtcgtggtactcgggcaccccgagcccctccatc

SEQ ID NO: 35649 - DNA, 648 bp, Setaria italica
  misc_feature (38)..(38): n is a, c, g, or t
  Peptide Sequence Number=SeqID_101623
agttggacgatatgaagtctaaagtagcaaagttgacngaaaaaggtggactcctgaatgcagaagcaatttgagaagctagtacatcttctgcaacttgatcaaactgaggaaaagatggatgtttctgatcgggttaaacttgctgatgttattgctgctacagaaaatcctgtttggttagacagacttgttcaatcaaggggcctttttggagttaaatagttgggtagacgaggctcaccaaaaagaagctgataagcctatgcaggaacttctccttgccctgcttcgtgccctagctatattgcctatcaatctcagtgcattgcaaagctgtagtattgggaaatctgtcaatcatctgcgtagccatagaaatttggagattcagaagaaggctaagagtcttgttgaggattggaagagacgtgtggatactgaaatgaagtcaaatttatgaaagctttattgccatgcctatccgggacatttaaaaaagatttgattaaatttcaaaagcaggaaactgatgaggtggctcaggtgagcaccattccaaaaattgggtgcccaatgtttcttcatcaaaagtgtatgactgaggaaactgaagcatgatgctattattaataaggctactctagg

SEQ ID NO: 35650 - DNA, 1008 bp, Setaria italica
  misc_feature (962)..(1008): n is a, c, g, or t
  Peptide Sequence Number=SeqID_101624
tcttgatcagtcacagtctcagcttggaaggaggcctcctcttcttaaaagcacaccagagaatgatcacattgattccttaggacattcaacttccacaaggagctcagctcagaaaagaactagaaattctaagaactcaccaaaattgcgcaaaagccaaaacctgacacagggacatatgcaacagagattgcaccctggtttgtcatccagtcaaaaccgtgccacatctcattatggtgctgttactggattacgaacaactaaagatgggatgtaccttcttagctcaggttctgattctcgtttaaggctatgggacatcgattctggatgcaatactttggtcaattttgaagctatgcgattgcagactggcaagccgttacaattagcagtcactgaggatccgtcacttgtatttgttccatgcatggcaagcatcaaggcatacaatttatggtctggtatgacatttcgggcattccggggtcactacgaacttgtgaattgctgctactacagcgaacaggaccaagaactttatactggcagcaatgatagacagattcttgtatggtctccatcaactccagcttttactgaaatggaagatgatgagaagcggcaagggctttctgcagctgatgaggataactggagcgactaagaaggcctgtaccctttttttcccaaaacggaaggagactattcgtgtatattgaattattgattgatgtgacggatgttaacaagtcgaggttgttagctcttgttagcagccccgaaaaggttgtacattgacttgtgaaattttgacagttcattgcatagttggtaaattttagattttatctacaaaaaggaaaggatagagggatgtctcggacatgttattcggcactggagccttttgaattcactttgaaatgattatgcgtgttgatgactttaaaccnnnnnnnnnnnnnnnnnnnnnnnnnnnnnnnnnnnnnnnnnnnnnnn

SEQ ID NO: 35651 - DNA, 1383 bp, Setaria italica
  Peptide Sequence Number=SeqID_101625
gccgtagaacatagcctcatcggtgccgtgccgtcagctactcagctcaggcagggctcgcaagtcgcaagcaaactctttctctccgctttccccttcatctccgtcgagaaggggcgccgcgccgcgagggaagggagaaggacgagggggcgacgatgcaggtgaagcagaaggtctacgagctctacaagggcacggtggagcgggtcacgggcccgcgcaccgtctcggcgttcctcgagaagggcgtcctctccgtccctgagttcatcctcgccggcgacaacctcgtcgccaagtgccccacctggtcctgggaagcgggcgatccaagcaagcggaagccgtatctccccgccgataagcagttcctcgtcacccggaatgtgccttgtttaaggcgtgccatctcgcttgaggaagagtatgatgcagcaggagctgaggtggttctcgatgatgatgatgacggcgaaggctggcttgccacgcatggagtgcaagcatcaaaaaccaatgaggaggaagacataccctctatggatacattggacattgggaaatctgatggaataaagtccattcctacttacttcagcggtggtaagaaggaagaggaggaggaggaagatatacctgacatggacacttatgaagacacaggggataatttggttgctgctgagccatcatactttgtcgcagaagagcccgaagatgacaacatccttcgtaccagaacatatgatgttagcataacgtatgacaaatactaccaaactccacgtgtctggctgactggatatgatgagtcgagaatgccactaaagcctgaacttgtgtttgaagatatcagccaagaccatgcacgaaaaacggtgactattgaagaccatccccacttattagcaggaaggcatgcttcagttcacccatgcaaacatgcagatgtgatgaaaaagatagttgacgtccttgtgtctcgaggagttgaaccagaagttgacaagtatcttttcatatttttgaaattcatagcttcagtcataccaacaattgagtatgattacacaatggacttcgacctgggcagtacaagctcatgactggtttatccaaggaagaagaagcatcctacagaaaggcacacgaaggctgaattgcctgtttgtggttggaagtatttgggcatctgcgttggttcccgtggattggttgcaattgtgaacttaggaactctggaagctggcagaaccaccatgtacattataacagtctgcttgtgtacatttgaattcattggtctccttccatataaaatccagcaaacatatacgtaacgtttgtgtgcattgacaaccaaaaaaaaaaaaaaaaaaa

SEQ ID NO: 35652 - DNA, 312 bp, Setaria italica
  Peptide Sequence Number=SeqID_101626
ggccagccttccccaattccggccacaccccgcaactcctgcgccgccgcctcccccctttggtttcccgtcttagcttcgccgcccccatcccctcctccattcgcgccccgcccgcgccgggatttctctaaccccaccgtccccgcccgcgccgcctcttgcccccgaccctatccgccaatccgttccccactattccgcgcgggagggggtcccatcgccggccgtttcgattcgggggctgatccgatcggtgtcgccagatgggtcgcgacgccgaggaggcctcgccgccggtgtcctcatcgg

SEQ ID NO: 35653 - DNA, 475 bp, Setaria italica
  Peptide Sequence Number=SeqID_101627
ttcgtgtcctggtgcgcactcttcctcgaacacaaaagacatcccatacgccggctcgtcatcgaatttgcaggtggagtccgtgtttgacggtggccgagcgatgtcggtgacgttgaggaagttgcaattgataaagaagacgaggtaatcgacggtgtcgttaggatagtccagccatgagccgttccggagcgtcacgttgtgattggctctggggcagctcccctcgttgaggacatcaggatcagcaagccagactccggggggctcgtagtcgatgcgcgagacggtgtacttgccactgtcgagttccaggaaggctcggccttcctcgcactgaatctccatgccagggtagccgcagtacgagctgtcgtttcccaggagagtttccatcttgctatagaacgggtagctgatgttgacgttgccgcagttgtaaggttgccgcacgcacatggaggtgtcgtag

SEQ ID NO: 35654 - DNA, 516 bp, Setaria italica
  Peptide Sequence Number=SeqID_101628
accacatcctcgggggatcagcagatggtcacggtcgcggagaggttcccccgggaggtgagctcggaggcggtcttccggtgcgtgcggctggggccggtcgaccaggccgaggcggaggtcgcgtaccagaccaccgtcagcatcggcggccacgtgttcaagggcatccttcatgacgtcggacctcacagcctggggaacccgggcggcagcggcggcgccatcgagtaccacttccgccacgccggggacgggtcgccaccgagcactgccgctgctggcgacgtaggcggcggtggcgtggccaatgtcatcgtatcatcggctgtggtgatggacccgtacccgacgcccggaccctacggcgtgttccccgccggcgcggcgttcttccacggccacccgaggcagtgaccggcggcgcgcgcgctcgccagccgtctcgctgcagtaacgtcaccatgacccccgcctctcgctcgctcgatctgtcaatttcgtagcttccctaaa

SEQ ID NO: 35655 - DNA, 426 bp, Setaria italica
  Peptide Sequence Number=SeqID_101629
atattcctcggtcgattgtaacttcgtttaacactaatattggatcctcggtcacgagttcatcctttgctgcatctcggattacatgacactgtagacggtttctcaatgtgatgctaaatggtccattcagaacattgtccaagcaatcgcggtattgctcgcttgctgaaagaatatgtcaaggacaatgcaatagataaaaatgggactgtcaatgtcaatatgagaaaagaaagttgcatgttcgatttatttttcaacataaatagttttctaagatcaagcaaaatccagccattctagctattactgaacagagtgtgtcagcactgatgataaaggatacggaaaggtgtcatgaagccgagtgatccaagggagaatgcaacaaatggaggaactggtccttgaacaatgatgcag

SEQ ID NO: 35656 - DNA, 2344 bp, Setaria italica
  misc_feature (1)..(47): n is a, c, g, or t
  Peptide Sequence Number=SeqID_101630
nnnnnnnnnnnnnnnnnnnnnnnnnnnnnnnnnnnnnnnnnnnnnnnttttttctaggtctggctctaccaaatttattttcatttccatcatgggggcacatcacatgtatatacacatacattggtggcgcttactctacgtttttgttgccatcccccatactttatccagatcagtgtatggtattggcatcatccgccacatgtgctgttatcaagttcaagtgcctctacacactcgtggtacatttggattctgcactataccctctacatgtatgcaaccttctatagtatgtatgtaatggtaaaggagaacacactcgcgtaggtacaattatcctctcgccgttagcagcacttggatggaggaaatgcttctgttctgggagaacaaacccatcagtgccttagccaacttagaattctggcactggactgatataactgaaaaatcgttgcatcaatcacgcgggccgtcggacgactgggatttcctcaggttccagtggagaccctcgtggatgctgcgcaggaaatcggtcgttgaatccatcacgcaggctgttggcacaggccaaggagaaatgctgcatatcagagcgtcgccgggtgataactgccttcgatctttgccgtcaaaagatgcccaggcatggcccctgctattgtaaggcacttgaacgcgcagagtcacgtattcaggcagtatcaaaggtctgaatgacaaggaatgcggacagattggagtgaaaaggatccctgggacctgcggatgaaccatggatcctccagctgctagtgaatatgctgtgcttccagatgtagttgatatgattagtccatctccttgtacgcaagtaacaaagaactgtcacagtagcattccaagtaggtaaggtaagatgatattcctcggtcgattgtaacttcgtttaacactaatattggatcctcggtcacgagttcatcctttgctgcatctcggattacatgacactgtagacggtttctcaatgtgatgctaaatggtccattcagaacattgtccaagcaatcgcggtattgctcgcttgggaaaggtgtcatgaagccgagtgatccaagggagaatgcaacaactggaggaactggtcctttgaacaatgatgcagcccacagtacagttccatcaccgccaagagttacaatgagatcaacctttgtgtgcagcagcttcatctcctcatcattatcccatgtttggatgaagttatagttggaatcctcagttagaagctccttgctaacgcgtggctcaacaaagacatttatatttttatgttccttaagccatctgaccatttctgcacaaagaacatgcacagagttggaattaggtttggttatgaaaagcactgtttgtggtgttgattcccatttcagtaagatctgcttattactccgttctgctgttgttatatcacctttttcaaaggacacaaaatcatgcttatgctggccatttttatctccattacatccccatgaaagtttaaatgatgcctttctccctaccatcttgtgattagatcttgggataggtccaggaacttcgtcctggagaacctcatgtgaacatataccatgctttccacagcatcctaattgatcagatgctgatgtctccagggttagttgactggccagtttgtctaagtcattactgatacaactgccacagcctttgattttactctgttgcttgtgcgccatctctaattcatacttgcgtttccactctgccgcctctgcttgagcagcagccttgccttcagctactcgccgtaaggcctttgcaacagttctcatagcctctgaaaactcaacaaggtgtgcatcagtcgacttgataggagtttgagcaaggtattcataggctgctttctctgattctattgaactaacagtagaactagccgtagagatggatccggatccattttcactttgatgtgaggccatgacatccactctctcatcagaaaccgagtcggccaatgatctgatggtcggagcagctgggatcggaatcggccctgggttgaagctcctgaacttggaatccagctgaatttcctcgggcgatgactgctccttgtcggcgagctcgtcgagcgacatggcgccgcgatccggtccgcttcgcttcctcgccgacgcagaaaaatcctccgtgcttcctctgctctcggcttcgtcttgcccggggaaggacgggcgggtagtgtacgtggtctccgattcggcgagggggcaaagaggtgggtggcggacgggtgggtgggtgagaggcgacgacg

SEQ ID NO: 35657 - DNA, 476 bp, Setaria italica
  Peptide Sequence Number=SeqID_101631
agcgggggtttgacggccattgtcggcccctcgggggctggcaagacgaccctgttccggctcatggcgcggttctggggcgtcgacttgggacggtgcgtgtcggggactggacgtgcgcgaccagacgaccgagcagctcatgagtcagctcgccatggtcttccaggacgtctacctctacgactccaccctggcggagaacattcgcatcggtgccccggatgccactgacgagcaggtatggaaggcaggatccctggccggggtcgacgagatcgcagctcgcctgcccggtggatgggatgccagcgtcggtgagggtggtcgtcgtctgtctggcggtgaacggcaacgggttccggtggctcgcgccttgctgaaacgcgccccgatcctgctgttcgacgaggccacctccgcactcgatcccgaggacgaggcccacgtcgaggccgccctggcccagctgcgcg

SEQ ID NO: 35658 - DNA, 459 bp, Setaria italica
  Peptide Sequence Number=SeqID_101632
agttttgttagctgggggggggagacccccttcacaatcattatgtatcatagtgcatacagggtacttgttgtatacttgtatgctgaaagggcatccttgcattattatcgctggagcttgggatactttagcctctgctgttgctgttgctgccaccattctgcgaatccttgccggctctggactgcatgtcgatgtcggccacgtcttcagtcagccacttgtaatgcatcttcacatcatcggctgtctttccaccgcccactgcccgtgccacgttctgccagcggtctggtgtgtctttgtcatacgtcgccagcgccaactcgaacaccttgttcagctcatccgtccatgatgaattcatggtttatagatttctctctggaaaatgttcaagaacaaggctaagagctacaactattcctactgcagctaccagatcgctgcttagta

SEQ ID NO: 35659 - DNA, 1610 bp, Setaria italica
  Peptide Sequence Number=SeqID_101633
atttctaaaatatcctatggataacccatattctatatttaattcatctccaagttcacaactgtaaaaattttaaagaacttctcaaactccagcatatcttatctggagcctgtaaggagtgcatgggcggtatactagtctttatttcagaagattaaagctgggagcatatatctcaccaatcttcatgattatgcaacattgcgtaattggtattcacacctatctttacatatgtatttcagccactaaaagtagcaagcaactaaaaagctttctgactcatgagcatccggtgcacgtttttacatcggagctaggagccttatggtcatctccacaatgttgtaactacaggcctacagcctgaatgcatgcagagtgcacagtttggaacttcagggagtgagccacattattgctgaatcctaacttgggcccggtgctggaatgtcataggactcttagatggaggccaggatatccagcttttcccttgtacttctcaaaaagctcccgcaaggccatgatgaactgctcatggacttcattaatctcatcaattgcaggctgggggtttttgtcgacttcaataggtttacccacgaccacatgcataggtcttgggaagggaaagggcgtccccaaatcttccccagaagataataggagtaaatttaactgctctagcaatgttgacaaacaatttgccacctggcctccaccacttgtatgcatagctctgcccaaaacagaaaacagggaccaaaggacagccagattgcatggctatcttgacaaaaccttttcttgatttaaggaaagcaacctctgaatcattatccatatgaagcatttcccggacaccaccaggcactacgatacaactatagcctgctctaaggtaggaataaaaattcttcctcgtcgcaggtaccaatccaagccatgtccaaatctgcctcaagaacggggtatagaacaccgcactactcgcaaggaccttgatcttagtcagaggcataaacccaacaagatcagcaagagctgacagtcctatcggcagcaccgagtggggctcgtaaccaaacacgtacactctgctgggatcgaaggctttgtagtcctccacatgcaggctgatcgggaagtaacccattgcgtgtctgcatatgaacctggcgatgctccggccccatttgtccctgtcgttgacggggacgaacatgaagaagagctggaacgccaccactatggcggcggcgcggcgggagaggaggaagagcgacgcgaggacgaggaggacgttgaagtggatgccgcccagccagagcgccagcgccagcgtcgtccgcggcagcgagtagtccgtgcaccggaacaccctcgcgtcgccgccgccccccttcccatcctggggcgtctccgccgcccggttcagcccgccgtccgcgcccatctcggcggtgccccggaccggagcagagtcggaggcggcgccgggctcgatccgtccggagccgccgcgcgtttcggcctttcggcgcttctgttgtcttgctgcttggagcggccccgcccctcgaggccgtcggatcctgcgggaa

SEQ ID NO: 35660 - DNA, 467 bp, Setaria italica
  Peptide Sequence Number=SeqID_101634
ggggaagctcgggaaacaacacgccgtcgcaggattcgagctcctccttgcccgtcgatgccgaggcaactacttggaataattacattgcatttgcaggtttaactaatttgcaaataattatgttggctggaataatgttgtacatccttctgcttgttgggaaaaagagagatttgaagcacaaagaactctgtgacacaggcacacaagcaggtctagtgtcgaaatgaacagctgctatcgatatgatcacatattcatatccgactcattcgttgcttagccttgtcgtcatttgaaaagatttaatccttaatcaaacccttgaactgcaagcactaacagcacaaagcagtaagcaagggtacctcggacatggcaagtatggccagatcaacgggcgggaagcacggagcagggaagcaggggcatcagcaacctcctgctggcaggatgcctcgtcg

SEQ ID NO: 35661 - DNA, 1445 bp, Setaria italica
  Peptide Sequence Number=SeqID_101635
ttataagtagtttgaagagagcagatctcacgcatgctgaataaaatcaacgcaaaagaaattacattgcaatctcgttgcgatttttctcaagctcggcatggaggaaaatcaggggaaaatgttaattcccaagcacacaacttcccaatctcatgaaaaaatcacacaacatgcaccacgttcctcgacgaaatgctcgtcgccgtgtttcttgccaaagctgcgcaccatggggaagctcgggaaaacaacacgccgtcgcaggattcgagctcctccttgcccgtcgatgccgaggcaactacttggaataattacattgcatttgcaggtttaactaatttgcaaataattatgttggctggaataatgttgtacatccttctgcctgtaccattgaagccaaaatatcataataccaaacaaacaaaatcttttactggaaaacctcaaatacaaagtgtatgaatgagacaccgtacttgttgggaaaaaagagagatttgaagcacaaagaactctgtgacacaggcacacaagcaggtctagtgtcgaaatgaacagctgctatcgatatgatcacatattcatatccgactcattcgttgcttagccttgtcgtcatttgaaaagatttaatccttaatcaaacccttgcagcaaatcgaacagtgattaggtaagagattaagaccctaccgttcgaataaaaaatacattagcttgtttgcctaatcgttgtaaggaaaataatcatcctgcccttctcataactaaatgcgctgaatcctatgggtgtatggctgctatttgacatggctgttccaaggattaccattgcacacgtccaggcgtggtgaggtatccatgttgtgggcatgaaaacacaaactgagataatgagagctgttttcttcatctaaagctactgatccagtgatagcagtatgcatgaacactgataaaagtaaagctaatagtacaattccctgttgctatccattcacctaaagcaaaataagatttgaaccttggatgttattaccgagtgaagcaatcaacaacatattctcggacatggcaagtgtggccagatcaacgggcgggaagcacggagcaggaagcagggcagcagcaaactcctgctggcaggatgcctcgtcgaccttaatggtgggcaagcgaatgttttggcgtggtgagcgtggccatgtcaaggcagagcgcggcgaatgtccccgggcatgggaagcatgacctcgggtcgacgcggagcacgcgctggccggcgccctcccctcgcggccacactggtgagcgagacgactgggtgcagctgggtcttgggcgacggcttgcgacggtcttctctctcccccgagccgcgagctcctgtgccccggccccggccctgatcccccagctcgcggcagcggggccgg

SEQ ID NO: 35662 - DNA, 376 bp, Setaria italica
  Peptide Sequence Number=SeqID_101636
gctatttgctgctcagtaattcgaccaactttcacagagtagctctgttccaattcagtaagagatgttctctcaagttctacctcaaccagcttctctagagctttgtcaacagaaccgcgtatcttagaaattaaaccaacagcttccattacctctgaattgtgtgaaacaaatgatctgataaattctggaagaaaagcttcagtcatttgttcaatcatgttgatacttgagtgcaaagcagcctgaaaagtagaagcccagtgcctggggtggggctttgcataagcaacacttgtctcagctaaggttttcccaataacttcatgcacttcatcaacaacactagagatcaatgcacatttttcatgtg

SEQ ID NO: 35663 - DNA, 515 bp, Setaria italica
  Peptide Sequence Number=SeqID_101637
tgaacaaatgactgaagcttttcttccagaatttatcagatcattttgatacttgagtgcaaagcagcctgaaaagtagaagcccagtgcctggggtggggctttgcataagcaacacttgtctcagctaaggttttcccaataacttcatgcacttcatcaacaacactagagatcaatgcacatttttcatgtgctgttcaaaaaattgcaagcccattccagcatcagcctgaagaccagaatcatctgccctaaatttagcttttccaatagctttagttgagaggtcagacactttggctctaatatcactatacagctggcccacagcagtcccaagaatagaaagcaccttacttgttgtctcttgtatatcacccttagctggaattttgatctcaccctgcctaagactttctgaatgtgacagatgagtgtcatcaccgtcgttcttttgtgaaggcaattgaatagagttcatgaatgcagaaagtatccgctctttggattgc

SEQ ID NO: 35664 - DNA, 236 bp, Setaria italica
  misc_feature (206)..(236): n is a, c, g, or t
  Peptide Sequence Number=SeqID_101638
accggcatcacacggaggatgcatacgagagcagacactctgagcacagagaccgcaggcgccatggtgaccggcatcactaccaagagaagcgacagccgagatggcagccactaaatctccagttgcattagactatatcaatgtttcatgatgtaaaatttgatctcatagttgtctatgtactccttgatacttaaaaagtnnnnnnnnnnnnnnnnnnnnnnnnnnnnnnn

SEQ ID NO: 35665 - DNA, 237 bp, Setaria italica
  Peptide Sequence Number=SeqID_101639
gatgctgcaaaagttggcagttctgtgaattccacaagcaatggtccagttggagccaaaggtccaactgttgagggaggaatgccaaatgatagatctgttacacccagagtttcatatgtatttgacatagtggctcgaagcatcggtacttcaggcagaacagatattatttgttatgctaggcggagaggtaagaggaagctggagttgctggaaaggtaaagataggaaaaa

SEQ ID NO: 35666 - DNA, 749 bp, Setaria italica
  Peptide Sequence Number=SeqID_101640
ccgggtagctggaacgacaggctaccttgcacctgaatatgcatggcatggccagttaacgacgaaagctgatatatacagctttggggtccttgtgctggagatagtaagcggcacaagtagttccaggagcatactgatagatgacaagattcttctggagaagatatgggagctatacgaagcgaacaagctcaaggagctgatcgacccggcgatcggagattaccctgaagaagaagtcatccggtacatcaaggtggccctcttctgcatacaggcggcggcgaaccggcggccgtcgatgccgcaggtcgtcaccatgctgtccaagccgatccggatcaacgagagggagctgacggcgccgggatacatccacgagtacaagagcaatgagtccaaggcgagtacgtcgagccactcgaggtccaagaacacggcgtctgaggactccaacgtgttcagcaccgtcgttccaccgacggtgactgagatgagcccccggtgaaggaacaccaggcagcagatgtaatctatccttgcgttgtgaactggcgatgtagagtgaccggcctgacggtataatagagtgcatgtgtgtcaatgtgttgtgttgtttttccaactgcaaatgcggcatctagatcttgtacatatagattagtgattcttgccagggcaatgaccaagaactgcttattgcacagcttgagatatcagtaatcatgtgcagcagtaagtaaaac

SEQ ID NO: 35667 - DNA, 1255 bp, Setaria italica
  Peptide Sequence Number=SeqID_101641
atagcgtgctcatctcctgttctcctccgccctccttgtccttgcgctagtattttttgctgctcgccttcattgcttgcacctgccttccaccggcagctagcgccaataagcgagggtgcttgctcaactagcatgccaaccacagatatcttctgctactagccagtataattgattcaaggctagctgctcctccttccctactcgccatcgatctcatcggaggacaacgacctgcttgctaccggcttccttcccaggttcctgtgctgcatgttgaattcctcaaggctaccataacaagtgaggatatgaattggtgttgtatacctagaaccaagaaacaggagaatccttactccaacagcatcggcgatatttattccgagaagaacataaggctcttctcctatgcggagttaagatctgccacagacaacttcaatcgcacaaacaaagtaggtcgaggtggctttgggatagtttataagggaaccattcgaaatgggcgagaggtcgcagtaaaagttctttctgctgaatccaggcagggcatcagagaattcttgacagaaattgatgtcattagcaatgtgaagcatcccaacctggttgaattaattggttgttgcgtcgaaggaaataaccgaattttggtgtatgaatatcttaagaacagcagtcttgaccgtgcactattgggttctaacagtgaacctgctgacttcacctggagcataagatctgctatatgccttggagttgctcgaggtcttgcatacctgcatgaagaaattgcgtcaccgattgtgcatagagacatcaaggctagcaatatacttctggacaaaaattacatccccaagatcggggactttggtctggccaagctatttcctgataatgtcactcacatcagcacccgggtagctggaacgacaggctaccttgcacctgaatatgcatggcatggccagttaacgaagaaagctgatatatacagctttggggtccttgtgctggagatagtaagcggcacaagtagttccaggagcatactgatagatgacaagattcttctggagaaggtaagtgttttctgaatgttttgtcatccacaaaagacatagaactctgcaaacagcttcagaacagcagtgcctggccaaagatttgctgacaagttgtacacacatatccaacccccatcccaagtctaactctgaacattcaaaagcacgtatcaaccccc

SEQ ID NO: 35668 - DNA, 383 bp, Setaria italica
  misc_feature (300)..(300): n is a, c, g, or t
  Peptide Sequence Number=SeqID_101642
agcaacaaggtcgcggcaatgcaggaaaggtcgctctatgctaccacctcgaggtcgctcaccgcctccaccgcatcgagctctggtgacgactgcagctcagcatcaacattgggccagacggacacagtcaacatcttatgacgctacaaggtctgcacattcccaatccatgggcccctcctgttaccctcctgcaattcgtgttcctccctcgccgagctgtgatgacatgtccattccttcctcaccgccatcgccaaggctttgtggcgacctgtcgtgccgctcggccaaagngatacgtgtgattcccaggtcgcagatgattaatgacagtgattcgtgcctgtcagcttgtgcgctagttctgatgattggag

SEQ ID NO: 35669 - DNA, 423 bp, Setaria italica
  Peptide Sequence Number=SeqID_101643
ttcgttgtctctttcctatagaaaatatatggcaacaactatttgttgaaatgcatgcctcgctgcagcattgtgcatttaaatatccattaagtcagttgggattagccaccaataattttatttactgatctctacaacttattaaaagtctgaattgcatatttgactgaatattctatgaacaagcatgtgggaaataagatattagatcagtttgttatgtatggctgccttgtttattattagctggatttaaaatctatcagtaatccatgctacaataaaatttgtatatgaatttaaaccctttcatctggtagtacaatgatagccattttaattcaactcatcaaactcaagtgtgcagttggacctttagttattctattttctagtaaaaaaaaatcagtagctctttca

SEQ ID NO: 35670 - DNA, 384 bp, Setaria italica
  Peptide Sequence Number=SeqID_101644
agacaatctcacccagttcaggagatgcacgcactggcaatggaaaaactgtccagtggcatggaaggggcagaatactcgtggtgaccatagagtacccaccgtaatgctagaagccgttgcctcacaagacctttggatatggcatgcattttttggtacagccgggtcaaacaatgacatcaacgtcctaaatcgatcacctctattcaccgaagtactgcaaggaagagctccagaagttcagttcatggtcaatggaactgagtacaatatggggtactatttggcagatggtatatatcctgagtgggcaacatttgtgaaaacgatccagttgcctcaatgtgaaaaagataaattgtatgctgaacatcaaggagg

SEQ ID NO: 35671 - DNA, 231 bp, Setaria italica
  Peptide Sequence Number=SeqID_101645
ttatacagtgggctagtggacggaataatctggcatcttctcatgtaaccatccatccatgcatgttcctgtgtctagctaacacactacagtactgtggcaatgatcagtgcaataattccataagaaatacaatatcaaactcgagcttagcagccatggttgtcctgatatgcgttgacaaacttgacccaggccaggagaatggcagttgacttggtactacaggta

SEQ ID NO: 35672 - DNA, 979 bp, Setaria italica
  Peptide Sequence Number=SeqID_101646
taatgctggtgcagactccgacatggcctcgcgcgagcttccacagagccttcgccgccatagccttcatgtgcgccttggtagccgggtcctcggcctcgcgcgatccgcggccgctcgaaccgttcgaactcagctgaggcctactgggtggaggcgcggctacgtttgtcttggccgctatcgcggatttcaccaccgattgcatctggttcgatctttctcgctgctggccgccattcgaggcttctggctggttcggcggctcgtttgttgaggaaccagacccgccttggtgcacgctgcgcgacttggcaagcacaacggagtgaagcttgtcgagcgaggacatggccgccgccggagtaggggtgttcctagagccgttcccactgacagagtacctgctgtgctcctggatggttccggaggcgaggtggccgacgaggtgccggacggcgtagttctgggcgaagaggtccttgcatttctggctgtggttcgcgagcgacgcgatggcgtccgcgaccgcggcctgcacgcgcatcggcggctccttgagcgcggcggcgaagacggagcacaccccggtgtggaggagcttctccacgctctcctcgtcgcggaagagaaggccgagcgccatggcggcagcctcctggccgtcgtcggtgccttccttgagcagcttgacgaggggcgggacgccgtcctcctcgatgatgtacttggcgtagtgggggttatcgcgggcgagggaggcgagcgtggcggcggagtcggcccgcgctgcgagcccgccggtgtggaggcgcgcgatgttgtcccagatcatgccgagcacgggctcgttctgggcgatgttggggaggccccggaggtcgccgtcgtcgtcggcctgcggggacgagatgcggatgagccagtcgatgtcctcgagcgcggtgtcgagcatggcgagggtgcgcgggagaccccg

SEQ ID NO: 35673 - DNA, 190 bp, Setaria italica
  Peptide Sequence Number=SeqID_101647
ggttttagctgctctgcttgcagtgatctttttatgaaaaatcagggacacatttgagaagtgtcatcactggacactagttcacagcaaagtttattcagatgcaatggtcatctgtgcatggaaagaaacgtgaacttctcttctggcggtggagtgaagcaggtgtatgcataccatcagccgcgac

SEQ ID NO: 35674 - DNA, 651 bp, Setaria italica
  Peptide Sequence Number=SeqID_101648
cgcctcagactctcagagaaggtataatgacagtgcagttaaaatttccaagtacggatttgctgttacatggatcaaacaccaaatatgacaagggttgacattttacaaagataaaaacgtcataatttaacaacaaaatgacattgaagccattggttcaggaagcctgtgaaggtccagccagccagtccatcaccttgtgctccatcatgcacttacagggctctccagggttaatgttgtgctccccacagtttgagcagtccacaaactccccgagctcaaacttggagttccagagaaagaccttgagccgtgatgctttctcaagaacagtgctggagatcgctgatgtctcataacctgatatgtccaggtactccagctcctctaggcaatcaaggaactttgttattgcagcggcaggcatgtctgagcttggtatctcaagcttcttcagctgaggaagagagttgcagatgatcgaagccatctcttcatccacgtacaaagcagacaccttcagttccacaaagtctgggcagcactgatgcacgtggaggaggacatcatagttgataagactctcatccactgccatgcctttaagcgaatgaaattcgccaatcgccttacagaactgatcgt

SEQ ID NO: 35675 - DNA, 656 bp, Setaria italica
  Peptide Sequence Number=SeqID_101649
ctcggaaccagaaccgggcgtgaagcacccacgcgccgacggtgagcagcagcacgcccccgacggccgccggcgtgtagttgattaggacgaacgcgataacgaccaaccggaccaggcagaacagcacggtgacgagggccacccagaggacggcggccgagccgacggcgaccccgtatctcccgaggtgaaacggccctggaacgaaggatttccgggccgtcgtcacgcggaagatgatgggcagcgcgtaggagatgtagagaccgagcgtggtgatggacaccatggcctggaacgccacctggctccccagcgacgtgagggccatgacgaacgccacagacacggagagccagacgacgttcaggggcacctcctgcttgttcacccgatgccaaacatgcgagaacggcatcgccccgtccctggagaaggcataccccatcctcgagttgctggtcacgcaggcggtgccgcagaggaagacggcgacggcgatgatgcccaggcagacgatacccccgacgccgctgccgtacctccggtgaaaggtggtgtacagagcctgggcaatggcatacccgccggcgtcgttgctagtgtccaggaagtaggggatgtcagtcatgaccgacgtcagagccagcagg

SEQ ID NO: 35676 - DNA, 678 bp, Setaria italica
  Peptide Sequence Number=SeqID_101650
acgactactacttactttttacgccggcgttagcaaggagacggcggcggcggtggccggattggaggcgcgaccgagacggcggtgcatcatcaccggatctacagagtccggaggcggcggcggcaagatttgtgtggcgaccgaggccccggcgaggcaagttgctggagtttctcctccccttttcctctccgttttctcacttctgcgtggaatctacggaaggtgaatccatggaggcgagctcctccacatggatctatggacggcggatccatggagggaggggcgggcttctccaggtggatccatgtgcttcgcgccgcatgcttcttcttcagcagtaatttcctttgcgtggtccacggatgggtgacctcctccacgttttgagttcgccggagccacgcctcgtcgacgttgccaattattttcaccaaccgtatctttttctctcatacgtcactcttcttgttgatgcccatgatgccgtatccgcatcttccattatgggtttgtggctgcagcgtccatgccagaaagtttatgtgattttccatgatgctcacgcaaattcgtgagatgttcatattttcttcagaaatgtacatgcaaattttgaattgttcctttgcgtagttttttttaaattctgtgctctgaacaaggatgcaa

SEQ ID NO: 35677 - DNA, 809 bp, Setaria italica
  Peptide Sequence Number=SeqID_101651
tttacagtgcctcgtaccatctgtttggtggcctgggtcttctgaggatgaggttagcatgacactgacgatgacaacactctcagatgcaatcaagaagatcgaggagatgcatcgtgagctttgcagcttggtgatatgctttattccaccagtttctcccactcagcctccaggctctgtatttaggtcctttgtacaaagtttggtactgaaagctagaggtggagatcataggatgattgtcaatgggactttcaacaatactgtgcttgtttcattgtacaccgtaatcctccatttgttgtctgaaggattttccatggattcttctgggtctgcatcatcctctaaagtgaactgtggtaatggggttggatttcttcacaaaggtggaaagaggaagtttccgacacaattacttttcaggaatgatgcctattatagcgtaattcctagaattggtggatcaccaagcattttgatgcatcaccaatttgatgatgtggaagatgaagtgcagtgggatgaaggctgcatgaatgatgaagagacacacgtaacacacactacagtacagaagccttgttgctgctcagtcacagatgctactattggcctaagatacaaagaaagtgctaagtatgtaccatcaacttcaaaaggcccatgtaagcccatgcctgaaagacctgctcatgttgctgctgagtgcagtgggagaagtctgagtgatgagatcgaagacaaggctagcacaagtactcaatcagaaattgaatacggataccaaacacttcacaatctag

SEQ ID NO: 35678 - DNA, 235 bp, Setaria italica
  Peptide Sequence Number=SeqID_101652
ggcactggcgttctttctatattttgtgctaaagctggcgccagtcgggtttacgccgtcgatgctagtgatattgcaatacaggctatggagattgtgagagagaatgagttatctgataaagtagtggttttgcatggccgaattgaggatgtaattattgaagaaaaagttgatgtaatcatatctgaatggatgggatacatgcttctatatgagagtatgctgggaagtg

SEQ ID NO: 35679 - DNA, 1406 bp, Setaria italica
  Peptide Sequence Number=SeqID_101653
ctaaagctgggcgcccaagtcggtttagccgtcgatgctagtgatattgcaataaagatgtatatattaatttacgtggccaaattggagaataaaccttgtattggaaaggctatggagattgtgagagagaatgagttatctgataaagtagtggttttgcatggccgaattgaggatgtaattattgaagaaaaagttgatgtaatcatatctgaatggatgggatacatgcttctatatgagagtatgctgggaagtgtaatttttgctagggataaatggcttaagccaggaggtcttattcttccatcacatgcatcgctttatatggcacctataacaaattctcagcgatatcaggatggcgtttacttctggcgggatgtatatggtataaaaatgtcctctatgatgcctcttgcaaaacaatgtgcattcatggagccatccgttgagacaattagtggagagaatgtattgacgtggccaacagtggtgtcacaagtggactgttataccatacaagctcaggaacttgaaaccattaccgctgcatttaaatttacatcaatgttgcaagctccgttacatggttttgcattttggttcgatgttgagttcaacggaccagttcgtcagaaatccaggaagcaagcaaaccaatccttgggtgggaacacccaaaatgctagcccgagcagtaaaaagaaaaaccagatgtctccgttgttctctcaactgcaccagaggatgcccctacccactggcagcagaccctgttgtacttatttgaacctatagaattgaacaaagaccagaacattgaaggttctgttaccatatctcagagccagcaacatgctcgcttccttaacatctgtctgaaatactttactggtgatcaatggtacgtgaaagaatctgtgatgcgataacgcgggggaagcttattagattccaatctattgttgcgcgtcatgagcacctcgctgctggtcattgcaattttggagcactctgacttgtggcggggcatcttgatcgctgatagatcggaatggagtgccatttggtgttatgattttgtaggaaacgtctgttgattgatatgaaacatccctggcgccaaactctagtagtcatttctttttacccgattgattgacgaacgaaacattagggaagctacatgttaacgagagtagtacaggactacaggtcccctcctgttgttttgacattttagtttttgtatcattttatttgctagcgcttcgttgtttgtaagaagttaagaactgtgtcaaggctttttgtgattctccataggctaataaaaaatcgagtcgagagggaaagaaaacaaaaaaaaaaaaaaaaaaactaagaaagaactagaccaa

SEQ ID NO: 35680 - DNA, 477 bp, Setaria italica
  misc_feature (68)..(68): n is a, c, g, or t
  Peptide Sequence Number=SeqID_101654
gaactcacaatgacactttctcttcgtcttctcaaggggaatatgacatgattttgttgctcgccaangttttggagactgaaacaggagacaggcagtttacaacttctttagatttgatgaatcctactttagaatgtggacaacaaacgtgccacttaggatgtggacttctttcctcatccttctcagtatactggtttaggctttcaatgctggctgtcattatcatcctgaggcataatgttttaaattcacatggtaaaaattgtgtcctggaggtcttgggtgggaatcaacctccttccaaaacaagcaagagtaaagctgcctagaaattctcttccagatcccactttgtgagggggctttcagcactagctacgcatttccgtcccccagaccccaccttcttatttattcaagctctgtttccttattgggacagtgggactcgagactactcacactgagtcg

SEQ ID NO: 35681 - DNA, 430 bp, Setaria italica
  Peptide Sequence Number=SeqID_101655
tgcccccgccctgccggacttgaccccgaccgcggccgagcctgacgatggcgtcggcgaaggccttgtagaaggcggtggtgctgttggcgagcgcgtccaccatggcccgcgtccggttgtcggtgtagagcagctcgtcggagcccagcagcccgccgccgtcctgcaggttccggtagtactggttgtcgagctgcgccggcgaggcctggtccatgagcaccaggttgtccgggccgccgtcggggcacttgctctccaggaacctcgcgtacgtggggttcagcgtcgggtccgtcggctgccccggctggtacctgtacagccggttcgagaacttgctgcagtgcgccagacccacgctgtgcgccgctgagagcgcgacgaggtcggacatgttgagcccgtgcgccttgaagaccgccag

SEQ ID NO: 35682 - DNA, 226 bp, Setaria italica
  Peptide Sequence Number=SeqID_101656
cgctaaacttggaatgaagtatgatcgcagaagccgggattctagttggctttaactcagcagcagaggaagcagagtatcgaagcccgaacgaaccggcagatgacaaaagccatcaaacgaagcaggggagtggggaaaaacaggggaggaggaggtgctggagcccatggccggccggccggccggcgagagccgcgggcttaccgcgaaagggttgacctcg

SEQ ID NO: 35683 - DNA, 825 bp, Setaria italica
  misc_feature (699)..(825): n is a, c, g, or t
  Peptide Sequence Number=SeqID_101657
cattctggtgccaggggttgctgatcgtcgtggtacatggcatagctgtaagcatgacatagaccagtgttctgcagcacagcttcgggattcagggatgattttctgaaggcggtggccgaacaagggaactccacctccagagggttgttcataaactcatgcttcgtgcactgccagtccgagatccaggagctgtggttctcatctgactccccaatgcttggaaacactacaatagcagccgctgttggcgactggttcttcgaccgcagcccgttccagaagatcgactgcccttacccctgtgactcgacctgccacaaccggatccacgatgacccatcgcatgcatagcaattacagcggcctcacttcgtgctgccattcatcacgctattactacattttacgctccagcattgctagcggtatagggcaatgcgttgatagccattgattgtcatgaataagacccggcgccggaggcttaacttggcggctggtgccggactgccggaagccagatgcagcttccaacggcaggtacagtccaagggatagaagccgtttcctatgttccactgcactgtattttcttctgatacctgtaggagccacattggctcttccgaagtgatgcggcacaggttatttcagttgaaatattatgtcacttcctaaacaaaaaaaaaaaannnnnnnnnnnnnnnnnnnnnnnnnnnnnnnnnnnnnnnnnnnnnnnnnnnnnnnnnnnnnnnnnnnnnnnnnnnnnnnnnnnnnnnnnnnnnnnnnnnnnnnnnnnnnnnnnnnnnnnnnnnnnnn

SEQ ID NO: 35684 - DNA, 389 bp, Setaria italica
  Peptide Sequence Number=SeqID_101658
cccgcggacggggacgcccgtgaacgccaccgtcgccatgctcgccgccaccgccgtcatcgccttcttcaccgacctcaacatcctctccagcctgctctccatctccacgctcttcatcttcacgctcgtcgccgtggcgctgctggtccgccgctactacgtctccggggagaccacggttgccgaccggaacaaactggcggcgtgcatcgccgccatcctggcgaacgtcggccgcgacggcggggtgctggggggtggacgtcaaggggtgggttccgtacgcggtgacggtgcccgcgtggctggcgtcgacggcgtgcctgtgggcgttcgtgccgcaggcgagggcgcccaagctgtggggggtgccgctggtgccgtgg

SEQ ID NO: 35685 - DNA, 359 bp, Setaria italica
  Peptide Sequence Number=SeqID_101659
ctgtacggcagcttcccgccgccgccgccgtccatccccatggctatcccacccctgccggctcctctttcctctcctctgtcttcttcctcggcttgcttcccttcccgtgttcgcccgctcatccacccgcgcaccccacaccccccacaggtcacgagcgtggcgttattgcgcgccgcctcgccgcgttagcaccccgacgctttggcgtggggctagctacccgtgtaacggtgccggtgccgtgccgctcaggcgctcacacgagggaggcactcgctcgaggctctccagagagctctgtttctgctgctgctgctctggacagaggagaagggggaggtgacaggtgaggg

SEQ ID NO: 35686 - DNA, 440 bp, Setaria italica
  Peptide Sequence Number=SeqID_101660
ggaacggccggtccggcttctcgtgcgcggagacgaagtacacccgcccgccccgcaccgtggggcggtcgtggaacaggctgccctcggccgccgggagcggctcggggcgctcggaccctggtctggaaaggaacaggctcgcggcgcccgtccgctcggagacgaacgcgaccgcgtcgccggcgtcgtccgcgaactgggcgttgaagttgacggacacgccgtccgtgtgccgccgctcgtcgagcatcttcgcgtcggggacatcgtccggggccgccggcggcacggcgacggagaagacgtcgaagccgaagctggagacgccgacggaggcgaagacgattgtgcccgtgggctccatcggggcttgggaagcgactggtggatgctccttgttcgtttgtgtgatggacacgactgatggtgcgcgcgag

SEQ ID NO: 35687 - DNA, 536 bp, Setaria italica
  Peptide Sequence Number=SeqID_101661
tagtagtcttccttccttctaacttgtagtctaggtactagttggtaacttgtactactagtaagtagttgttgtagtcttcgttgtttgtaagggtctaaggtattgtccttgtctaaggtagtactgtgatctgattggcatcaggtcctggttcgcttggaaccagtctgcaggttgcaaccaagcatacatcttgaagtttgatgacaacactacgattcataaagtaccggctgaaaagaaggaagctaatcctgattccagtggacgcctcaaggattcctcagagagctcctcctcaactgagcaggacagtggaactgacacagaagagtgtgagctcgtgttgaagggcaaggatgcctgcaaggagtacatcaaaagcttcttggctgccatcccgatacgtgagctgcaggctgacatcaagaagggtctcatggcatcaactccactgcaccaccgcctccagatcgagttccattacacagaatcatgccctgctgaaatcaccatgcctgctcaattcccca

SEQ ID NO: 35688 - DNA, 2055 bp, Setaria italica
  Peptide Sequence Number=SeqID_101662
ttcttccgtacttcagttcttattactattgttgttgccccattgtcaccttcctctggtgactctgttccttctggaaaagatgagggttctgtcattaaagtgggcctgagaaatctgaaaatcctaagagatctagtgtcgacacggaggttcaaaaagactaactgtgatggcaccgaggagaagtactatgttcatagtgatggtgcggagttttcttgtgatactgactccctcgatgatgatctggatgacagagagcaggatgatgacttggagggttcaaccgtcaggaaatccttcagctatggctcacttcagactatgaatgttggtgccctgctttatgcacctaggattgatggagatgatgagggttggatacattacagtcaccgaaattctgatgctagttatcatgttgagcaagtgccatcctccactgctgaggagcatgcttccatccctgtacggcgaaagaggagcatacttccagttcgatggagaaagacaaaattgccaaaggccaaaggggagcctctgttgaagccatacggagaagagggtggtgatgatattgactatgatcgtcggctgttgaccccttctgatggatctgtttcagagggatcaaatggctctactaatagtatggtgtcagtatttggtgatgacgattttgttgtggggaactgggagttgaaggaagtatttagtcgtgatggccacttgaagctttctacccaggtcttctttgcatcaattgaccagagaagtgaacgagctgcgggggagagtgcctgcacagcacttgtggctgttattgcagactggttccaagcgaaccaggacctgatgccaatcagatcacagttcgacaacctcatccgagaaggatctctagaatggaggaaactctgcgagaatgagacctacagagagcgctttccagacaagcactttgaccttgaaacagtcctgcatgcaaagatccgcccactcacagttgctcccagcaagtcgttcattgggttcttccatcctgaaggtactgaggatgtaagtggattcgatttccttgatggtgctatgtcatttgataacatctgggatgagataagccgagcagcggagtgctccactggaaaatctaccctatacattgtcagttggaatgaccacttttttgtcctaaaggttgacgccgatgcttattacatcattgatacacttggtgagaggctgtctgaaggttgcaaccaagcatacatcttgaagtttgatgacaacactacgattcataaagtaccggctgaaaagaaggaagctaatcctgattccagtggacgcctcaaggattcctcagagagctcctcctcaactgagcaggacagtggaactgacacagaagagtgtgagctcgtgttgaagggcaaggatgcctgcaaggagtacatcaaaagcttcttggctgccatcccgatacgtgagctgcaggctgacatcaagaagggtctcatggcatcaactccactgcaccaccgcctccagatcgagttccattacacagaatcatgccctgctgaaatcaccatgcctgctcaattccccacttttgagttctgttggcctgagccaccatcaccaacacctgccatggaggccgtggtaacccatccaccacccatggaggttgcagtaacccgtgctgttgccgttgtatagcgggccacagctgctgctgagacctagggcaccagctgcttagtttaacatatagagccgcgcttttcagagcaaattgtgaagtggaccagatcgaagatttggcttcgtttctagtttgctccgtttgctttctaatttagatgaactgactagtatagcttaattgtcttttggcatgcgtgtgtgtgtgtttgttcacttcttccaggcttttgggagctcccatcatttgtaaagagagagagggtgtttgctcctgcacatctttacctgtgaagtgagtttgctggaacttgtaatcctaactaaattaatttaaattaa

SEQ ID NO: 35689 - DNA, 351 bp, Setaria italica
  Peptide Sequence Number=SeqID_101663
tttaatcaaactgattataaatacttggtgcatcagtacagaatactcgtgtcttttgggattatcatgtgaagtaaagagcatatttttcacccctgcaacagagtgaatcctagttttttcttgatttaaaagatgtaggtttatgggctatatttgttatttccttctaaaatgatgtaaaaatgcaagttaaaatctctgtccttagtgatgttattgtggtgacagacttattgatgcatttttcgcatataaccagacatgattttgatgtaagctgtttagagaccacacatttctttctttggcagttgtgcatgctggtagtattttcctcctttttctttg

SEQ ID NO: 35690 - DNA, 239 bp, Setaria italica
  misc_feature (218)..(218): n is a, c, g, or t
  Peptide Sequence Number=SeqID_101664
tttttttttctataaaagaaaagaattgtgttagatacgtgtgtttgatgaacggtgaatgtgacagatgctgaaagaaactgatgttgctggtctgcgtgccgtatgtctatcggctgggatatgtgtgaatttgttgtcaggatacgaaccttgttgttcactgcatgctggtgagaatatgctgcggttgtggtgctacttccgtgccacaaatntctccatgaatttgtggtgat

SEQ ID NO: 35691 - DNA, 411 bp, Setaria italica
  Peptide Sequence Number=SeqID_101665
taagaatagaacaaatactacaaacaactacaggaaacaaaggctgaagtggatcggcttactcgtgatatagagttacttgaagagagagtgctttcaataggcagctcgtctactatagaagctgatctgaagcgtcattctcaagaaagagagaggcttaattcagagttcaacaggtgtcaaggaacactttctgtttatcaaagtaatataacaaagcacaagcaagagcttaaacagacacagtacaaggatatcgagatgcggtatactaatcaacttctccaacttaagacaactgaaatggcaaacaaggacttggacagatattatgctgctttagacaaggctctcatgcgcttccacactatgaagatggaggagataaataaaataatacaaggaact

SEQ ID NO: 35692 - DNA, 706 bp, Setaria italica
  Peptide Sequence Number=SeqID_101666
cgaaggaacctcgaggaccagttcgagtgctttctcgctgtgcagtcacaacaacaagcagaacgagattttgccgtagcgaggttggagcaaagtcgcatcatgcttgcgataagattaaaagagcataatgggaagaatcacgaggtcatagatgaggcatctgattttgtccgcaacgtctaccaggatgtttggccttctctgtcagtaaacaagcctgagaagtgtgctgacagttccaatgacatggtaaaaggtccgaatttctttgcgaggatggtttcttctagcctctctatagctgggagctaattcagtatgaaagatctgggtggtgcgttatggaacagtgcagctttcgctattggcataattgcactgctgcagttgcgtgggttagcttcaggggcacatggtccagcagttggtaactacccctacaggaggatcaatgagaagaactcatcgcggttggggacatcgcgaggcggtagtacaatgtctcatcttgatgtgtcactagccaaaggttaagggatttgtaaatgatttgctaggatacatcacattagaagattgttctcgtgtgttgtcctctaggtaaccatcgaattgttgagtctagattcagatcagtttaggtgagtcgatctctattgttggttcaattgattgtaatgtgaactgtatccctttaggcagc

SEQ ID NO: 35693 - DNA, 346 bp, Setaria italica
  Peptide Sequence Number=SeqID_101667
aacattgattaaagggagaaggaaaattcgacagggttagtcgcgtcatcaatcagattttttttcgcatgattgttcgttgatttgtcatgagacgagattgattatgcagttggataagcagatgtgtaactgataattgcagtgatgtggtaactgataattacagagtacgcagtagtcttcaggttccaacaagatcatatcatggcggtataccataatgcgctttggccatgttcttgtaacgtgaaacgacagcaaataaagtacactatagcaactgcaatcacatgcatggaggctgaaatggcgattagcagtttaccaccttgattagacaact

SEQ ID NO: 35694 - DNA, 781 bp, Setaria italica
  Peptide Sequence Number=SeqID_101668
acagtcctttccctgtgggcctggcgtactgaacaggcacaattttagtgacttgttaaaccagcatcaagtaaggaaagtcaattgatgatattcatttgacagatgatgaactggggttatatttggatcttgccccatttttaaatccttcaccgtacatagtgccagaggacatgtcattggcgaaggtttacaatctcttccgccagcttggattgagacacatatttgttgtccctaggccttctcgtgttgtaggattgataaccagaaaagatttgttacttgaggaggatgacaatactgtgatggcggagctccaatcgacgagtgtaaggggcttgctaaatggcaaactgctcggcagtaatgcacatctggaacgtcctcttcttgacgaacttgtgtttgagtagatacatagcagcatacgacttaagataattttgatagcaagcagttaaccatccactgcatattgggccatggctattccctccaattttacatgaatcaagcggcactgagcggatcactttgctgtgcctgctgcgactgaggtaatttctccgtgccgtgtgtttaggttaggtgattgtaacttgcacagaaatgttcatacacattatccatgtatcctacgatagatttccaaggcgctgtgttaggcggttgtaagtagaattttgtaatgggtgattgcgatggtaaagacaaaagctactgatgaatgatgattggcttgttacttttacaaaaaaaaaaaaaactaaactag

SEQ ID NO: 35695 - DNA, 451 bp, Setaria italica
  Peptide Sequence Number=SeqID_101669
acaacagtagggatctgcaaaataccacttgagttctaggtgggtacggatttttgaaagcgatcgtgatcggcgggaccttgtaagttacttttgttcaggcaatttattaacttaccctctgtgtagctgttaaatagagtcactcatgactaattttgtcactctacgtttaatattaaaaatatcttgaattgatgaattcattggtttcctcgtgccatttagttttactttccaattaggccatcctgttgacctaaaaagattggactggactgtgtaaacaaatgcaagccactcgtagcctgtttgcagcccagcagaaagttgagtctagcctggttccagaactatttgggtagtacagaaaatggatactgtattatttgctgaaacatttaccataccttaataatgttagaacaaagatcgtctgagtggagtggtt

SEQ ID NO: 35696 - DNA, 1737 bp, Setaria italica
  Peptide Sequence Number=SeqID_101670
taattcgtaaggtagggtaacgttacgtcgtcttcctttggttgtcttgtctattcctttttctttggttggtttctaattgtagtaattgtacttgttattctatttgccctggaggaaacatcctggtggagaagtcatcgaatgtggagggtattcttcacatctgccgttgtggccgttgtggtgcgttcagcaatgaattggtgcaacagtggaaagtgtggtcattttggagctggaggtttcataatctgggacatatctggaggtcaagaagattactcatatcaggaactgtttcccatgacaattattggtgttattggcggacttcttggagcattatttaatcaactcaccctttatataactaaatggcggcggacatatcttcataagaaagggaaacgagtccagatctttgaagcctgccttatatctttggtaacatccacgatttcctttgtgttgccactactaaggaaatgcagccaatgccctcaattagaaactaattctggcatagaatgccctcatccacctggcacagatgggaattttgttaatttttattgttcaaaagataaagaatacaacgacctggcaaccattttcttcaatacccaggatgatgcaatacgtaatcttttcagtgcaaaaacattccatgaatacagtgcacaaagcctgatcaccttcctggtcatgttttactccttagctgtcgtgacatttggaactgctgttccagctggtcagttcgttccaggaataatgattggatctacgtatggacggcttgttggaatgtttgttgtcaagcattataagaagctaaacatcgaggagggaacgtacgcgctccttggtgctgcatcctttcttggtggttcaatgagaatgactgtatctttatgtgttatcatggttgagattacaaacaatttgaaactcttgccattgatcatgcttgttcttctagtttctaaggcggttggtgacttctttaacgaagggctatatgaagagcaagcccgattaaggggcatccctttactggactccaggcctaaacaggttatgagaaatatgaatgcaaaagatgcctgcaagaaccagaaggttgtctgcctacctcgtgtttcaagagtcgtcgacattgtttctgttttgcgaaccaataagcataatggtttccctgttgttgaccgtgggcagaatggcgaatcagtcataggtctcatacttcgtagccacctactggtacttctacaagctaaagtagatttccagaacagtcctttcccttgtgggcctggcgtactgaacaggcacaattttagtgacttcgttaaaccagcatcaagtaaaggaaagtcaattgatgatattcatttgacagatgatgaactggggttatatttggatcttgccccatttttaaatccttcaccgtacatagtgccagaggacatgtcattggcgaaggtttacaatctcttccgccagcttggattgagacacatatttgttgtccctaggccttctcgtgttgtaggattgataaccagaaaagatttgttacttgaggaggatgacaatactgtgatggcggagctccaatcgacgagtgtaaggttttgatgttcctcctgtcccccaattattgtttaatctgcaagcctgtacattgccacaaggaacttatattttgtttgcatttgcttaaaacct

SEQ ID NO: 35697 - DNA, 1032 bp, Setaria italica
  Peptide Sequence Number=SeqID_101671
acgagctcttctccgccgcggccgtcgagagcctggactacgaggtcatcgagaactacgcgtaccgggaggagcaggcgcagcggagcaagttctgggtgccctactacgtcatgctcaagtggctgttctcgctgctgatcggcgtcggtactggattagctgctatattcataaatctggctgttgagaacttctctggatggaaatatactgcaacatttgctataataaaacactcatattttgtgggattctttgtgtacactgttttcaatttagcccttgtcttctcttctgtatacatagtcacaaactttgctccagcagctgctggatctggtattccagagatcaaaggttatttaaatggagtggatacacatggaatcctacttttcaggacattagttgggaagatcttcgggagtattggatcagttggaggtggattggctctaggaaaagaagggcctcttgttcatactggggcctgcatcgcttctcttcttggacagggtggatctgcaaaataccacttgagttctaggtgggtacggatttttgaaagcgatcgtgatcggcgggaccttgtgacatgtggatgtgcagctggagttgctgcagccttcagagctcctgttggtggggtactatttgccctggaggaagttacatcctggtggagaagtcatcttatgtggagggtattcttcacatctgccgttgtggccgttgtggtgcgttcagcaatgaattggtgcaacagtggaaagtgtggtcattttggagctggaggtttcataatctgggacatatctggaggtcaagaagattactcatatcaggaactgtttcccatgacaattattggtgttattggcggacttcttgagactcctctagccaaagttggatgaagttctatgggaaacatagtgctaactgagtgatgcatgctcggatgctccaatcctgaaaagtcatatcccagtagataccaaaccgaataagcagtcctattacatgtct

SEQ ID NO: 35698 - DNA, 210 bp, Setaria italica
  Peptide Sequence Number=SeqID_101672
ccgccgccgacaaggccgaggagggcgtctggggtgaggtcatcatctccacgaagccgcccaaggagtacctccagaccaagagccacaaggaggaggccgccgccgacaaggccgaggagggcgtctggggtgaggagatctccgacgacagggccccctcccggcagatgtcggagcagtacagcgggaagtacgaggcggaggagg

SEQ ID NO: 35699 - DNA, 777 bp, Setaria italica
  Peptide Sequence Number=SeqID_101673
acgacatggacgaggacctcaaggtcgacccggagaaggtgacgcggatgagcctgggagagaaggcgtacgagaaggccatcgtctcccacggggctcacatcatcaggtttacgcagagaaacttgctgcggatattcccgcggtcaacgcgcatcacgtcgtcgaattacaatccgatgatggggtggaggtacggagctcagatggttgcagcaaacatgcaggtaactgcacttcagtaactttgtatgtcagtatgtgtgtgtttcttcagtaacttagccgttccaactgtatttgctatctcagtaggatatgtggtgtcacattgtaaatctgaagcatactgaactgactggcatcttggagttatgttatgcagtgttactgttactgacaatttatttccccatggaagtgagttattagacctttcttaggtttagtcactgcaaacaatgtaatgcgatgaacaaaaggattccattatgtctgaatgaactgcaagctgtgccgagctgattccaagtgttggctatcacgtactcctcagggccacggacggaagctgtggctaacccaagggatgttccgagcgaacggcggctgcggctacgtgaagaagcccgacatcctgatgaacagcgaccctgacaaactgttcgaccctacagccgatttgccagtgaagacgaggctgaaggtgacggtgtacatgggtgacggctggaggtttcgacttccgcaagtacgtctattttcgtacttaagttt

SEQ ID NO: 35700 - DNA, 2137 bp, Setaria italica
  misc_feature (2121)..(2137): n is a, c, g, or t
  Peptide Sequence Number=SeqID_101674
tacaaatccaacagcaaaatatacacacgcatatatccatattttccggcaacaagttaagcagagcagcacagcagcagcttgcagctgtcggctagcccgccgcgtcgtcgtcgatctcggccgccatgacgacgtaccgggtgtgctgcttcctgcggcggttccgggcggcgtcgaacgagccgtcggaggcggtcagggacgtgttccaggcgtacaccgacggggccggcgtggtccgggaggaggcgctgcggaggttcatgcgggaggtgcagggggagacgaccgacgccggcgccgaggcggcggccagggaggtgatggcgttcgcggcggagcagaggctgctcaagaagggcggcctcaccgccgagggcttccaccgctggctctgccacaacgccaacgccgccctcgacccgcgcagaggggtttaccaggacatgggctcgccgctgtcccactacttcatctacacgggccacaactcgtacctgacggggaaccagctgagcagcggctgcagcgagaggcccatcgtgaaggccctcctcgacggcgtcagggtcatcgagctcgacctctggcccaacgccgccaaggaccaggtcgaggtcctccacggcaggacatggacgtcgcccgtggagctgatcaagtgcctggaggccatcaaggagcacgccttcacgtcatccccctacccgtcatcctcaccctggaagatcacctcacgccggacctccaagccaaagtggccaagatgttaaaaggagaccttcggggacatgctgtacatctcggagtccgagaacatggaggagttcccctccccggacgagctcaagggcaaggtcatcatctccacgaagccgcccaaggagtacctccagaccaagagccacaaggaggaggccgccgccgacaaggccgaggagggcgtctggggtgaggagatctccgacgacagggccccctcccggcagatgtcggagcagtacagcgggaagtacgaggcggaggaggccggcgaggaggagccgccggacggcgaggccgagaagaaggcgcggcagggggcggacaacgagtacaagcgcctcatcgcgatccagctcacccggaggaagcacgacatggacgaggacctcaaggtcgacccggagaaggtgacgcggatgagcctgggagagaaggcgtacgagaaggccatcgtctcccacggggctcacatcatcaggtttacgcagagaaacttgctgcggatattcccgcggtcaacgcgcatcacgtcgtcgaattacaatccgatgatggggtggaggtacggagctcagatggttgcagcaaacatgcagggccacggacggaagctgtggctaacccaagggatgttccgagcgaacggcggctgcggctacgtgaagaagcccgacatcctgatgaacagcgaccctgacaaactgttcgaccctacagccgatttgccagtgaagacgaggctgaaggtgacggtgtacatgggtgacggctggaggttcgacttccgcaagacgcatttcgacaagtgctcaccccccgacttctacgcaagggtggggatcgccggagtggcggcggacacgaggatggagcagacccgggtgatgatggacagctggatcccgacgtgggaccacgagttcggggagttcccgctggcggtgccggagctggcgctgctccgggtggaggtgcacgagtcggacaaccaccagaaggacgacttcggcgggcaaacatgcctgccggtgtgggagctccgaccggggatccgctccgtcaggctctgcgaccacaagggccagccgctgcgatccgtcaagctgctcatgcgcttcaagttcttcccctcctcctccaagtaaccttgctcccgcatgaatgttcagagaattttttttgttggttcgctgtctgtgatgctttgtgcaggaatgtgcatctgtgtgatacgacacggggactgggagtgtgattgtgttgtgattatcattggtgtgataaatgggttaataaaagatcgatcccgtcattgaatgtaaaaaactagtactgctcgtgttagtacagagnnnnnnnnnnnnnnnnn

SEQ ID NO: 35701 - DNA, 401 bp, Setaria italica
  Peptide Sequence Number=SeqID_101675
taaccctgtgttgtgttgctttcacagttatccagtgtgttgctacggtttggagctattaaatatcacctttatttttctaacttccagattatcgacgggatcctttttagtttcagttagtgcttctcacctagaagatgtcagctaccagagtaccatggttcttcttaggggacaaaatcctgatactggttatgcacatggaggaaaaggggggacagtggacaattgggcatattgcacagccgttcttgcaactctgcacctgttttgccattcaaagttgttatgatgaagcacacagatgaaacaatatcatttcctttaatccaattctagctaaatgtgtttctgaatataatttgcttggctcagatgcataatagtttatttcaaaa

SEQ ID NO: 35702 - DNA, 372 bp, Setaria italica
  Peptide Sequence Number=SeqID_101676
agtattatctgtcaaacttcatacaagagaaggaaaacatttcagttcagctgtctgcttacatgttgattacaagggaaccaatgtgaaaaatattatctccctctgcagaattgtatgccacatcagcatgagagacatctcatgctcttgcccatttatttccaagaatgtccacaaaaatgaaggagaacttgcaaagagaaataattcttaacatgggttataccgagagcaaaatctggttttattcaagacaaaatgctaatatgctatcaaatatctggagctgcattagtactttggttctaaacctacacttcaggattgcgcttatgctctttgcaattcaatttatgactagtaatagca

SEQ ID NO: 35703 - DNA, 677 bp, Setaria italica
  Peptide Sequence Number=SeqID_101677
caagaacttaagaaattttttccaaataatttcgataggatagggctaaaccattgtgctagatatagataacaaatataatcctatgttgtagtctggcctttaaaccttacaaaattagcagaaaactcaaggtaaaccaacactttttgggcaacgtgtaaggacatacattgacacctacactggcacaaggacgtgctagcaatacaaggtaacaaatgtgatctgagttgcatatggcaacgcctgtgagctattgctgatagagcagggtcacgtatatacttcaggacttgctagtcactattcagtattcataattccagaagaatatctagtcattaaaatttattcatcgtaattcaagcatcactcacatgataacacctaattctggaaggaggaaaaactttatgaactgctgaagcaagtaaaaaagggtccatgagtgttcataactcacatgtagttttaaattatatagtccactttagaaatatcaaacaatttgaaagtaaaatgatgatatagagaagctcctaagcatatattattttgagcaaaagggaaagaagtttacacaaatattgatttggttttgaacctttcataataaattttccaaatattacttactaacaaggtcaagagcaatcatggctgcaatacaaaat

SEQ ID NO: 35704 - DNA, 361 bp, Setaria italica
  Peptide Sequence Number=SeqID_101678
cttggttctcaattgactccgtttgtcagttcagttaacatgacaaggcacacatggctgcagttcagaattcagattgccatcacgggagaagagagcaccagagtcatcgtccgatgagggctgtagtgcattgatcttgataacatatttcttccgagtggatgtgctgctgctcttggagctcatgtccagatcatctgaggcttcgcacaaagtgaaatcctcatcttcataagcattaccaatatgaccactgcatttccgacagagcaaccgtgtcctgtttctgaagaagccccatgaacggcttgaatggaagtatggcatgcagctcacctcatcggtttgtgttaaaacg

SEQ ID NO: 35705 - DNA, 153 bp, Setaria italica
  Peptide Sequence Number=SeqID_101679
gcggcgcgggatacgacgccggcgtgtgcaagtcgcggtgggaggcgtccggcggcatcacggccgggacgtacgagtacgtcgacgtggtggcaccgccggctgcgaggggcggaccgcggggcaggtacattgtagacgccgacttccggg

SEQ ID NO: 35706 - DNA, 432 bp, Setaria italica
  misc_feature (5)..(5): n is a, c, g, or t
  Peptide Sequence Number=SeqID_101680
agaanaacaacttaggacggaaataggaagaacaaagacaaaaatacaagaagctgcagtgatagctaggcttggaatcgacgtttacattacgaaggctggaacagaacactcgcagagggctttaaagggggatgtgagcacggactctgaagactggcttggaaccattatacgctcttccaagtagattttatttattacaaaacattgaacgattactggcggtcttattaaccccagttatatgatcgctggtgagccttcggctttggttgatacttcacggctactttttcctaactgtgatgacgcattggtcaatatgcgtctgtttgatgttgtagctcagtaactttgatttggttgctaaaagtatcgatgcatttagttggaagaatgatgacgcatgacctcaaaaaaaaaaaaaaa

SEQ ID NO: 35707 - DNA, 292 bp, Setaria italica
  Peptide Sequence Number=SeqID_101681
tcggccgaagggaacacgccgcgcaggcgggcccactgctcgcccgggcgggtcctcgacggcgaagggcgcgggggcgggggtactcgtggcggggtcgagttgtcgagaaaggagatctcagagcggacggagcggaggaggcggtcgatgaaggcggaccggcgcatgtcggagatgtaggtgcgggacgggaggaggcgcggggggctgggggaagggagcggaagcgcgccgaggtgggggcgcaggcggagcagccgccgtgccagcgccatggcgatgctcgtcg

SEQ ID NO: 35708 - DNA, 420 bp, Setaria italica
  Peptide Sequence Number=SeqID_101682
tttttttttttggacatcaaatatgtcttatatacatcatgaatacgtatgttttatccattatacaaatcacgaattcacaggtctgatctgctttatacattacctaaagcgagatcaactagtcctagattactacaaagccacattgactgaatacattgtattcacaagagaaagtacatggaaacaagaataaaaaaatgctatcacttcttataatctgcggctacgttacttctccctttggctggctacaatacttgaattctgctgcaacattgcttctcataatcacatcagaatgtgtatgtacagctagcttaccattttgaaggagtattcaaacttttaagtgctgattgctctgaataagtaattttttagagcattattctcccatagctgtaatatgccaag

SEQ ID NO: 35709 - DNA, 238 bp, Setaria italica
  Peptide Sequence Number=SeqID_101683
cgggtctctggactcgtggagatgaagcggctcgacagcgcggcgcgcggcgaggagatctccatagcgtggcagctcccgcagtacttcttcctggccggcgccgaggtgttctgctacatcgcgcagctggagttcttctacgccgaggcgccggacaccatgaagagcacgtgcacgtcgctggcgctgctcaccatcgcgctgggcagctacctctgctcgttcatctacgcca

SEQ ID NO: 35710 - DNA, 466 bp, Setaria italica
  Peptide Sequence Number=SeqID_101684
gacgacggcgcgacggcgaggaagatcaccatcgcgtaggacaagaatacccccaagtatcccccagtacttcttcctggccggcgcggaggtgttctgctacatcgcgcaactggagttcttctacgccgaggcgccggacaccatgaagagcacgtgcacgtcgctggcgctgctcaccatcgcgctgggcagctacctgagctcgttcatctacgccatcgtggcggcattcacggccacagcgggcagcccagggtggatctccgacaacctcaaccagggacacctcgactacttcttctgggccatggcagccatgtgcacgctcaacttcgtcgtgtacagcgtcttcgccaaatactacaagcccaagaatcaagactctgctctcatagtctcatgagtcatgattagcagcttctcgtcttgtccactgcattgttgcgcatttgccaagttgtgt

SEQ ID NO: 35711 - DNA, 528 bp, Setaria italica
  Peptide Sequence Number=SeqID_101685
gtcttccatagttttttatgttgcgatatactcggtgaagaatccttggtgtttctgtttttgaagattcttgatggttttgtactttcccttcaaactctgatgtggataacctcttcttttttccagttctaatcatggatcctatggttgcatcatcagagcctggatcttgctgagcttcctgatgctgtgatgcactcaatgaactatccaccaagggaagcttcttatttttcgctctgcttttaagtacttgtaacgtttcttcatcagatgatcttccatgagttgtgtcatcatggccatggcttgatctgtgtaaccttttccttctagtgcgggagcttttaggcttggaatcagggttatgttcgcttagcatgtggttcagatcatcaagtgagtcattttgtgattccgtagccagatctccacttgagagagatccatctgcaaccttttttctccttatggtattcctgagacctaattgtgtaagcttgcgagaacttgagtagaagatat

SEQ ID NO: 35712 - DNA, 437 bp, Setaria italica
  Peptide Sequence Number=SeqID_101686
aggacctaatagtagtttaacaatgctaataataaattacatcggtatcattgaagttatttaccaatccatttaactattcacagaaaccacagataatttataggacaaatttataaggtcatcagtgctgtatcatccataatagctgagtagggggagggggcttgtttggaaaattgaagaagtgttgatgcaataaaacttctcaacatgccttgaacatcctacagtgctcaaataaacccaggtgttggtaacaccttggtatgtgatacccttagtctcattatctcatataaattatctagccagggtgtgagaataagaagaaaaacaaccagaataagtggtttaaccaacctccagcattttagatctaattcaggtgagctcattacagtgtaacacagccccaactctctgaccatgctatt

SEQ ID NO: 35713 - DNA, 436 bp, Setaria italica
  Peptide Sequence Number=SeqID_101687
atcagactcgttgtaatttacacccaatttaatgaaataaaacagtaattggatgaagaattcttcatgaattctcacagatcacaaagccgctgaaatcttccccgcgccgtaagaagggaccccaaaaatgttcatggagcagaaagattcagctgtgctcgccgtaccgctggctccgtagaaccgagctgacggagctgtacccgagcacgcggtgaagcggccccacctgccctggctgctcgccactcaggttgctccacgcgcgcgcgtactcggtgtcctccccgccgccgacggcaggctgcggcgcggagaagatcttcttcgggtggtccgtcgagccgctcgccggcagcgtcagctcgaacgcttcgccgcagccaccgcacttcagcctggaggctctgccgacgggcagggcggccggcag

SEQ ID NO: 35714 - DNA, 512 bp, Setaria italica
  Peptide Sequence Number=SeqID_101688
ttttcttgacttgtggcacaagtgtaaatattcaaatgtccatgcaagacagtcttgtattgtccttgattttataaacccatattggttcttgtgaataaggtccatgttaaccttttgtaatctgtttgccaaaagtttggtaagaagtttcatagaagagtttagtaaggatatgggctgcaacttttacagcaccttcaacctttgctattagagtaatgagagagccattgatgctttgtaaacaaatatctcctgaatggaatgcttgacagagatcatagaagtcctgtttgataagtggccaacatttctttaagaagttattgttaaagtcatcaggtcctggggccttatcattcggtaaactttgaacagtagagtcaatttcttgttgactgaaaggctcctctaagcattgcaaattatcagacatatggaaaatattcaccttcacgatctgttggaaggacaaggaccacaaagattatgaattgggtagctggagg

SEQ ID NO: 35715 - DNA, 262 bp, Setaria italica
  Peptide Sequence Number=SeqID_101689
gccagcgtgggtacggcgccaagccggagcagcatgagtgggccgtaggattgggacagctcgcgcagggcccggtggggcaggtcgctgaagcaggacaggaggaactgtgggccctgtggcaggtttccgatgagtggcagctgccatggcccaggtgggaggcgaagtatcggtgggtttgtgcgcgatggcgaggtgcagcggctggtgatgagcttgaagaggaggaagaagataacaagcaaagggaggctgaact

SEQ ID NO: 35716 - DNA, 338 bp, Setaria italica
  Peptide Sequence Number=SeqID_101690
accaccacctcggcctcccttgttcctcttactcttgcccatgacgacggccgggcagcgcaagaagtgaagagtccaaagagccggccgcggagatcaggcgcgggcgaaggagcggtcagcggcgggccctacagagcgagccgtcgtcggcgggggcggcgaggaggaacagggaggaagagctggagctggaattggaaagggagaagcggaggcactcgccgtcggtgaggtcggattggccgtggagatgctgagccatgtgaaatcgggcgacggggaggaggggtggacgaaccgcggcgagcaggggggaggggacttttctgccttcg

SEQ ID NO: 35717 - DNA, 800 bp, Setaria italica
  misc_feature (800)..(800): n is a, c, g, or t
  Peptide Sequence Number=SeqID_101691
atcgccgccgccgctcacctcgcacgtccacggcgccggcctctgcttcgtctcgcttaccatgaagcagaagccggacaggcccaggtccagttctagacccggccggccgggcctcggccgcttcgctgccgagtgcatcgccgccggcgaagaacctcgcttgtcgacgccgttacatgccggtgttgcttgcgcactgttccttccaggaggtggccgcagcggcggcgaggacgtgctgggcgggctctgtgactggcccctgcggcccgggggaagcccgctgaagaacccggggtccaggtcgtcctggaacatgtccacgaacagctgctgcagctcctcgaaggtctccgttggcgtggcctggctcatcatgtcggccatctctccgaggaagtcgcccatccccgacaggtcggcctcgtcgtcctcgctgtcgtaaacgccgacgtcgtagaggaagcgcttgttggagtcggagagcacggagtatgcgccctgaatctcctggaaccgctccttggcctcctcgacgcgcgccgagctgccggacgccgagcaccggtccgggtgccatatcatggcgagcctccggtaggcccccctgagctcggcgtcggtgcactccctgttgagcccgagcacggcgtagaggtcggcgccgggagccgccgaggcctcctcctggaggttgcctccgcggccggcggccatgtcggtcggcgctggcgagcgcgcagaaggctgctgctgcgtgctctgttctgggaggaggagcagagtggcgtgagggn

SEQ ID NO: 35718 - DNA, 400 bp, Setaria italica
  Peptide Sequence Number=SeqID_101692
tctgatgattcttgcattctagagttgcagagtgctgcatgagatccagtaccaactctctttagttcggcttacttaagttgccaccaatagaagatttttggctgcataacattgaaggatccaggcatttccttgaaacccatttggactttggtggtggttgctgagattacagatattgactactgaaaacaaaatagtctgtaattgtactgtacaatgctagtgactttcgttgtcgttgtgattacaagttgtgattacaagttgtcgttgtggtggtgtaatgtaagctaaaacatgcctaaacccgtgtgcgtgcgcccggataggcccgcgatgtacaattcgtttttcttcttaatacaaagatacgcagctctcctgcgtattcccg

SEQ ID NO: 35719 - DNA, 651 bp, Setaria italica
  Peptide Sequence Number=SeqID_101693
caaggcaacaaagaacttcagcgacgccaacatcgtcggcgcggggaggcttcggattggtgtacatggggctgcttcttgatggcacgattgtcgcgatcaagaggcgtctaaatacttcaagtcaggattgcgctgattaggttaggtggctctcagagattcgtcaccgaaacgttgtaactctcattggttactgtcaagaagggggtctacaaatgctggtgtacgagtacctgcccaatggcagcgtctgtggccatctgtatgggaaaggctccacggcacggcttgagttcaaacaaaggctgtcaatagccattggggcagctaaaggtttaaaccatctgcacagtcgcgatgttcctttgattcacaaaaacttcaagacaaacaatgtgcttgttgatgaaaatttcattgcaaaggtggctgatgctggacttgttaggttacttagagggtctgacgaagctggcccatcacatgggttcagtagcagtgtctaccaagacccagaggtacaatcggtggctcagttctctgaaagcagtgatgtgtacagctttggagttttccttttggagctaattactggcagggaagcagcttccttgatgcctccagaatccagagaatatctggcccact

SEQ ID NO: 35720 - DNA, 600 bp, Setaria italica
  Peptide Sequence Number=SeqID_101694
aagaaccttaacaagaattcacgaacctcgtcgtgtgtagggtgcctttgaagtcacagactttcgctccatggtagagaaagccttgggagttgagatgcagcttcaggtcacagctgatctaaataagtctttgagtggtgaccagtctcgtggtcagggtgacaagaaggtccattctggtggtcatgttcataggaagggcaagtttcagcgtcaccagccgtaccgtggtggttcagctcagtctcgtactccaggagggagtactcctcagtatcgtgccattcccaaacctggcacggggatggtgtgcttcaaatgtggagatgcgcatcgtcttcgagagtgccgatggtccggcaagtgctctatttgtggtcaagatcacaaggacgtggtttgtaggaagaatcctgatgccaagcttcgttgggagctagtgtcttcttcagctcccaatggtgcattccatatgatggcggctgcatcttctactcctcacctacctgcaccgccaccgcagcagcacctacttgcaccgccaccgcagcagtacctacctgcccctacacctcagtacttcctagcgccaccggt

SEQ ID NO: 35721 - DNA, 444 bp, Setaria italica
  Peptide Sequence Number=SeqID_101695
aaatacatgagtttcaacttctgccagcgtagtctttgctgatgcagatgttgattttggctttcccgttgcgacttggaaggttgaacgccttctccttgatctcttgaaaggcccgcatcgtgtcgccatcaaagccacctgcaaactggtgtactctgaatgcgaatctgactccttgaagcattagctcctcttcgtcagggccaccttgtatggcctcaagctctgaggaaacccttctcagatacttcattgctagcttcatagattgtagtttgatctgactaacaattccactgtcctgcatccactcccatgggatttggtacccgcggtaccgactcattgcgccatccctcacacgcacaaggctgtacactccatgctccaacttctcgaagagagcctgcatcttcttgagagcagaagagcaggacaaga

SEQ ID NO: 35722 - DNA, 754 bp, Setaria italica
  Peptide Sequence Number=SeqID_101696
attcattccccctctccgctccgctcgtactcgccggcgccgcggcgccgcccgcccgtgcgtgaagcaaggatcccttccctcccaatccccagtctgaggctgcagccgcttgaggttgcgggagggcaacgcggcgcgcaggaggcgaatcacgccagccaccgccgaagctgacggaaccaggaggcactgtaaagtctgaacaaccgaacctcttaccaacttcagtacatcagtagtacattcatcagcaaagaagccaaggatcgcgatggctctgcggcgagcactgggatggtcggaaggggaggtgatgcggccagagtcaaagccctgctcccggttgatgcggcagactgctggcatattctccgttggtggcggtctggctttctgggtgctctgccgccttcactatggtccaagaataacagttccaaggagtctcaggtgggcgtcatgcggagcagtctctgtgagcgcgacaacagccctgcttgtgcggctcttcagcccagagtgtgaacctcagaacatagccgcatttgacatacctgaattgaagcctgaataggttatctgaagttcagagttagtgtactaaaacctatcatgttttttaccccgtgcatcctggacagtttctggaagatacttctgcatcatgtagcctgccgtaaagatctatgccgtcgcttgaatttgccttactggctatcatgtatggtagatttgtctccgaattatgagc

SEQ ID NO: 35723 - DNA, 1160 bp, Setaria italica
  Peptide Sequence Number=SeqID_101697
tttaagtttaacttttaagggtttaaaaggggtttaaattttaacgttaccgggttcttagtcggtcgtcggggtcgggggaggaggagccgcggtttcgtcgctcggatggcggcggggcgatgacgcgggcggcgggagcggtgcggcgctgggatgcggacgatctgcgatgtgtgcgagagcgcgccggcggtgctcttctgcgcggccgacgaggcagcgctctgccggccctgcgacgagaaggtacacatgtgtaacaagcttgctagtcggcatgtgagagttggacttgcaaactctaataaacttgcccgttgtgatatatgtgaaagttttcctgcttttttccactgtgagatagatggcacctcactttgcctgagctgtgacatgactgttcatgttggtggcaaacgcacccatggaagatacctgctcctaaggcaaagtgttgaatttccaggagataaactaggccatatggatgatgtagctatgcaaagcaaggatcctgaaacccagatagatcagaagccacctcattcagtaacgaaggagcaaatggcaaaccaccataacggctctgatgatccagcatctgatggaaactgcgaagaccagggtaacattaattcgaaaatgatcgatcttaatatgcgacctgttcgtactaatgggcaaggatcaaattcccagactcagggggtggatcatagcgtgaacaaccatgactctccaggggtggtgccaacaagtaattacgaaggggacgccaacaagtaaacattggaagttcggaatgtacatttcttcggctatatatactgctgaactgctctacagcagctcgggggggatcagaatacggggggtgtagcatcggtccatctgttactatttgctagtagtacatttctggcagagttggagctaacgactgcatcccaattcggcttgtcgtggcctagacggtatttatggtcaagtctattctcgttgcgattgtcagaactcatgtcacttgtcacattgccgctatatagaagcgcaagtggctgacacggtggcacctgtgctttggagttgggaatgctgtatgccattagaaaaactgtaacaaaagatcaatagaccattcctttttctgtaaaaaa

SEQ ID NO: 35724 - DNA, 1790 bp, Setaria italica
  Peptide Sequence Number=SeqID_101698
aaccggaagcatcactcaactgatcccttcagaaccgcatacaaaaaggcacgatagaaaacaatattgccagagttgattctataacaggggggccctcagttctacaacccatacaaatccgtatgcttgatctaatcttttagcattgcagtatgaagcgccgcaggtgttcaacttcaaccatcaccacttgcacgcctgcctctgaattttggagttcatggtgcccttccccttgtccttgtaggcgttcctggaggacacgggccttctccgcccatgggcagctgcgattgcctttttcctttgcttgtttaatttttttgtgagctccgcatcttcctcgtcatcatcgtcactgtccgatgactcatcatcattatcgtcatcttcctggggaagcaccttgccctctgattcaagcggttccttagcgtccccattgctatctgagggaggactttccaatctgctctcaccgctacaacttgttccatgctcttcagaaaaagttccaggtccacctgaattccttgatgtaagattacaatcaagctcatcggaacggtcctgatctattttcaaggaataaataggcacagcatcaccaatctcatcatcatcatctgagctggaatcctgtccttcagcatcttcttcaatgtacttctccatatccacttgcgccttcctggtaaatccactagcagctagttccttgtccaaggaaccagcagccttgttcacagacaaaaaggatggcctactagtcccttcaccatcactttcagatccaacttcttcttcatttttctctgacttaagattgaacctcttgttaaagaacttgtagatacactcaatgtctcggtcaaagaacatttgggcattacgatgagaaacagataccatctgtggaaagtcaataaccgtaattttttcatcatcatcaatcatgatattgaactcattaaagtcacaatgtatcagcccatgctctgccaaacgaacgataagaccaagaattgtgtcaaaaacatcatctggattctgtaactctttcacttgaacaagaggatatccctgtacaagcgacatgatcacacaatgtcgattgcaatccacagcagttggaacagggaaaccatggtctcctaaagccttcataaaggcaaattccttcaaggctgcaagtcgtgagaggtacagccaattaaagctccttcgatgccttagatagtcacgcttagatttcacagccctaaaagatgtcctgcccagcctatgaagcttcatggcaagcactgtaccatcctctgtcgcaacctcaaatatgtctgactcctttccaacaccaatttgacggccaactgaagcaaaaactcctcgattaaccaaagtcttgatggcaaggaagtcatatccaagataggtgagccgatatccatcatatttagtggcatcgtgatgcaccaacttgttcttcaaaagattcctcagaactttgtatgtgcctccatgcttcagtccagcgatcctgtcaacaagctctgcggggacaatctcgtgctgtgatcagtccaaggcaaaaggccaacgtcagatgcggaaacgggtaatctctcacaggcataataatatgtaacgagatgagagattgagatgcaaggttttggggtcttacgttgcgcatgcccatctccacggcggtgaggacgcggaagtcgtccttggtgaggtaggcgcgagggcgttcacgtcgagcttcatggtgtcctgctgctgct

SEQ ID NO: 35725 - DNA, 610 bp, Setaria italica
  Peptide Sequence Number=SeqID_101699
taaatgcagtacaaaaggcctagatgccaaaaaagaaaaagattatgctatgtgcattcctagagcaaatccaacgccgtgaagctccaacaaggattgcattacattacaccacggtaggtatgtaatgctgatgcttcatgcatcaaacttacttaaccaaccttctcccatccataaatcacaccaccatcttgctctatcatccacacaaacacatgctctcccaccaacctccccccaccctagtccctacccatgcatgccaagctcaatgcacactaccaagtcccagattgaaggagaaccctctgatatcacacaccttagagcatgccctgcaaaccagttggaaacagccatcagcaattcaacacatgatgatgatcataatgacaacgagatgcaaacaagttatcggccagctccaacttctactgccaatgaccaccaaggcagctgccaagttatggtatccagcaaagatgaactatggcacatacggtctcccttgtgtttaaaattgatacacgccgtatgtcaaacaaatctcaaagagacaaagacaactgttacttttggttcatgtattaggatcatgtggctcctc

SEQ ID NO: 35726 - DNA, 754 bp, Setaria italica
  Peptide Sequence Number=SeqID_101700
ccttagatgaaaccagttggaaacagccatcagcaattcagcacatgatgatgatcataatgacaacaagatgcaaacaagttatagctcaaacaccatgtagcagtgatgaatacaggaacaattacaactgcatgaggattaacaccacaaaagtaaaactatatcacacaactgaactatgggagcttcgtgggcagagacagagaagctttttcagagagcatagctgatgcttcatgtttcttagcttcttgttcctcggtagcataaatcagtcctagcaatttgtagattaatgtcactttgtgacagcctatgctactagcctatgtttctatgtgattcctatccaaggtactaatatgaagggaagtgctcctccaatttcccataaaaataatatggtatggatatcttcagagtttttttttaattattataccaaaagcagtcagtcacaagaccatacgtggcacattaccaaaattggagtgcgacttggagctactaatgagccatttcaactcattacaaatctgaatgacatactaaaaataagtttggcagaatccctcaacatggtatacataccttgataagaccaaaaacactttggtcctattgcattcctgcgtatctatacctcagcagcaggttccggttctcctgctcgagaacacggaggttgctctcctccacctccctggcgagcttctccaacttcctgagcatcccagcatacatgtcatcc

SEQ ID NO: 35727 - DNA, 1138 bp, Setaria italica
  misc_feature (1)..(61): n is a, c, g, or t
  Peptide Sequence Number=SeqID_101701
nnnnnnnnnnnnnnnnnnnnnnnnnnnnnnnnnnnnnnnnnnnnnnnnnnnnnnnnnnnnnggttattggagtgagcaacgaaagctcttcctttttttttttcttaatataagcaaagcaacgactgatcggctccaacaaggattgcattacattacaccacggtaggtatgtaatgctgatgcttcatgcatcaaacttacttaaccaaccttctcccatccataaatcacaccaccatcttgctctatcatccacacaaacacatgctctccacactccccccaccctagtccctacccatgcatgccaagctcaatgcacactaccaagtcccagattgaaggagaaccctctgatatcacacaccttagagcatgcccatgctaagaccaaaaacactttggtcctattgcattcctgcgtatctatacctcagcagcaggttccggttctcctgctcgagaacacggagattgctctgctccacctccctggcgagcttctccagcttcctgagcatccctgcatacatgtcatccatctctgccgcctgccctgctgcagagcccaggaccccttgcagcctcccgatcccaaacccgtccaccatttcatccaccgccttctgctcaccattggtgtgagtgtgacgttgacctgtgggctctggcgacgaaggctgaggaatcggcaggcagggcattggagattctgggtagaaggcgtggtactggtccctgaagccggggccgacgttgacgacgctgatggaggccgggacgaggcgggatccgaggaggaggaaggtgcggtagtcgtaggagtgggtggagaagttgggggaggccggagggggagacgaggatgaagaggaggggatgggcgatggtgcggccttctatggtcttggagagggagttggcgagggcgagctcgcgcatggaggggcggagcgcggtacggcggcgggaggagaagaagccaacggcggaggagggatccgaggagggggcctggaagcggccgaggggatcggagagggaggaggggtgggagagggagcagtggcccgagacggagatggagagcgcgggggcggcggtaggtcgtcgtagtcggagagggagcaggcgg

SEQ ID NO: 35728 - DNA, 440 bp, Setaria italica
  Peptide Sequence Number=SeqID_101702
tacttctactaaaatcttgtgtaatcgaattacgtctcttgcttcttcgcataaacaaagccactcttctctatttcttgcgtccctcaaccacttaagtcctgcgctggtacgtttggcgacaacaatcccagtccatgatcaatcgatcaatggctgccaccatcgtcttcatcccgtgctgggaatccggccacttcatgtccatgatcgcggccggcaagcggatgctcgacgccggcggcggcgccctctccctgaccgtgctggtcatgcgggcacccacggcggccaaggcttccgaggtcgacgaccacgtacgccgtgaggcggcgtccggccttgacatcagcttccggaacctccccgccgtcgagcagccgaccggctgcgtcgcccccgaggagttcaacttcaggtacacccaactccacgcgcca

SEQ ID NO: 35729 - DNA, 873 bp, Setaria italica
  Peptide Sequence Number=SeqID_101703
tgctggaggccggcagcggcttggcccacgacctagggtcagcggccgtcacagcgggcgtcgccctcgcgctcctcaaattctacgaggagctcgccaagcgcggcgtcttcgaggagaaactcagcaggaaacttgttcatataagtgttgggctggtgttcttgctgttttggcctcttttcagctctggaacatatgctcctttccttgctgcactagcaccaggggttaatattatacggatgtttctactggggattggactaatgaaaaatgaagctatggttaaatcaatgagccgctctggagattacagggaacttctcaagggcccactgtattatgctaccactataacttttgccacttctgtattatggagaagctcaccaattgctatagcacttgtctgcaacttatgtgctggggatggtatagctgatgtagtggggagacatctaggtaaagagaagcttccatacaaccccaataaatcatatgctggaagcatagcaatggcggtcgctggttttctggcttcagttgggtacatgcattacttccacacttttggttttattgaggaaacatggtacatggcgttaggcttccttgtggtgtctattgctgctgcacttgttgaatcacacccaatcagcacagaactggatgacaatttgacggttcccttaacatcattcctagttggtagcctcattttctgatgtttagcctctaagggcagggaagatgtttttctgtctgttctaacatgtaaaagattacaaacaagtgtaaattgtgagaattgtaccttgagaataatgaatatatttcccgtttattaaccagcattacatgtcttaaaat

SEQ ID NO: 35730 - DNA, 532 bp, Setaria italica
  misc_feature (189)..(189): n is a, c, g, or t
  Peptide Sequence Number=SeqID_101704
cctatcccctgtgtgccttgcctatcctctgttgcgtgtctcagaaatactgaatgactgaggtcgaatccaccattttgacctatcggattggcattgaagaactggggaacattttcatcaaccatgtcttcatcgccatgaacccagccaacatcagtcatatcttcaccattgaaccaaccattntccccatggcgctctggaaattcaaaagattacatagctttgcgacagaattgttttaagtatcaactgtaaagatatcttaccagcattaggatcaggattcagttcagcacaatgacagaagacatcaaaaagtgcctccagttgagcagggtcccccagtataatgcgcacttcagagactcttgatagctctaattcatcatttgcttcaggatttgattcaccagcctcctcgtctgtgccaacttctgcctcaatctgcgtgtagaggcagggcgagggatacgcctccaggtcgcgcgacacagcgtgcagcgtgtgtccttcctagtttgtagta

SEQ ID NO: 35731 - DNA, 1056 bp, Setaria italica
  misc_feature (87)..(87): n is a, c, g, or t
  Peptide Sequence Number=SeqID_101705
tcctaccttaccctttccccgtttcggttggttcgttccggtttcggtcgttacgtttccttacgttttttgttttttttttttttnttttttttttttttttttgttttacgtaagtgacaaaaagcctccaggtgacatccaaaatgactgagaacagcgattgcaaacagacgcaatatagctgtgccacgatacacaagggaaaagataatatatttcttttcccaatctcaccttctataggtgagatcaaagtaccgaactaatttcacacgattttccatcatgctctacaagttacattcttgaccagcagcaagaccttttctcaccaaaagtaaccatcgatgcaactccagaaagttgctcagtgatgttaatcctataacatcgaggaaggaaagaggaagagaaagtgtagacgaaacagtaggcaaccaagacgcatcggtagtgatctacaacaaaataaatcgcatggtgccttagagcaacatatccctgtttctaatctccattttcatggctctcctgttcctcctctgcatcctcaaaacgctggtcgttgatttgaagctcaaatactgaatgactgaggtcgaatccaccattttgacctatcggattggcattgaagaactggggaacattttcatcaaccatgtcttcatcgccatgaacccagccaacatcagtcatatcttcaccattgaaccaaccattctccccatggcgctcagcattaggatcaggattcagttcagcacaatgacagaagacatcaaaaagtgcctccagttgagcagggtcccccagtataatgcgcacttcagagactcttgatagctctaattcatcatttgcttcaggatttgattcaccagcctcctcgtctgtgccaacttctgcctcaatctgcgtgtagaggcagggcgagggatacgcctccaggtcgcgcgacacagcgtgcagcgtgatgtcaaggaagtccacggcgtagcccttgcccttctccacctcgctgagcctaaatctacccttccttggttggtt

SEQ ID NO: 35732 - DNA, 253 bp, Setaria italica
  Peptide Sequence Number=SeqID_101706
atggagacggcgacagaagtagcagcgagcaaagtagccgccggaagcagcggcggaggggtgccggcgccggcaggggagtactggagcgaagctctcaagtcgttcctcgaccacatccccatctcctccgtccccggcacgctccaacccaccgcctccccagcggtggagatcaagctcggcggcagtgtcttggacgccatcgacgccatgtacagcggcaacgcggcgggtgcggtgatcatcgacg

SEQ ID NO: 35733 - DNA, 372 bp, Setaria italica
  Peptide Sequence Number=SeqID_101707
gttacagagagctgctaagcatgtgtggcttttaactagttaattaactattatatcctgcccccttccctccctcgataatcccctccaagattatgtcgtcactgatcactcttactgctacactactattggcctctgtagcagggtgctgcctgtaaaaaattccgagcccattgctcctgcctggcggcgccgcagacgcactcgacgcccggccggtacccgaggctgttcaggcacaggcacaccgccgccgtcgcattgccgtgtccagctgtcgccgccgcttcctgcttcagtggcttgaaggagtcctccggcggctcgtagggcgccaggctgatggacaggttgaggtcgatgtcgagg

SEQ ID NO: 35734 - DNA, 245 bp, Setaria italica
  Peptide Sequence Number=SeqID_101708
gacatgctatgtagtttttacttttgaaagggagagaagagggtgcttaaaagttaataatttcaaatcctttagcaaccgtcatgctaggcgttgattattggaattgatcaataaattacatgagctgtgagtaaaatattcttatatgtcatcttgtataaaatatgtgtagcattcaaccattacattctcatctgtacgtgcagatatttgatggtattaaaaatgcaacagctagtcag

SEQ ID NO: 35735 - DNA, 719 bp, Setaria italica
  Peptide Sequence Number=SeqID_101709
acgacaaaacttagcatggattatcatgaataacaattaacatagtagctgatctgattccactaaaagcaaaaaagaatgaactggtacatattaagcagtgatatcaagacggggctcaaagcaaaatccagtgaaaagctggagaggaaatcttttgctcacaggacatttcaccgaccacttccattgcttatgcatcatgtcaaaaacaagcaaagcagttgcaccatagctttgtatatagacaaggtcatctgtgccactgcaggcaaaaacatcatcgaattcaccaaatccttggaagaatttgtggggcatccgagttacctcatgccactgtttctcatggagttcccatattcctattcctttaatgatatcaggtctgttgtgttttgcaattccgccaaccaaaaccagcttctccttcaagtttaccagacggccacatgtgagagaacatggtaccgggattgatgtttgcactaaagaagtcttcgaaggtccaccaacaaggtcatacatgataaggccatgacgagggttgacattgccaaggacaccagtggagtgaattaagcagtacaggactccgtcgcatatgacactatcatcaccccctctccaaccaatgaacacttcactcgcagaagttacccatgtaccactccaagaatcatacttgtatactgaaaattcccatcggacaaaatctt

SEQ ID NO: 35736 - DNA, 479 bp, Setaria italica
  Peptide Sequence Number=SeqID_101710
aaaggaatgggcagtcagccaatatcttctgggctgatgctaaagctaggatggcttactaccattttggtgatgctgtcggtttgagacagcataccggaaaaacaaggagactatccctattgtcatattcttaggtgtcaatcatcatgtacagccagttgttttttggctgtgcactacttcttgatgagtctgaagcgtcatttacatggttatttgaaaaatggattgaagcaatgcacatggggccacctatttctttggtgacagagttgaaccgagaaatgactgctgctattgccaaagtattacctcatacccaccatattttctgtggaaagcatatcttagacaccgtaaaggaggagctacatggtacgtttccagatctagagcctttcataactgatctgaggaagtgcattgatgggtccagaatagaagaattgtttgaatcgggttggagctcgactaca

SEQ ID NO: 35737 - DNA, 1371 bp, Setaria italica
  Peptide Sequence Number=SeqID_101711
agataactcatcggaacacacatcttgcttatgattctggaggtgaaatggccagtacaagctctgatattttggatagttcaactgttcaggaaaatccgatggatctgggatccaacccctctgaaacccattctcctgtgcaagaggaagaatatgctttgtctaatgaccattccgacagtgaaccatctctttgcattgctgtaattggagctactggtgagctggcaagaagtaaagttttcccggcactatttgctctgtattacagtggttttcttcctcggagtgtaggcatatttggatattctaggaagaaaataacagatgaaggtttaagatctatgattgaagccaatttgacctgccgggttgatcaccacgaaaactgtggtgacaagttaaatgagttccttaaaaggacgtattatatagatgccggacatgacaacaaagatgggatggctagattaaattcaaggatggcacagatagagggtactcgtgcaacaaacagaatattctaccttgctgtaccccaagaggcacttcttgacgtagcattgccactggctgacagtgcccaaactaagcgaggctggaataggataattattgagaaaccatttggctttactggtttgtcctcactccgggtaacacaatctctgctgtcaagatttgaggaaaagcaaatttacagaattgatcaccttctggggaaggatctgatcgaaaatcttactgtcttgagattttctaatttggtgtttgaacctttgtggagccgaacttacatacggaatgtgcaggttatttttctgaagaaacagcaactgaaatacaagggaggtacttcggaaattatgggataattcgtgacatagttcacagtcacattcttcaaacaatagcgctatttgccatggaaccacctgtaagtcttgatggagaggacatccgaaatgaaaaggtgaaggtgctgagatcaattcgtaaagtggaccttgaggatgttgttcttggtcaactcaaagacacctctgataaagttgacagatatacaaaatccatgacaccaacctattttgctgctgctatgtacattgacaatgcacgctgggatggggtgccatttttgatcaagacaggcatggggcttatgaagaatagagctgagattcgaattcagtttcgccatgtccctggtaatatctaccgtgaacgttttggccatgacatagatcttgacacaaatgagcttgttctacgcgatcaacctgaagaagcgatcctgttgaaagtcaacaacaaggtcccagggcttgggctccaactggatgcttcagaactcaacctgctttaccg

SEQ ID NO: 35738 - DNA, 178 bp, Setaria italica
  Peptide Sequence Number=SeqID_101712
cggcgctaccgtcgccgcgacggcctccgcgaccgcgacgacggccaacgggatggaggaggcggtggccgcggcgggcccgctgcgcacgcgcgtctgcatcatcggcagcggcccagccgcgcacacggcggccgtctacgccgcgcgcgccgaactcaagccggtccttttcgag

SEQ ID NO: 35739 - DNA, 513 bp, Setaria italica
  Peptide Sequence Number=SeqID_101713
acaatttagaacgtaggacgtggaagagctcaacgacatggctgctgttgcttacagatgcgtaagccgtgtgtcccgcaaacgcccagcgatgcgagacgttgcccaggctctgacccgtgtgttgaagcacagccgcagcaggaagcatcacagcaagaggcatccgcaagcaagggcagatgatgaatctgttgacttggagggctccgaggttcagtcatcgttctctggccttcagagagaagaatcagttggcagcgtctctgatctaccagatgtttgacggaaattaaccaaactttcgactatagttgttccttttttttggctttctttcgttttgttgatatgaaaaatactgcgaccgaggatgaagttgttgggtagatgcagttttgagcagtaggggtgagtggtgtgaagatctgacaattgtaagtgtgttgtatagaatgcattgtgtctacttgatgaatagaagcttgatttgtttaacctaaaaaaaaaaaa

SEQ ID NO: 35740 - DNA, 254 bp, Setaria italica
  Peptide Sequence Number=SeqID_101714
ttaaactttctttacttaaggtctactacccagtgttagtacatgctggaccgtttgctaacattgctcatggaaactcttcaattgttgctgataagattgctttgaagttggttgggaagggtggctttgttgttactgaggcaggttttacccatggatgagttcaatcttcatctgacaggcgacattcatgcaattacagctgcaaacaaccttctcgctgctgctattgatacaaggattttccatag

SEQ ID NO: 35741 - DNA, 2408 bp, Setaria italica
  misc_feature (2399)..(2399): n is a, c, g, or t
  Peptide Sequence Number=SeqID_101715
aggcgataaacagtcccggcagccagaggctctcccgtccaatactatcttctccacggggctcaccagtgcccggccaccaccaccaccactcgctgctgcagcccgccccacccggacccgggcgcgaccgagtcgtcgcgagatccagcgccgtcgtcgcgccagcgccgctgccgcccccgctgctgctgccggagatgccgagcccgacgatccggaggctcgacgtggcctcgccggtgccggcggacatcgacatcgccaattccgtcgagccgctcggcatcgtcgacatcgcggcagagctcggcctcgggcccgagcactacgacctctacggcaagtacaaggccaaggtgttgctgtcggttcttgatgacatcaaggagcagcaggacgggtactacgtcgtggtgggcggcatcacgccgacgcctctcggggagggcaagtcaactaccaccgtcggcctgtgccaggctctgggcgccttccttgataagaaggttgtcacatgcctccgtcagccatcacaagggcctacctttggaatcaagggaggtgcagctggtggtggctacagccaggttatacccatggatgagttcaatcttcatctgacaggcgacattcatgcaattacagctgcaaacaaccttctcgctgctgctattgatacaaggattttccatgaaaattctcagtccgacaaagcactgttcaacagattgtgtccggcaaacaaagaaggcaagaggcactttgctgatgtaatgctcagacgccttacaaagcttggcatttctaagacagaccccaatgagcttacaccagatgaagttaggcgttttgcaaggcttgatattgaccctgagtccattacatggagacgggtgatggatgtcaatgaccgtttcctgaggaaaattactatcggacaaggccctgatgaaaaaggtaatggtgagagaaacaggctttgacatatcagtagctagtgagataatggctgtgttagctcttacaacttcccttgccgacatgagagagaggcttggaagaatggtgatagggaacagcaagtcaggtgagccgattactgctgatgatcttggtgttggaggtgccttgactgtcctaatgaaagatgctattcatccaaccctcatgcaaactcttgaaggcacaccagtgttagtacatgctggaccgtttgctaacattgctcatggaaactcttcaattgttgctgataagattgctttgaagttggttgggaagggtggctttgttgttactgaggcaggttttggtgctgatatcggaactgagaagttcatggatataaagtgtaggtacagtggattggtgccacagtgtgctattattgtggccacaattcgagctcttaaaatgcatggagggggcccagatgttgtggctgggaagcctctagatcatgcatatgtgagcgaaaatgtggcccttgttgaagctggatgtgtcaatcttgctaaacatatatcaaacacaaggagttatggagttaacgttgtagttgcaatcaacaaatttgcaacagatactgaagcagaaatggatgtggtgcgaaatgcagctatggctgctggagcttttgatgctgtcgtctgcacacaccatgcccatggtggtagaggagcggttgaacttggactcgcagttcaacgagcatgtgaaagccaggcagagcctctgaaatttttgtatcctttggaatctagcataaaggagaagattgaatccatagctaggtcttatggtgctagcggcgtcgaatactcagaacaggctgagaagcagattgagatgtacaccaagcaaggcttctccaacctccccatctgcatggcgaaaacccagtactcgttctcccacgttccctccatgaagggtgccccgaccggcttcgttctaccgataagagacgtgagggccagcattggagctgggttcatctacccgctcgtgggcaccatgagcacgatgcccggccttcccacaagaccctgcttctacgagatcgacatcgacactgccaccgggaaggtcaggggcctgtcataaattgaagctcagttggtgccattcagagactgcattgcatctgcgttggacagaattttggtgcattccttgagctgaataatcgtaataagtagccgttccaggcttcctgaaaatccagcgttacctgtttcttgggtaacctgaagactgtaaatgtgctctaaccgtgctgtttagactctgttcctgtgccccatgtctcaaaacctgcattccgtttccaattgttccatccttatagtgactattttccatgagttgtctttaaaaaaaaaaaaaaaaaaaanaaaaaaaaa

SEQ ID NO: 35742 - DNA, 1522 bp, Setaria italica
  Peptide Sequence Number=SeqID_101716
tttgttttttttttttttttgtttagactgatacaacagaggatcacactccagaaatcttgcagcacaaccagcagttaaggatcatacagagtcctcgataaatttcgcaagcaacaacgatgccggtgggaatggtccaagctgaacatggcataccaggaatcggaatagatgccaccgggaaatgcagaatacacacaggacaaactgctgtctgtgaccacaaagtggtcaccacatgggaaatgtttggaacacagcaccacgacagggacaccgagaatacacaaaagcatgcatatagttccatgacatcaaacgctggtgaggtagcatggcctaaactcaatcagatgaatgccgaatccctccctggcactcattctgcagtctgtaccacttcacctgtatgactcggtgcgtttcggcctgctttggaccactgcctcaatcctgtcgatcacctccggagtcagcagaggaataacttcaagagccttcatgttctccacaatctggctttctttagtggctcctgtgatcacagaagagacattggggtttgatgcacaccaagcaattgaaagttgagctaatgaaacaccaagttcagcagcaataggttttaacccattcactttccgtagcgtctcatcgaccagggatctgtttgccaagttcttgtaattgtctagggcaaacctgctatcagcaggtatgttccctttgccatattttccggtaagtactcctgaagccagaggactccaagtagtcaaaccaatgccataggtgctgtaaagaggtaagaactcggactcaaccttgtgtcgcgagaagaggttgtactccggctgctcgacgatgggcccgacgaggtcgaggcggttggcgaccgcccacgcctcggtgatctgctgcgcggaccactcggaggtgccccagtagaaggcccatccctggtcgatgacccagttcatggcgcggacggtctcctcgatgggcgtggaggcgtcggggcggtggcagtagacgacgtcgacgtagtccatgtcgaggcgcttgagcgagcctttgagcccctcgacgatgtgcttccgcgagaggcccttgtcgttgggcccctggccgccccagaagagcttggtggagatgacgacgtcggagcggcgccagccgaggtcgcggatggcctggcccatgatctcctcggcgcggccgttggcgtagacctcggcgttgtcgaagaagttgacgccggcgtcgcggcacgcctgcagcagcgccttggcctccttcacgtccagctggttgccgaaggtgacccaggcgccgtaggagagttggctgacgcgcagccccgaccgccccaggttcttgtactgcatcttgcctggttcctcgcctcgccccctccgcctaacctccttcccttccctcttggctcgcccgctcgtgcaccgttccgatctgcgcgaggtggggggaggaaggaagacgaagagaagcggaactgaac

SEQ ID NO: 35743 - DNA, 1314 bp, Setaria italica
  Peptide Sequence Number=SeqID_101717
agaagaacaaagaacttttagaatacaaaccaaacgaagtcatggaccaaatggtggccgccgatctccttggtgaaatgccggtcctggccgccgaacgaacccatcacgtaggcgtcgctcacgtcctccagcccgaaacggtgcgcgaggttgagcggaagagcggccggaagcggctcggcgatgtaggtccggttgttctggtgaaggccgagggtgagcgagacgccgccgttggcggtagcgccgccggcgctgatcccttcagtttgctgggggtgggagtgtgacagtgcgaggccgtggtgcgtggcgagcccgttgtaagcgaagctcacctggcctggcatgtcgtggggcatctgagagagctcgtcctgcaggatgtgccgcgacgccggggagctgaggttcctcgtcgtcgtgccactgttttgcccccgttgagaacttgaagggtcggaaggcttcccgctgctgtccgacgagtgctgggtttgctgcatgcccatctggttcttgtccagggatgggttcttgtgctgctgccgcatctccaggttgtggatttcttccaccattggcttccagagacgcacccgggcgttgatgaaccagtttgacacctggtttcttgttaagcctgtctgtttagccagcatctgcttgtcactgtcagtcggatagggatgtaagaagtgttcgaacagccatgagcgaagaacggacaccgcacgctcaggaagccccctttgaggtctccaaatgttgtgaggctgaccgaacgcattcacactgtttccccttaggaggcctgaaccacctcccatcagtgcaaagtttgccatatcctccttgccgatgccatcattggcggcgaccttactagtgttgcgcagctggtttaggatcatgcccttcagacatttgaaatgctttgacattgtccgaagggccattgaagcaaagggcgcagcattgctcagcccagcaacggtctcaaacgaagatataacagattgcagctgctggtagtactgtttgtatcgcctgcaaacgtcttccatgagggagatgagcctggtcttcctccactgctgctcggcgccggacaccgcgaccgcctcagcggcagcgcgctcgccgccgtccatgtcatggtcccccgcggcgtccatggcgtccatgtcgagcagcccgtcgtcggagagccggtccgcctgcgcagggcggcctcccacgtcgcagatctcctcgagcagcttctgcgcggggcccaggaacctagagcgcccgatagcgtacggtcct

SEQ ID NO: 35744 - DNA, 402 bp, Setaria italica
  misc_feature (385)..(385): n is a, c, g, or t
  Peptide Sequence Number=SeqID_101718
tggccagtttgaccgttggcattggcgttggcgattagcgggtccgtgcggtcggttgttccccatagcgccagaagttcccaaccggcaaccaccaccgactgggatagtcggatccaaaggccgctcgccgccgttccatttccccccaaacctgtgccccgcctccatccagatccagccatcctcgcctgcttccgccgcatccgcgcccctcttcattcattcccgcggcggcggcgagcgggcgggtgtccgtcctactcccccgagcggagattggcgtggagccggattcttcgttttccgtgttatgtttttctccagtggcgcaactgttcaactaaacaggagtattttttgtagcacaatggctgtggaaagngatgtgtttgccatctc

SEQ ID NO: 35745 - DNA, 649 bp, Setaria italica
  Peptide Sequence Number=SeqID_101719
cttcgacgcccaccttggctcacaccacaaccaaagcaaaccgaaaaatcaagctccatatctttcttttcttgctagatatccctcctgtatagctgtgcgaccaacaatgtcgaatataagcagcgtcctgtccggcctcatcaaccggcgaagctacggcgtctacgcgagagcggtgaacgtccacgtctccgccaccgccgccgtggggaggacggcggacggcgcggcggatggcggcggcagggcgacgagcaacaaggacgtgttctggatgagggaccccaagacgggatgctggatcccggagaaccggttccaggaggtggacgccgtcgagctccgcaaccggctgctccagcacaatgaacacttaactccaggcgcatgatgacaatgaacgtgaccagcgtatatatggccgtacgtattcgccaaataaaccatcgcccatacatgtgtatatgttgtataatttcggggcatatacacgcagtatccattcggacctgtagcatcggattccttgggttatggtagaagtttcaagaaagaactcgaatgacagccattttagtgggagtatctattccatgatctttccgaaagctgcttttaagcagtatatccacacctgtcacctatc

SEQ ID NO: 35746 - DNA, 425 bp, Setaria italica
  Peptide Sequence Number=SeqID_101720
tttttttttagtataatgattttttttttgtcgcatgagttcttatgaagtacacaccacatgagtacataacataaggtgaacaatattcatctgtagttttgccaccattgtcgacaacacccaaggggatttcccttttacattcagaaggcaatgccgatacaaaatctgtaattttggtcagtagaaagagtacatgttgccaggttgattttataaggttagaccgttagagtaaaagtgttagagggtcatgggcattgcttctgaatgtaaccaaactgtcagctcttattatccttttgttgacagtgagcttggagcagatcacccctcgtttatgcattcatctaatcaaattcatgttattttttttccctccctaagaagcttcatggatagctagtttttgcttcgctttg

SEQ ID NO: 35747 - DNA, 1063 bp, Setaria italica
  misc_feature (1051)..(1051): n is a, c, g, or t
  Peptide Sequence Number=SeqID_101721
atcacattcagggtaaacttaccaacccacggtgctgcaagtaccgaacgtactctgcccgcagcatgttgagcacgtcttcatcgagctgctccagctgaccggagtctcgcagcctcgggtacaggtgcgccacgctgccgatggcggcatccacaagttcccactgccccaagttggctgcgaagctgatggtatcgagggaggcgtttgtgctggagttcaggcaggaggccaccacttcaaggctctcttccttcaccccctccaggaaccagaactcagccagggatgacagctccgcgtaaggtttgagacgggagagttgctcctctgcgctcatattcttccatcggcaatcaggagggactctaggcagctcgcctgagtagaaccactggactagtttgttcagcgcttcccacccgaccggaactctgatagcctctgcaaaactctcgtgcatcccagactgaaataatgcgcgaaggtaatcgcagctcatgctcaaaacaactttatggctatggacatgtggagttgatagttcgcatgagccatggtgacactccatttcatcgtttgattgggcctccagaattatgtccgagaacgaatcttcagctggttcaactgccgcagtaagatcatatctgggacagtcagagttccatctgggttgctctttctgaagcatctcgcgcagcgatttcaagtgacaatactttgcaagtgtctttacaggcttaactatgtcatcatctactgtgacaaaaccagtgtatgcgtattccaaaattttcttcagtgcatgactgtctacacgatcagacattcggacatgatagagtgatcttctgctccattcatcagacgatttcccatcacgcacaagggatttttcagatggcaatagtttaggacatcttgctgataggatagctgcatgagcacttagagatgagccatccgcaagcaacagttccagatcaactagctcattatcacataatgcacttctcatctttcctccaacttgcttggaaaaccncagaggccaaac

SEQ ID NO: 35748 - DNA, 315 bp, Setaria italica
  Peptide Sequence Number=SeqID_101722
gtcagtagggcatgggatgggtgatgaaggggctgcgggaaggggctcgtccccttccatggtggcgccggtgatccaaggcaggaaggacggcggcggcgtaggggggtggcgatggaggcggcgctgaagcttcaacctatagagcggttggctctcccgctagtggaaggaggaattagcaaattggtatatttgcatataggagagggaaatttagatcatagtctaaaaattttagggatagcaattcatatagcaatattgttggagcagttttctagacgtttggtaggtttaaggatagcaatacaa

SEQ ID NO: 35749 - DNA, 153 bp, Setaria italica
  Peptide Sequence Number=SeqID_101723
ggtattttttctactccaagtgtaaatttggggactcagcccccaatgttgaagtaaaccgtatagaataatgcacggcctctttcttctcatacactgtagtttagaacagacaattaaagagtaagtgaatgtatatgagagggatacaca

SEQ ID NO: 35750 - DNA, 358 bp, Setaria italica
  Peptide Sequence Number=SeqID_101724
ctggtaaccttttcacacaagtatccaatgggaaaacatttgtcctcacaaggccatatggctccctaacaatgcaacggcctgaagttgacgacactgacaccgccatccatacaacattcggggcacaccctcaggacatctacagcacaaccatgaagggagcttccatgctgatcgagccatttgacttgccaggaactgtgatcaccaataacctcaccctatccgctcagaagggttcagattccctcttcaacacagattccctcttcaacatagtacccgggcttgatggaaatcctaactcagtttccctcgagcttggtgacaggcgtggattactctgcggggacga

SEQ ID NO: 35751 - DNA, 2386 bp, Setaria italica
  Peptide Sequence Number=SeqID_101725
caagcacagcagaccaatctggagtacctgctcctcctggacgtcgaccgcctcgtctggagcttccgcaagcaagccggcctgacggcgccgggaacgccctatggcgggtgggagggccctaacgtccagctccggggtcactttgttgggcattacctgagtgctactgcaaagatgtgggctagcacacacaatgatactcttaatgtgaaaatgtcgtctgtcgtcgacgcgctctatgattgtcagaagaagatgggcacagggtacctgtcggccttcccgtcggaattcttcgattgggttgaggccatcaggcctgtctgggccccttactacacaatccacaagattatgcaaggccttcttgatcagtacacggtggctgggaattccaaggctcttgacatggtggtaaagatggctaattatttcagtgatcgggtgaagaatgtcatacagaaatacagcattgagaggcactgggagtctctcaatgaggaaactggtgggatgaatgatgtgctctatcagctctacacaataacgaatgatctgaagcatttgacactggcccatctcttcgataagccatgctttcttgggctgcttgcagttcaggctgacagcatttcaggcttccattccaatacacacattccagttgtcattggtgcacagatgaggtatgaagttaccggagatcctctttacaagcaaattgccacattctttatggatacaataaattcatctcatagctacgcgactggtggcacatctgctggtgaattctggactgacccaaaacatttagctgagactctgagtactgagaatgaggaatcttgcaccacttacaacatgcttaagatatctcgcaacctattccgatggacaaaggaaatatcatatgcagattactatgaaagagcactgataaatggtgttttaagcattcaaagggggacagatcctggtgtgatgatttacatgctaccccaggcccctggacactctaaggctgtgagttatcatggttggggaacaaagtacgattctttctggtgttgttatgggacaggtatagaatccttttcaaaacttggcgattctatttactttgaggagaaagaagatacacctgcactcaacatcattcagtacataccaagcactttcaactggaaagcagctgggctcactgttactcagcaaatcaaaaccctcagttcttctgacctgtatcttcaaatttcactctccatttctgcagagacgacaagtcagtctgccaaattgaatgttagaattccatcatggacatttgctgatggtgcaggagcaaatctaaatggcaaagatttggggtcattatctccaggatctttcctctcagtcaccaaacaatggaactcagaggatcacttatcactacgctttcccatcaggttaagaactgaagcaattaaagatgacaggccggagtatgcatcccttcaagccatcctatttgggccatttgttcttgctggcctatccactggtgactgggatgcaaaagttggcaatagcagtacaatttcagattggatcaccactgttccttcagtgtacaactcacagctggcaaccttcacacaagtatccaatggaaaaacatttgtcctctcaagcgcaaatggctccctaacaatgcaagagcgacctgaagttgacggcaccgacatcgccatccacgcaacattcagggcacaccctcaggactcaacggagctgcatgacacatacagcacaaccatgaagggagcttccgtgctgatcgagccatttgacttgccaggaactgtgatcaccaacaacctcaccctatccgcgcagaagggttcagattccctcttcaacataatacccgggctcgatggaaatcctaattcagtttccctcgagctcgggaccaaaccagggtgcttcttggtgacaggcgtggattactctgcagagactaagattcaggtcagctgcaagagctctcttcagagcattggtgggatactcgagcaggcggcgagctttgtgcagactgccccactgaggcagtaccatccaatcagctttatcgcaaagggagtgaggaggaacttcatcctggagccactgtacagcttgagggacgaattctatacggtttacttcaacattggggcctgagtccccaaatttacacttggagtagaaataatacagaataatgcacggcctctttcttctcatacactgtagtttagaacagacaattaaagaggaaatgagctgtttcatgtgtatccctctcatatacattcacttactgcaataccgagcaatccacacagcgcttctt

SEQ ID NO: 35752 - DNA, 182 bp, Setaria italica
  Peptide Sequence Number=SeqID_101726
cgtggtgtcgctcggtgcttgctgggcggccgcgggtccggcctgcgcggacggctgtgccgcctccggactcacggactcccacgaaccgacgtttgttctgcgccacggcggcactcccctgttgctgacacttcccccaggactcgcccagcgccgagtccgcgctggacaatagcagg

SEQ ID NO: 35753 - DNA, 339 bp, Setaria italica
  Peptide Sequence Number=SeqID_101727
cgtgagttcggtgtggactacaacaggttcataggcgtcgcatgtaatatttatgttgactatttgtgtagacaagtattacgacatggcacttgacaaaggtttttgcctgactccattcacttattcaagatggatatctgcactatgccaatcaaaccgtattgagcttgtagaggagcttctggcggatatggataaatttgggtgctttccagacatttgggcatgtaatatatatgttgactatttgtgtagacaaaataggttgcctgatgccttgaagatgctggagaagatggggataaaaggaaccggtccagatgttgtcacatacac

SEQ ID NO: 35754 - DNA, 369 bp, Setaria italica
  Peptide Sequence Number=SeqID_101728
ggggcaactgatgtacaagcctgtatagggagtatagagtagtggattttgatatatttaatttgctccgacgtccagcgacacaaccattcttgattcctccccagttttgccaccttgggttggttgtaatgccacatgagttacgtgcagtcacgagctcatgatattgggttgcggcagatagcttctcggctcggtgagaactggcatgtatgagagccacacgcacaatttttcttggtgataactgacaggtcaatgagctccgattatcctgtattggtactgctgtgttcctatcttcctatgcactaatactcgagtatcttgaaattgtgaccaaaaaaaaactaaaaagagactgcc

SEQ ID NO: 35755 - DNA, 252 bp, Setaria italica
  Peptide Sequence Number=SeqID_101729
ccaccgcggcgaggaggcagaagaggacgaagaggcaggtcgccctcgggtccctccagctcagcagcgactgcagcctctccccttgcgtcgccatgtcgccgaccaccgtctgtatcctccccgccacgctccggagccggtcgtacctcatgtacaccacgtcctgcggcctcgacgtcgggaacgtgtcgaactcctcgtcgagctcgtcggggtgcgccgcctccgcccacgacatcttcgtgtcca

SEQ ID NO: 35756 - DNA, 675 bp, Setaria italica
  Peptide Sequence Number=SeqID_101730
atcggcggctgttcatctcatctctgacaagtgaccatgatcacctagcctagagctcagcagtcagcaccccttccctctcccactccctctttcctcccagattcccgcccccctccgctcctcggctcctcctcctcccgggcttccccccactcgctagcctctagctccgggcctcctctcgctgtgcgtgcacagcggtggcgcacaggcgcgggcagtaggggccgctgcatcgaggagcgcgcggcgcctgcgcggcgcggcaggaaggctgcaaggctggcggctgctgcccactgggcgtcgccctgaacagtggagattcccatccccatttcccaattatggatagccagcggccagggggggaggactgaggtcgctcgctcgccattgctcccgtttgagggtcacaacttctcgtacctgttgtagctcggcaacctgtttagcaaaatgaggccttcagacgacagggcgcagctctcaggctttgcacaatcagaagaatcaacacttgatgtggaggggcattgctaccatcaacagtcatttccttgttctccatcaatgcaaccaattgcttctgggtgcacacacacagagaacagtgcggcatacttcttatggccaacatcaaacctacagcattgtgcggccggaggggcg

SEQ ID NO: 35757 - DNA, 246 bp, Setaria italica
  Peptide Sequence Number=SeqID_101731
ggtgggaggaggtcatcagcagcgaggttataggatgttggcaaacatcgaggaagatcacgccatcgcttcgaaaggatgatggttgttattgttgtgcgtgtgtctagcttgcggacgatgatgagtagtatctcctctggtaaggtgctgatcctgtcctcataactgttgtattccttgcccgcacgcatccgtttgcagggcgaggcggcggcgacggtgggtaggtcagaggccttccgg

SEQ ID NO: 35758 - DNA, 267 bp, Setaria italica
  Peptide Sequence Number=SeqID_101732
ggatgatggttgttattgttgtgcgtgtgtctagcttgcggacgatgatgagtagtatctcctctggtaaggtgctgatcctgtcctcataactgtcatctttcttgcccatacgaatctagtttcatttgttagagacatggaattatagtcagtgaatgcagaatatagaagccacgacacctaagtgggccactatctttacaaataattatcaagaccacaaattaagacctcaatctcatattactatttattaatataaag

SEQ ID NO: 35759 - DNA, 771 bp, Setaria italica
  Peptide Sequence Number=SeqID_101733
ttttttacataacatctccccatgatcacacggttttgtaaacagccatggaaccggagcatttagctgcatcctttgcatagtcaagcgaagtcacaactcacaaggcgcacacacattataaggatattcttcttaatttaaaccaattttattggaacaagaaagaagccctccaactcattccagaattatttgaggcggccagcgaaacccagccgtgaggtcatcgagcacctcagcccactcgcactcgtgccactctcggcggtgtgggacgatctgcagcgccccaagctcctgctcgtcgtccctgacatgaccgtcgagcaggtgaacacgcctcagcaatggtgatctcttcatgatcagcctgacaaagctggtttgccatcctagtccttcgaagccggccacgacaagctccttcagacgacggtaccgatcctgccgtgcaccaacgtccagactggcgcagagatcaccagcacttctctcttctgagctgttgtcaatctgcattcagatttcagaacaagttgggtttgcaattatttccaaacacttaagcgcacctgttttcagtaagttaagtggccaggaaacaacatacatgaacatggaatgactccaaggctggtgttgcatcgagcagtaggagaatccatagtacatcccagttcgccgggacatttgcgatgaacagcttcttgagctgactgaactcgctgagaacagcaaatggttcgatccacatctgcatacacaaat

SEQ ID NO: 35760 - DNA, 2139 bp, Setaria italica
  Peptide Sequence Number=SeqID_101734
atctccccatgatcacacggttttgtaaacagccatggaaccggagcatttagctgcatcctttgcatagtcaagcgaagtcacaacttttcatattacatacaattttacattcttcttaattcaaaccaaattaacaatgtttgatgtgattttactggcacaagaaagaaggaagctctccaactcattccagaattatttgaggcggccagcgaaatccagccgtgaggtcatcgagcacctcagctcgctcgcactcgtgccactcccggcggcgtgggacgatctgcagtgcccccagctcccgctcgtcgtccctgacctgcccgtccagcaggtgaacgcgcctcagcagtggcgatctcttcatgatcagcctgacaaagctggtttgccatcctagtccttcgaagccggccacgacaagctccttcagacgacggtaccgatcctgccgtgcaccaacgtccagactggcgcagagatcaccagcacttctctcttctgagctgttgtcaatatgaacatggaatgactccaaggctggtgttgcatcgagcagtaggagaatccatagtacatcccagttcgccgggacatttgcgatgaacagcttcttgagctgactgaactcgctgagaacagcaaatggttcgatccacatctgggtccctttaaactgcagaacaaggcaatctagttgcggggtccttttgaagaatttgctcggtggatatgtcctcctggaaccagattcatcatctatgtcgttatcctcagtttgtaagtagtccaagctcacacgcctgagctgaggcacctcaccataggataacttggtagggcgaccgcggcaaacaaaagtttcaagacaaggtagcgagatcagacagattttcccaaagttgcacctgtccacttgtagattctttaattttgatgatggggcaaagataagaaatttagctcggtaaaaacttgaagatgcgaccctgaaatcagttagctgcacacagtttgcaagaatatcattgaccaatccaatatatgaagcttcacccaatgagagtttggtgagcctctttgctgtcaggcagttccatgcacaaataccctggcaattggacagcgcaagccgcttgagccgcaagttccggtatgcatccagctgcttgaggtcatagtacaggcagtagccatcaacaacaagctcaaaatcctcaacatcccacttggcaatggctgtggtgatccattcatcaatattctgatgccaacgccctagcatttggagtctcagcttctggacaggccggcgttgacgcacatcctttggagccagaagaaatgcattcacctgcttgacatagcgtcgcatggcccgacgctcgtagcgttctaggatggctgtgagtggtctgatcttggtcatccaacgctcatgccgagccttgatggcatagatgtcagtcagcttgtgcacattcttctctgcctcgtacgctgccttagcctcaatggtaaggcgcttcaggcggtggtagcgtggtgggaggaggtcatcagcagcgaggttataggatgttggcaaacatcgaggaagatcacgccatcgcttcgaaggatgatggttgttattgttgtgcgtgtgtctagcttgaggacaggatcagcaccttaccagaggagatactactcatcatcgtccgcaagctagacacacgcacaacaataacaaacatcgaggaagatcacgccatcgcttcgggtaaggtgctgatcctgtcctcataactgtcatctttcttgcccatacgaatctagttcatttgttagagacatggaattatagtcagtgaatgcagaatatagaagccacgacacctaagtgggccactatctttacaaataattatcaagaccacaaattaagacctcaatctcatattactatttattaatataaaggaaattgttccagccttggtgttgtgggatgcacaaagcctagaggcggctactgcattattccaaagcttaagtccaaggcaaatcccatattacttctacagttccacctaaaaattatgagcaattgtatgaacaaggtaattgtactaagtagttagttcctta

SEQ ID NO: 35761 - DNA, 430 bp, Setaria italica
  misc_feature (426)..(426): n is a, c, g, or t
  Peptide Sequence Number=SeqID_101735
cgcacatggcaatcattttctccatgtgcgtgcaggaagaggacagacttagatcctcacatggtggctcattgcactatgtgaaggataacagaaaaaagattgctaatcccttttccacgtgccttgaaagagggattagcaatctttcaaggcacgtggaaaagctcctatgcagcagaatcaccaaaagcttctcccagtagacaaagaccaatgtctacattgcaagaaaaaggggcacttcaagaaagactgccccgactggttaaagtcaataatggcaaaaagagggattccattcgacgaggactacgcaaagaagcgaaagatgcgttgaagtcgcaaatggagtccaagcagaagttgaagctgttggcgatgtctctttagagctagttgatggtttcatgcttgtacttaagntgtg

SEQ ID NO: 35762 - DNA, 475 bp, Setaria italica
  Peptide Sequence Number=SeqID_101736
agggactatacagattctttatctggaattgtggaagctctaactgccagcattttgtgccttcctgttactgatggagcaaaggctgatatccaagatgtgaaaaatgccgttggctctgctgttgatatcatgcaaacaataggaagttcaatatgtactttattggctaagcttgctggaacaagtattttggtttctgatctttccaaagttgctacccaagagggcactctaatggagcagtccagagaattgctgtccacacttgcaacaatgcatgtcaagtactgtagcctacaaggacagagagtacagacaactgacaggaggtccatgcatacctagccagactactataacccccactaacggaagaatgtaggtgcaattgcagattctggtggcttggttggtgcccactgagcaatctgactcctctgaagatgctacctagtctagttcttgtgcgact

SEQ ID NO: 35763 - DNA, 649 bp, Setaria italica
  misc_feature (541)..(649): n is a, c, g, or t
  Peptide Sequence Number=SeqID_101737
caataagctcatgctcaaccggatagactgggcagctgcagttggtggcgaggatgatgctgacgaggaacctgacaagccggtgaatagctgcgtattggtctggcagggcagtgtggcaaagcctactttccacaggttcactgtacacaactgccggagtgaggctgctgctaagaaggtttttgctgatgcttctgtccctcactactgggacctggctgtcaatttttcagaagattcatcgtgagcaaaacactcgttcaagatctttgctctttctgcattccactagttgtgcggccagcgttttggcgcttgtcatgatgttaagtcctcttatcacaagtagcacaaagcttactactagcaaggggggacatctgaactgagtaatacgttgtaccttcaatctgctgtgcacatgcatttcagagatgtggatgtttgttgcgggattttttttatatggccctgggaggctgggactgccttgagaaactgtcgaattttacaagtatgcactttggaataagtaccnnnnnnnnnnnnnnnnnnnnnnnnnnnnnnnnnnnnnnnnnnnnnnnnnnnnnnnnnnnnnnnnnnnnnnnnnnnnnnnnnnnnnnnnnnnnnnnnnnnnnnnnnnnnn

SEQ ID NO: 35764 - DNA, 1674 bp, Setaria italica
  Peptide Sequence Number=SeqID_101738
cctggaagagtaccaacttctactggtgcagtttctagtctgcccacgagtagtgtctctgggactccagctgccgctggtgcaattggtattccaggtcttacaaacatttccaatctggatgctgtgaagcgggcacaagagcttgctgctaagatgggattcaggcaagatccacagtttgctcctctcatcaacttatttcctggtacatccactgaacttactgtgcctcaaagacctcccaaggcccctgtccttcgccttgatgctcagggtagggaaattgatgaacagggaaatgttatcaacatgacaaagccaacgaatctgagtactctaaaggtcaatataaacaagcagaagaaggaggcttttcaaataatcaagccagacttggattctcttgcaaaatcaagtgctcattttgatgaaaggatgggcataaaccaaaacaagctccttcgtcctaaaagaccaggatttcagttcattgaagaggggagactcacaaggcaggctgaattgcatagaattaagagtcaatttggtgaagcacaggctaaagagctcaaagtaaagcaagcccagcttgcgaaggcaaaggcagaagtagacatgaatccaaaccttattgaagttgctcctggtatgagagctccaaagcaaaagcagaaggaaacaattcctgacattgagccatgggatgcaaaaattttactttctgccacatacgaggattttactatggagaagcttaatatggacagaatcaccatatatgtagaacatccggagccattagatccaccggctgaacctgcaccaccaccgccccagccactgaagttgactaaaaaggagcagaagaagctaagaacacagaggcgtcttgctaaggaaaaagataggcaagaaatgattaggcaaggcctcttggagccacccaaaccaaaggtcaaaatgagcaatcttatgaaagtactaggctctgaagctgtacaagatcccacacggctggagatggaaataagaactgctgctgcagaacgtgagcaggctcatgttgaccgcaacattgctcgcaagctcacaccatctgagcgccgtgagaagaaagagcggaagctttttgatgatcctactaatacagtggatactatagtttgtgtttacaagatcagggacttgtcccatccacagacacgcttcaaagttgatgtgaatgcacaagagaataggctaaccggtgctgcagtcatcactgatgatgtcagtgttgtagttgttgaaggagggaagaagtcaatcaaaaggtacaataagctcatgctcaaccggatagactgggcagctgcagttggtggcgaggatgatgctgacgaggaacctgacaagccggtgaatagctgcgtattggtctggcagggcagtgtggcaaagcctactttccacaggttcactgtacacaactgccggagtgaggctgctgctaagaaggtttttgctgatgcttctgtccctcactactgggacctggctgtcaattttcagaagattcatcgtgagtgtaggtctcgttactgatctttgctctttctgcattccaactaagttagtgacggaccaagacgttttaggacgacttagtacaatagaatagttaaagtacca

SEQ ID NO: 35765 - DNA, 505 bp, Setaria italica
  Peptide Sequence Number=SeqID_101739
ggtactactggttctggtacacaaattaagaaagaagatgcaaaactttatcagctgtagaagtgcagccccttcctaaaggagaagcaaagtctactggtgcagtttctagtctgcccacgagtagtgtctctgggactccagctgccgctggtgcaattggtattccaggtcttacaaacatttccaatctggatgctgtgaagcgggcacaagagcttgctgctaagatgggattcagacctcccaaggcccctgtccttcgccttgatgctcagggtagggaaattgatgaacagggaaatgttatcaacatgacaaagccaacgaatctgagtactctaaaggtcaatataaacaagcagaagaaggaggcttttcaaataatcaagccagacttggattctcttgcaaaatcaagtgctcattttgatgaaaggatgggcataaaccaaaacaagctccttcgtcctaaaagaccaggattttctaagtttctatttgt

SEQ ID NO: 35766 - DNA, 529 bp, Setaria italica
  Peptide Sequence Number=SeqID_101740
acattgccctcatttaagactggcttggggaaaagtggagaggagagagaggggtaactagggaaaaaatggacttggggaccacttttagcacccattagcaccttttagcacccttgggtgtgctaaagaaataaggatgctaaactttagcactcaccttttaacacccctgtttggaagttcaagtgctaaaagtgtgctaaaagtggtgtgctaaagtttagcaccccctctccaaacaccccttaagtatccattagattcttcattaattatattttcataatatatctatttgatactataaatctttctaatcctctctatcattttaattaaatataaatagtacaactcttcaagaaaaattggaatgacttataatttgaatgaaatggaggttcttcggaagaaatttttgcagcgtgttaattacagttgcaacaaacgtaatgttacaggctttacagctactattttattacagcctctttactgaatccaccttgttttgcttgactttctt

SEQ ID NO: 35767 - DNA, 976 bp, Setaria italica
  Peptide Sequence Number=SeqID_101741
aacatcggctgacttgagcctgtcaaattgttttctggcaactccctgtcattcttaaagtgtgcttctctatttccgagatcggttctagtgaccctcttctactccttgcagaatatgaaggcatactttgtggatgtgatttatctgacttgaatgcatccctgatttgcttctctccagcaatctttttctcactaccactatcaggaagttttacctgactctccactttcaaacttatattcctaacagtagcggatgctgtggtcagctctgatgagctactcaaaacttctccagaagagctggatgtaaatctctctgccgttataccagcctgcttgcatgccagttccaattggatcctttggaaggcctctagagatgaagagagtatttcttgcctgtgtggtgaacttgtcatccttctgacctcccaagacaaggcatgaggtctcctatggtcagctttcacagccattggcatcccctctttggctacaccaggagactttttggtgttatcaaaatgctctgctctggatttaagttcttgaaaatcagatatagcttcttcaagaacaagtatggattcattaatttgttccatgtcacattctagttcacagaggaggtaaagttcatcaacagccctattcagattctcaaaaagaaagcaccatagcctctgcctgaatctttctttgctctcagcagtttcagatccgaaatctgcagaagctggtgcatggttaggaagtaacgttctactttctgtggacgcaacagatgaagatgtaactggaacttcatgatcattactggagcagggtagggaaacagagtcagttgaggctgctgaaccactaacattcaacatactttctggtgtttcatgtgcatccagtggccctatcgtgtcatcactgggtgtctctgctccttgtataatgattggagatgcctcatcaat

SEQ ID NO: 35768 - DNA, 401 bp, Setaria italica
  Peptide Sequence Number=SeqID_101742
ctccgcccctaactcctctgttcttctcacaattttccttgtgaatttcctgccggtttccggcgccttttatttgctccttgcatcgagacgtagaccaagagggaggtgagtaattggcgagcggtgcgagaacgaagacgagacgacggctgcggcggccggaggccatttttgatgcgtggcgccgttgaggtccacgcgattggcagagacgtcgcgtccgcgagccctctgagactcagagaccctccggcattggacatgatgaggtaccaaaggctaagcccggactgcctcccgctcggcaacggaggcggcggcggaggcgccgttccacggaagtcggcgtcgagatcctccttcaaggacgacgacgtcccggccgtggcaacggacgg

SEQ ID NO: 35769 - DNA, 324 bp, Setaria italica
  Peptide Sequence Number=SeqID_101743
tccaacaactaaagcagcaacaacctgctgaatagttgagcaccttccctttgatccgttggtggtccggttaagatctgctgcaagaaaggtcaatccttacggggcagattcaggtgaagcgcatcgcagggaatggagcaccaggatgatcagacttcatacccttttgaaaaataccctgcccttcttccccattccggtccctacgaggctcgcagcaagaagtgacttgttgtcgggccgccacttcagctctttgagattggagaatagttctgaaagggcaggtgttatttcctcatccttgattttattgcagga

SEQ ID NO: 35770 - DNA, 1128 bp, Setaria italica
  Peptide Sequence Number=SeqID_101744
tttttttttttttacttaacaaagtttgcatataattcatgaaggaatgcttttggtcatacataaatactctggtcaggctcttcagagcaaatctcagcttgtcaattacaactcaggtacaaacacagtcgggcgcccagtaccgaaaatgcgcttctaactaccaggttctgactagttatgatgtgtctttgatctgaacgaagaacgggtgccagacttcgcatactggcccctttgagtatcaagaaatgtggccgcctttggtctgaagtcgacgaatttagcttctgagcacgaagttcctgactaccagcaatccaacaactaagcagcaacacctgctgaatagttgagcaccttccctttgatccgttggtgggccggtaagatccttttgaaaaataccctgcccttcttccccattccggtccctacgaggctcgcagcaagaagtgacttgttgtcgggccgccacttcagctctttgagattggagaatagttctgaaagggcaggtgttatttcctcatccttgattttattgcaggagacaacttctaggctctgcaggtcactccatgaggtgatcactgattctagacctcgagttgttagtagtgagcacctttctaatgacaggaattttactctcctgcataggccaaccaaggcaaacatatcgtcttccaggccccagcaattctggacctgtatctcacgggcaccctcacagaccaaaaagagggcatggagagcgcggcggtcattcagcaggcaccggtgcagctgcaggctctcgagcgtgaggcaagccccaagatgttctgccggcccaggatcatcgtcaatccggctgcatccctgcaggcgcagggtcttgaggttcccacagaaagcgagcgcagcaagccaccccccgtccatcctgtggtcggcgatggtgagctcctcaagcatcgcgcagcagcgccccacagccgcgatgccgtcgtagctcccctcgcaacccacaagctccagcttcaccaaccgcttgcagccatgcgcgaggatggtgaggccgatgtcggtgacgccaccgccctcaccggtgccgtagagggcaggggccgcggcgactat

SEQ ID NO: 35771 - DNA, 470 bp, Setaria italica
  Peptide Sequence Number=SeqID_101745
gtgcgttccttgacccaaccggagacgggagagacagcctccgcctccgccgccggccgacgaccatgtctctggcggctatcttcgtcttcgtcctcgtcttcgcgctgcagctgctggacggctacctcgacctcgccaaaaagaggggatcacaaagtgaggagcagatcaaactacggcttgaaatcaagcaacttttgacggaggctaatcagctgtcaacgccgtccacatttgcacaagctgctaaactcaagcgtctggctgttgccaaggagaaggaactgggaaaaatacaagaacaggacactaaagggacacaatccttgtatgacaaatacggaaaatttatgttggttactaaggtactaatttatgccttgctcgttctgtggttttggagtactcctgtaactacagttccccggcatcttctacagccctttggaaagatgttttccttgagg

SEQ ID NO: 35772 - DNA, 190 bp, Setaria italica
  Peptide Sequence Number=SeqID_101746
tcatatatgggtagtgattgtaatcccggtgaatgacttgagagctcttcagagggtcagcatggagtcaccgtttgaacgtgtgcctatttttcggttgtattcgtcttgtacagtggaggaaaaggctcttattctttcaaagcatgaccatattctggatagcaatattctgaatgttaagtccctt

SEQ ID NO: 35773 - DNA, 612 bp, Setaria italica
  Peptide Sequence Number=SeqID_101747
tcttaactttcgagaatccttcatcagtggttgtgaatgactgactttttcaatcctttcgaccttggttccgtaggagcaagtcagaaaggttgagaaatagaaccatctgatttgattcgttcccaatagccatgagatgatcatcttagggtgatccttttgtcaacggatgctcctattacacgtagtctctgaaggatgagaacccactatgtagcatctacatcgataattcaagcattgtatacgtcattagtccgattctttgtaggaactacccgtaataacgagcttgcaaaatggatctgtttatcataaagagattcgttgttcctgaccctgcttcaccttaattgttatttgaacaaaaagatcacaataaacttttggtaaaagttttgtcttggtcggagtggggatagcatttctcttctgcatgtctatggagttttgcaaaaacccaaacacctcagagatagatatagaggtaggaatttgtcgaacgaaccacactccttcgtagacgtcaggagtccattgatgaaaaggggctagggaaagcttgaacccaagtcctacagtgatgaatataagcgcaattgaaattcc

SEQ ID NO: 35774 - DNA, 608 bp, Setaria italica
  Peptide Sequence Number=SeqID_101748
gccccagtaaaagaatatcttctttttcccctacgtccaagcaactaagtacttatgcatgtatattcatcccggccatggtttaaaactaattacttacccacagtgatgactaagaagatatcagatcttgagaacctttaacacttgtgtagcaaaagtgttgtgaattatatagttcagagttgtagcatattgcttagttaatttacctagctaacactgaccacaattaactagaagctcgaaagtttgtgggaatttatcggtatccagtagtttatttaccttgttaacaatgaccacagttaatgagaagctggaaagtttgtgggcatttgtcagaagagcaatttctgagcacaagtatcagtgcattagcagacattttgaaaaaatatagtcaggattaagcagcccatttacttgctatgatggcacggttgctcaaaacatcaaggatatggatgaaattttcttttaggagtgctgcatgcacaatggtaagtcacctgctctgcgttcgtatgttgcctccatccatatatccaatcttgtaataacaaagttctgcttcttagtttgtacagttcgtaccaaacatcttt

SEQ ID NO: 35775 - DNA, 259 bp, Setaria italica
  Peptide Sequence Number=SeqID_101749
ttgcaaagataaagattttgggggctggttcagatgggatcgacaagtgtcttaaatttctggcatctttagccaatcgagtggtttcctattcatgctggatcgaaagaatcggttagctgagcagttcctttctttgttttgtctcaagccagttgtaggcgaatgtgacctgcactaatacatatctgaacgctgcgggataattgatcacctcatatatgtttttttttgttgggggggggtgcaaggtgccaaa

SEQ ID NO: 35776 - DNA, 618 bp, Setaria italica
  Peptide Sequence Number=SeqID_101750
caaatccaggggctgcctggactaccctttggatccgcccctgcaacaacttgctcaagtttttgaaaccattggggctttcaagattccacgcaaaggtggaaaaggaaaacaaatctttgggagcgtcacggcacaagatattgttgacataataaagtcgcaacttaacagggatgtggacaagaggcttgtgacagttccagaaatccgtgaaatcggagagtatgttgcggagattaagcttcacccggacgtgacagctcgagtaaggctgaacgtctacgcgaaatgaggtgcagttacagaagcttttgagtggatggtgggctctggtgtagcctgattccgccgagattttgctgaaactgacaggcgctgtggtagacaatggaggcctgggatggttctttattcttatccataatcaagtgcccatcctacctgtaaagtcaattttctacaattttctgtgcgttttgtttcgtggggtaaaaaatagaaaacgttgtaaagcacaattggtttgaaagctagagcactacttgcaggggcggatccaaagggtagtccaggcagcccctggatttggtcccttttttggaaaaaaaaaaaaaa

SEQ ID NO: 35777 - DNA, 1195 bp, Setaria italica
  misc_feature (1143)..(1195): n is a, c, g, or t
  Peptide Sequence Number=SeqID_101751
gaaatcactcactaataagctgccgcagcagctgcccccaggctccaagagaagcgaagcgaagcgaggagagcaatggcgtcgccgtcgtgcgcctccacgctgcctctgacgtccgccttcccctcccgctcttcctctcggccgctagcggggcgcctcctcacggcgtctcgccgggctccgtctctggtcatcgtcgcccagggaaaggtcaagaagtaccgccaggtcatactgacagacgacatagaagaggtggggaggaaaggggatacattgaaggtgcgagctggattctaccgcaatttcctccttcccaagggcaaggctacgcttctaaccccagaagtcctcaaggaaatgcaactagaacaggaaagaatagaagctgagaagaagcgggttaaagaagaggcgcaacaacttgctcaagtttttgaaaccattggggctttcaagattccacgcaaaggtggaaaaggaaaacaaatctttgggagcgtcacggcacaagatattgttgacataataaagtcgcaacttaacagggatgtggacaagaggcttgtgacagttccagaaatccgtgaaatcggagagtatgttgcggagattaagcttcacccggacgtgacagctcgagtaaggctgaacgtctacgcgaaatgaggtgcagttacagaagcttttgagtggatggtgggctctggtgtagcctgattccgccggtctgtgagcacagatgcaatcgccatgtctgtgagttttggctattggagtcatcgtggtcttctcttaaatagttgcctttgtttcgtgcagagattttgctgaaactgacaggcgctgtggtagacaatggaggcctgggatggttctttattcttatccataatcaagtgcccatcctacctgtaaagtcaattttctacaattttctgtgcgttttgtttcgtggggtaaaaaatagaaaacgttgtaaagcacaattggtttgaaagctagagcactacttgcaggggcggatccaaagggtagtccaggcagcccctggatttggtcccttttttggaattttaactagcatgttattttgaacatggccttcatatagagattaagaaaattcatgaccgccgnnnnnnnnnnnnnnnnnnnnnnnnnnnnnnnnnnnnnnnnnnnnnnnnnnnnn

SEQ ID NO: 35778 - DNA, 718 bp, Setaria italica
  Peptide Sequence Number=SeqID_101752
ttttttcgttttttaagtttttcgttttaggtttagttagaaatcactcactaataagctgccgcagcagctgcccccaggctccaagagaagcgaagcgaagcgaggagagcaatggcgtcgccgtcgtgcgcctccacgctgcctctgacgtccgccttcccctcccgctcttcctctcggccgctagcggggcgcctcctcacggcgtctcgccgggctccgtctctggtcatcgtcgcccagggaaaggtcaagaagtaccgccaggtcatactgacagacgacatagaagaggtggggaggaaaggggatacattgaaggtgcgagctggattctaccgcaatttcctccttcccaagggcaaggctacgcttctaaccccagaagtcctcaagtaacactctcgctgcattgtagccctttctttttctctcactcctgatgaactctgcttcttactgataggcattgccaagaaaatcaattgatgtttacttatgatatttgtttgtttttttcacgtatttttccttatctgcaaattccactccccatcaaatggttcagtggctggtaacattgtaggcaccttatgaacttctttgtggtatgcttgttttgattctctgagggtttagttcgggcccagggttcttgattgagataggaatccatgcacctttatcactagaattctggtaacatatgttaagt

SEQ ID NO: 35779 - DNA, 518 bp, Setaria italica
  Peptide Sequence Number=SeqID_101753
gagcggcgtcgaggatggcgcggccccgttccgcattccggggttcccggggaacctcacgatcaccaaggacgaggtcccgcacgcggtggcgatggcggccgaccccgacgaccccgtgacgcgtttcctgtccgacgaggtccgcgactgggactaccggagctggggcgtcctggtgaacagcttcgacgcgctggacggggactacgccgcgatcctcgagtcattctacctccccggcgcccgcgcctggctcgtcggcccgctgttccttctcgccgccggcgaggaacaggaagacgacgacggcgacggcgacacggaagggtgcctcccgtggctggacgagcgggcggcggagcggcccgggtcggtggtgtacgtgtcgttcggcacgcaggtccacgtcagcacagcgcaactcgacgagctcgcgcacgggctggtgggctccggccacgccttcctctgggcccgtccggacctccgacgcgtcgtggtcgccgccggtggac

SEQ ID NO: 35780 - DNA, 451 bp, Setaria italica
  Peptide Sequence Number=SeqID_101754
ggcagggggtggagatccacttcatcaagtggcggagcctcaaccatgcgttgggcgtgatgttgctgtacagggtgcgcctgtgcctcgacggtgttatggggcacacctggacggaggacatcgccgagaagatcatcagtaagtcatgcggcctcaagcaaattggaaccaacctcatgcaccctgcagagacaacgacaattgacttgtgggcttggacggcagatccgagtaccatctccaagaaggtgtggctcaccttcacaagttgggcgaaggacaagcagttggcctctgttctggtggctgtgatgccgtcggagcattggtagcacgggtgcaagtactgcgtgtacgtacagctggatgggatccatgattacacgcgagcgacggtggatcaagacagcgcgaccccagccaagcgctagcttccccatggcacctt

SEQ ID NO: 35781 - DNA, 886 bp, Setaria italica
  Peptide Sequence Number=SeqID_101755
ggcagggggtggagatccacttcatcaagtggcggagcctcaaccatgcgttgggcgtgatgttgctgtacagggtgcgcctgtgcctcgacggtgttatggggcacacctggacggaggacatcgccgagaagatcatcaatccgagtaccatctccaagaaggtgtggctcaccttcacaagttgggcgaaggacaagcagttggcctctgttctggtggctgtgatgccgtcggagcattggtagcacgggtgcaagtactgcgtgtacgtacagctggatgggatccatgattacacgcgagcgacggtggatcaagacagcgcgaccccagccaagcgctagcttccccatggcaccttggggtggctgatggagcggaggttccaagccatcttttcgaggcgttcccgcatcacctccccgctgtcgcggtcctaccagctcaggaggagcaagggccaggacggcgaggaacaggacgaacgcaagggcaaggacaaggaggagcgcagccgccggggatacaacaatgatcacccgggggctgacaagggccactaccggaagaggccggaggacgacgacgatgatgaccttggtggctgaggaagatcgcgcgacaggcgtccccagcatggttacaacgccggggcgcgccgccggcgcaggaaaggaacagcgcggcggccgcataggagagcacatcggcggcggtcggccagcgctgagcggcggccagctccgggcctagatgtggcaccggcacatcggctgcggcctagggtgctgccgacggcaccgcccttctctccatcgacgacagcaaccgtggcaggctggatcggcgccccttcattcatcggcggttcccgtatccgtaa

SEQ ID NO: 35782 - DNA, 239 bp, Setaria italica
  Peptide Sequence Number=SeqID_101756
gggacgaaccggagccactcagccgccacctcaccgcaccgactgcctgcctctcctgcttgctgccgcccgctgctttcgccattccagctctatctgctgcagcgcctctcctcctactcgagtctccgccgcctggcctgcctgcctgcctgcctgccggctgccttccgggtacgtgccgcctgcctgtgccgccgtgggttctcgcgcagttcttggcgtggcgccgtctttga

SEQ ID NO: 35783 - DNA, 535 bp, Setaria italica
  Peptide Sequence Number=SeqID_101757
aaaaaatgtaatatggtaattgcaactatatatttctggaagtaattttatttactagtgcctggaaacctgttattaggctactcatgtttatcttggttcaagtacctagtttgttattcctgcttgcattctttttttttaaactttggttactcttgttttgttgtcatcttgatccgaacctggagcttacattgttattttctatcttttatgaacaatttcttcctgcaatgtttaaaattctacttgcccccctcatatgacaaccagggtggcaaatcaagttctcgtattagagggcatgatgacatgctgcaagctgctcgtacggacagccctttaagtcagttgccttcacaaactacggagggtgaaagctctcttagcggacaagcctccgaatatgaggaaacagaatcagatatttattcgggaggagccggataccaccctttctcttggatgcagcagcatgaaaatggaggtggacctgtgatgggagcttctattctaagttcctacattcctg

SEQ ID NO: 35784 - DNA, 942 bp, Setaria italica
  Peptide Sequence Number=SeqID_101758
ctccgactcagtctatactatggtatttccggaaggatggccataattggaggaagaaaagagatggaaaaactgtcaaagaagctcatgagagattaaaatctggaagtattgatgtgcttcactgctactacgctcatggcgaagaaaatgaaaactttcagaggaggagttattggatgttggaggaggattttatgcacattgtgcttgtacattatctcgaagtcaagggtggcaaatcaagttctcgtattagagggcatgatgacatgctgcaagctgctcgtacggacagccctttaagtcagttgccttcacaaactacggagggtgaaagctctcttagcggacaagcctccgaatatgaggaaacagaatcagcgtatctaaagccaaattcgctgcagcagatatttattcgggaggagccggataccaccctttctcttggatgcagcagcatgaaaatggaggtggacctgtgatgggagcttctattctaagttcctacattcctgcaccgtctgtaggtaatcatcaaggcttcctggctacaacgactactacagacttctattctcatggtcaagatgccctaccagttgctcttaatgagcctggttttggaattgcattcgatgaggcagataatcagttggatccatcatcattgaatggcctggttaagcctgaccaaggggtccatcgaatggctccaccccaaattgctgatccatccaaacaatttcctttcactgaaggatctggaattgaatccttcacatttgatgaagtgtatagtaatggattgagtatcaaggatgcagatactgtagggactgatgaagaatcactgtggcagcttccaggtgctatcagctcgtttcctacagaggacagctcccaacaaaatggtagatctttggaggaagctattaa

SEQ ID NO: 35785 - DNA, 276 bp, Setaria italica
  Peptide Sequence Number=SeqID_101759
tttccttttgtttgtaaggtaagttctttaattcgccactaatctttcgatcgcgccgaggaagaagggaggagaggagaaggagaggagaatggcggccgaggagggacaagtgatcgcgtgccacaccaaggaggagttcgactcccagatgaagaaggccgaggaggccaaaaagctggtggtcatcgacttcactgcctcctggtgtggtccttgccgcttcattgccccgatttttgctgaactcgccaagaagtttgctcacattgtctt

SEQ ID NO: 35786 - DNA, 515 bp, Setaria italica
  Peptide Sequence Number=SeqID_101760
tttttacaatcttgcaatacggcccctgaaggaagtcttaatcgccactaatctttcgatcgcgccgaggaagaagggaggagaggagaaggagaggagaatggcggccgaggagggacaagtgatcgcgtgccacaccaaggaggagttcgactcccagatgaagaaggccgaggaggccaaaaagctggtggtcatcgacttcactgcctcctggtgtggtccttgccgcttcattgccccgatttttgctgaactcgccaagaagtttgctcacattgtcttcctcaaggtggacgttgacgagctgaaggaagttgcagctgaatacaaggtcgaggcgatgccgaccttcctcctcatcaaggagggcaaggaagtccacaaaattgtcggcgccaggaaggaggagctccaggggaaggttgctgagctcggcgcccttaccacttccgcctaaggatatagcatcaccagtcatcgctcataagggcccgcgaacaaacaaacggaac

SEQ ID NO: 35787 - DNA, 1745 bp, Setaria italica
  Peptide Sequence Number=SeqID_101761
atcttgcaatacggcccctgaaggaagtcttaatcgccactaatctttcgatcgcgccgaggaagaagggaggagaggagaaggagaggagaatggcggccgaggagggacaagtgatcgcgtgccacaccaaggaggagttcgactcccagatgaagaaggccgaggaggccaaaaagctggtacgcgccccatgcccccgctccccatctccctcctgcttttgtgattcccccgtaattttgggggagctgttcggcggattcgtcgcgctaggtttttctggatccgatccgtcttggtttctttgcgcggtcggtccctgtgttcaaatccgttctagtcatcgggagtgatcgagtttgggcgattagggcgcggctcgtgtagtcgggaagcatgccgtgttggggcttgtactgggtcgttcccgatttgtgatcgggcctaggggttttgttgtttacgctgtggacagaattattggtggagcgcaagatggtgatgcgtcgatgactaggtgcaacgaatttatcgcacacgcgtttggatctgtagtgtacatgctttgatgattcttgagttgttaggcatggtttgggttaattgggttatctgtctacggctgattcacgctgcttttttgttagaatttggcatgatttctatgtttaaatctggtattatcttggggtgacttttgactgtgactgattggagctggcaattgctatcttcgtgagaagtggaagtactatgtacactgctacgctgcctggtcaattgaggaagtagatgaatagacctagctatttccaggaacccatttaaaatttggggaagattatgcagtcacagatgacatattgagatttggtagaacccaagggaagttatttgaaattggggaataattgttgcgtatggaagtcgtgttgaaattggatagaattcaagggctatagactggctttatacttttcttttcttggtatgactggtttgtaatcttcgtggggcatgggcatttgtgcacaagtaaatgctccatagtcttgctctaccacaattgagttttgttaggttattttgctctgatggcatagttgacctgtgccacacccagttatactgctgctaactttgggcatttgtcaacttttttgcaccccaggtggtcatcgacttcactgcctcctggtgtggtccttgccgcttcattgccccgatttttgctgaactcgccaagaagtttgctcacattgtcttcctcaaggtggacgttgacgagctgaaggtgagcacggtgtaccaaatagttctccaaaacacttgcccttgccctgtaacgtcgtactaacgctgtttccttgttcaacaggaagttgcagctgaatacaaggtcgaggcgatgccgaccttcctcctcatcaaggagggcaaggaagtccacaaaattgtcggcgccaggaaggaggagctccaggggacgttgctgagctcggcgcccttaccacttccgcctaaggatatagcatcaccagtcatcgctcataagggccagcacacggcgtggtagcagcaggcgtcatcattttctgtttggtttgggtgattgtgaacagctatgtgcaactcctgagtcaggatagacctgttatcgttctgaatactgtatgcgatgatatatggatgctttgtgaggaaagtttattagatctgggtgtctgacttgatttctgctt

SEQ ID NO: 35788 - DNA, 791 bp, Setaria italica
  Peptide Sequence Number=SeqID_101762
tacttagacacaatcttgcaatacggcccctgaaggaagtcttaatcgccactaatctttcgatcgcgccgaggaagaagggaggagaggagaaggagaggagaatggcggccgaggagggacaagtgatcgcgtgccacaccaaggaggagttcgactcccagatgaagaaggccgaggaggccaaaaagctggtggtcatcgacttcactgcctcctggtgtggtccttgccgcttcattgccccgatttttgctgaactcgccaagaagtttgctcacattgtcttcctcaaggtggacgttgacgagctgaaggaagttgcagctgaatacaaggtcgaggcgatgccgaccttcctcctcatcaaggagggcaaggaagtccacaaaattgtcggcgccaggaaggaggagctccaggggaaggttgctgagctcggcgcccttaccacttccgcctaaggatatagcatcaccagtcatcgctcataagggccagcacacggcgtggtagcagcaggcgtcatcattttctgtttggtttgggtgattgtgaacagctatgtgcaactcctgagtcaggatagacctgttatcgttctgaatactgtatgcgatgatatatggatgctttgtgaggaaagtttattagatctgggtgtctgacttgatttctgcttttgggctttgagtatggctgaatgaaatacatgaatgctggcaacgctgtgcttgtatataaaaaaaaaaagcatcgttatgctaatctgccctgagggcaaagcattg

SEQ ID NO: 35789 - DNA, 508 bp, Setaria italica
  Peptide Sequence Number=SeqID_101763
ggcttgtagttggtgatgccgtccaccctgtaggtgaacatggcggcgctgatggcggcgttggtggtggcggcggccttcttctgaagatgatggtgatcctgcggcacgatgggcacctgcaccgcctcacagtggccgcaggacatgcacaccctctcgcacctcggcggcctcgatccgatcagagccctcctccctttcgtcatctcgcctctcatccctgcggcttcttgccccttgctggcgccaatctctagtaggctcatcggcaccctcctggcatctgagtgtgctacctccatggacgaggtgaggaggaggaggatggagaagaagagaggccgtaggggcgtgtgagcgctgcagcattgcaaggaatggaccatctagcttctgtgtgtgcttgagtatagctcttgctgcttagagacaggtgatagtgtgagtgtggattagggaacgagattaatgcagaattataggttgggtggctgaagactaagac

SEQ ID NO: 35790 - DNA, 446 bp, Setaria italica
  Peptide Sequence Number=SeqID_101764
atggggatggatccgcagcaacagatgaagattgaccaagccatcatggagtccatcccctattcaggacatctgaattttcttcagtagggattcagttcatatctgctaatggatcatgatcctaacataatgccctttcacaatccgactcatcccctagctcattttagttcaaaaacatattaaattttcagtccagccatatttttttagcttcattacctttaaaatttttagcctaaactttggatcctttaccacccctatatcaggacatctgaattttcttcagtaagaatcacggctcttaacacttcaaattgtaaaggtatttaacgtgtgtggaattgttcaaaaattgttatcctttatttcaccctaccacaatattttttgcagtttcccatatcaagtttgtttctacatttgattgtattagtatt

SEQ ID NO: 35791 - DNA, 189 bp, Setaria italica
  Peptide Sequence Number=SeqID_101765
atcctagagattgtgagcggcaggaggaacagctcttttgtcgatgaagaatggtcaatgaacctcttgggctatgcatggaccctgtggaaggaaggcagtgtctcagagcttattgatccactgatgggcaccgcatacacttatgatgaagtctgcagatgcattcaggtgggtctcttgtgtgtt

SEQ ID NO: 35792 - DNA, 546 bp, Setaria italica
  Peptide Sequence Number=SeqID_101766
ggcggcggcgctccgccgggccagggagactaccagcaagcagcgccaccggccgccgccgccgccgccgccgaggaggagcaagcagcaggtcggaggcggcactaccgaggggtgaggcagcggccgtgggggaaatgggcggcggagatccgggaccccaagaaggcggcgcgggtgtggctcggcaccttcgacacggcggaggacgccgccatcgcctacgacgaggcggcgctccggttcaagggcaccaaggccaagctcaacttcccggagcgcgtccagggccgcaccgacatgggattcctcgtcacccgcggcatccccgaccggcaccaccaccaaggaggggcggcggtgacgctggcggcaatgccgcccccgcaccggcaacaccaccagaccgtcgtgccgtacccggacctcatgcagtacgcgcagctgctgcagggcggcggccggggcggcggcggcgccggagaccaccacgccgaggcggcggcccagcaggcgcaggcgcggctcatgatgatggcccgcggc

SEQ ID NO: 35793 - DNA, 687 bp, Setaria italica
  Peptide Sequence Number=SeqID_101767
cccaacctcccccccgccacctcagccgccggccgcgcccgcgccgccgctgcctcagcaccaccagattcagcaaggcgacgggatcaaccgccctggaggaaacttcggcggcggccccatcgtggtggggaacggcggccccgctggcgggggcgacggccctggcggcacgacgttgttcgtgggggagctccactggtggacgacggacgcggatctggaatctgagctcagcaagtacgggccggttaaggaggtgaggttcttcgacgagaaggccagcggcaagtccaagggctactgccaggtcgacttctatgaccctggtgcagccgctgcctgcaaggagggcatgaacgggcacctgttcaatggccgtccatgtgtcgtggcattcgccacaccgaataccgtgcggcggatgggcgaggcgcaggtgaagaaccagcaggccatggctgcacagacttctgctatgcagccgaagggtggccgagggggcggtggttctgcagggccacaggtaggtggtaattatggtggtggccgtggaggagctgctggacctggtgccggtggtggaggaggcggaggtggtggaaattggggaagaggtggtggaggcatggggagtagaggtcctgttggtaatatgaggaacaggatgggcccagctggtggtgg

SEQ ID NO: 35794 - DNA, 347 bp, Setaria italica
  Peptide Sequence Number=SeqID_101768
ggtgaggaggtgcagcaggatgaggccaccccccgactcacgcccagccagaacatgttcctgccaaagtacttccacccgtccaaatacttgcagcttcatgataatctgtgcttcaggcttcatgtccgggttctcaaagaaggaccggtactccattgcagtcagcggcgtcccatccaacgggatttgcattggcatcaccggcgttgcgtctcccggagtttgcatcggcattatcgggctcccatctcccgggattccgttggtaatccggatccgatgggatttgcgttggcatcaccggctgaccttgtgctcggggataggagatgttagcagcccta

SEQ ID NO: 35795 - DNA, 281 bp, Setaria italica
  Peptide Sequence Number=SeqID_101769
cccttttttcttttcatttcattaaataacatatttgcttcctctatcttcccacctttgacaaggccatcaatcaatatacagtatggcatctcatcctgtgcaaaacctgaggcttccagttcagctagcaggtccttagccttctcaaagataccacctttagaatacacctttaacaaagtggtcaacataaccttatttggtgttaatccagaggacctcagatctttcatcaacagctcagcttttccataatcagcattttctgaatatgcatt

SEQ ID NO: 35796 - DNA, 323 bp, Setaria italica
  Peptide Sequence Number=SeqID_101770
agcagttactgtgtgattctgattcaaaccctatactagctctgaaaggtggccgcatcagtgatttcaaaggtagatctgtggtcacaatcagctcaacacagttaaaagtaaacccagacgtgcccgtggctgaaaggctgaagcagtggtacatggttgaaggaaagaatgctccttgtgttactttgtctcaggatatatcaagcctaagcaggatctgtgtgcagaaaacaattgcacagatcaaggatgagaacctggggcaatcggataagcctgattttatcactgttagggctgtaatctcatatgtggcggca

SEQ ID NO: 35797 - DNA, 953 bp, Setaria italica
  Peptide Sequence Number=SeqID_101771
gggttcaaaccctatactagctctgaaaggtggtcgcatcagtgatttcagtggtaaatctgtggtattctagtccacaacccagttaaaggttaacccagacgtgcccgtggctgaaatgctgaagcagtggtacatggctgaaggaaagactgctccttgtgtttctttgtctcaggatatatcaagcctaagcaggatctatgtgcagaaaacaattgcacagatcaaggatgagaacctggggcaatcggataagcctgagttgatcactgttagggctgtaatctcatatgtggcggtggataagttctgttatccagcttgcaccttggagcttgatggaaagcgatgcaacagaaaggtgactagcagtggtgatgggacatggtattgtgatagatgcaatcagtgctctgaaaagtgtgagtacaggtacttgcttctgtgtcagatcaaggatcacacaggtagtacctacgctactgcgtcccaagaggctgctgaggagatatttggacacacagcgcaagagctcttcatgatacgaaatgtagaacaagatgacgcgaagttagctgcaatcatgaggaagatcctttggcgtgaatgcctattcaagctgagaatcaaggcgcaaacctataatggtgagctgcgtgtgaaatgctgcattgttggtgttgagaagttagatgtgctgggcatagatcatcatctcttggaggagatcgacaaccttttgaatgatattacccaccccattctgatggatgattcgtcctacatcccagatgttggctatgccaaattggaagccagacagaccatgctaagctccagcagtgcctgtggccctctcaagggtcttgctgatcttgcaggatatgggcgcttgaacaggatgccgcctccactgccagcttcgtccaagggtttcattccaatgatgg

SEQ ID NO: 35798 - DNA, 268 bp, Setaria italica
  misc_feature (1)..(28): n is a, c, g, or t
  Peptide Sequence Number=SeqID_101772
nnnnnnnnnnnnnnnnnnnnnnnnnnnncccaaaattcatatatatgatcatataagagcaaaaccaaagcacaagaccaatacaaataagttgaaactggaattcgcattacgcaggaaagggaatttgctatcaaactatggttgcctattggcaataatgcaactaaacgattctcccttgatcacaaatgtttttcttcagcctcttcgatcatcactcatcagtactgcgccaggccgcactcgaccggctcctggccgttga

SEQ ID NO: 35799 - DNA, 2030 bp, Setaria italica
  misc_feature (1)..(76): n is a, c, g, or t
  Peptide Sequence Number=SeqID_101773
nnnnnnnnnnnnnnnnnnnnnnnnnnnnnnnnnnnnnnnnnnnnnnnnnnnnnnnnnnnnnnnnnnnnnnnnnnnnggtttacatgattgatactttactagcgaaccttgatactgcataaaagttcagagtacgtatatcgtacaaccgagtactttgctcttgacattgagtttggagttcagtcccttattcattcttccctttaggagattacagtgtaagccctgtttgatgaggctagcaggccaataagcataagtgacgctcctacagaaacttgattttgcaccatagttgattaaccttcagcatttagacgtgtctgccaggattcagaagaatcaacctttcgtcagaggaacaaatccatgcttaatagctgccgaccaagtcttctcgatgtccatcatatcatccccacactcgtgcatgtcccaaccttcaacagcgtgcagtattccagcaatgcgccaagcactcatgaccctccttggcagccaattctcacatgtgtgaacattctccattgtcgccggtatcttcattgcgggagtactcaggtaagtgcaatccttgcgaatcttcttaagtgggaactgtgatgtaggaacaaacgtagttccttttggtgccctctgttgctgtttatcatctatgtaatctcctatccagatctgaggtatgtctttattggagaattttaggtagactgttgtacccactggaagtcgtgacttgagcatgtcatattccttcttttgattcatgattacctggaagcctttctcacataaggccatagctgttgcgtgggctaccttggaagtacttcctgaaagaaaaactttctttgtacctaaagggatgctcttgagcaccactgcagttgctaagccacttccatcaacaagtcgcactcttagttttggatatttttgtataaatagttcgccgcttctattaagtggctttgcctgatttagcagtcctagactgagcactttgacccccctttcatcagcatctaatattgccttttcgatcaagctgttaatggattctctttcccaactcatgccatattggaagttgtatcttggtattgcccatgtctgcatcttgaacttcttcatttggagtctctcaatgacaaatgcggaagatccataaacccatgctaataccatcgacagccacgccacaggccatatcatccagctataccatacaggattgtcagatggtttggaggcaatggacgcaatcccaatcctcagatgataagtcgattgtaagttggtcatatgtgtcaggtgaaccagatctggtgtttcgtctgtcactttcagtgatttctcatacagctcgtcgcttgacttgtccatggtgttgtacatgtagtcgtagaatggcatgaacaatgagtagtttgtgcggaactgggtgtgatggagagagtgaaacgatggagtgtacatgagatacttcagaggagggaaggctttgaagatccattttggtaccagctcaaaattgcagtgccccatattattcatgaagtcgatgtacgcaatgtacaagacaacacccagaacagaaccacatcccatgaaaatgggtgttaatgttgggattgagaacaacatgaaataaaccacatgttcagcaaatggatggatcacagaggttatgggttctgtgacgatggaggcatggtggtgtgagtggtagcgagagtagaggaaatggtggtgcagggcccgatggaaccagtagtagaggaactcaacaggccccatgtgaagaagcacagtaatgatagccccgtcagttctccagaccggaaggagcctgacattgggaatcattgcataggccagatagaactcgagcccattgaagatgatctggtcatcccaggacctctcccgatccacctgctcgaactcaatactacggtcaacgatcacattcttcctgcgagccgtctgatagcgagaccaagtcttgatccagatttggtttg

SEQ ID NO: 35800 - DNA, 805 bp, Setaria italica
  Peptide Sequence Number=SeqID_101774
tgggttgactcgttttgcttacttagctcattacttatcttcttctggtctctgatctcatctttcagctttgtattttcttctattccttttaatgtctcctgcttggctttcgtcatcatgtcttttaagaggcttatgtttcctttgaggtctttcacttgttgttcaagcattatgtgctcatcattcgggtgcttgcttgccacgaccagcttctttgcttgttctaaaagctcagaaaatgtcgtctctctcgaagacagaaattcactgtaaactttctgcatcctctcccatatcacctcactgtttatttcctctggattaggcaccgcaatgggagctgattccttaatggcttcctggtgttgaactctctcagcaatagattgtgtaggatcggcttctttgggaggatcatccctaacacgctggtcaaggagtgcattcgacacagagtcctcagccacattattctggttgaccacattagctagtatgaacagcgctctcttctcacccttttccattgaagaggcaggtgagggtcgagttgatcctggtgactgaggattcagggccactgctgcctcttttctcaaggaagtccctttcatacaaccagtgtccgaagatggtgtcctggtctttgccatagcggaaataaatgagtactttggttttctctgagaaccagaaggggaggcgaagaacttcttttgccacctgaggaaataggcttcaccaatgctactcttttccccctcatctcagcaggttctctatagatttctgctccacg

SEQ ID NO: 35801 - DNA, 627 bp, Setaria italica
  Peptide Sequence Number=SeqID_101775
tgtcgggagccatagctttcaagccggacctgcagctgctccacctccgcgcggcgttcttcgactcgatgggcgacagcgcgagcaccctgcgggactgcgaggcggcgctctgcctggacccgacccacggcgacaccctggagctctacagcaaagcctccgccaggcccgaaccggagagctagccagccagctcgcaggccggccggccggccggccgccgccctcctcgtcgtcgtcgactcagctgcgatttttcgaggcagaatgatgagacgatccctttctctactctcccgggtggaagcagacgagaagcacagaagatcggcgaggcatgggcgcctgaacatacgcgcatgtgtaaagattatatacaagaaggcttagtgctgttagtagtcaggaggcaccgcaggaggttgtcgagcacgtgttgctttaaggtagagtgtgcaggtggggcaagagacatgcgtctcgtgtgtgcatccaaggttgaagacgaccggcagctccagaagggaggaagaaaaaggctgaagagagacagagaccagcgagcccaagctgtccttcggagttcagacaggcggcatgatcgctcttcgtttccttcccccc

SEQ ID NO: 35802 - DNA, 193 bp, Setaria italica
  misc_feature (159)..(193): n is a, c, g, or t
  Peptide Sequence Number=SeqID_101776
ttttgttaacagacgattgaatagctggtagctatacctatcagttaccaccagaaattgatcgtttgattgctacattaacctgggcatccaagagtctttgtataagagaggtgctacctctcattcttttgcgtgcgtcaaaaaaaaaaaaaaaannnnnnnnnnnnnnnnnnnnnnnnnnnnnnnnnnn

SEQ ID NO: 35803 - DNA, 539 bp, Setaria italica
  Peptide Sequence Number=SeqID_101777
attctggagtgccaactgaacagcactgaatgatggcagatgtacattcttcagttttttgtatgcaactttcctcagggggcaaatacagtgagatattgctatctccctctcagtgtgagtagtatgaattcgcacttgagttatctttgtaagccatcccacctgtactttggttctgaaccgctacaactccaaatgaatcaatgtcatcattaacaatagcctgggcagcagaccagcactctatagcacttgagagagtgtacttacacgactcatcaagttcctcagtacaaatcatggaccttgaagcactgctttctgtattgtcagttaggaagccagtatctacaattgcattactccgaggacatactgaaactgaacgattgctggttgacacatctgacacagatgcaatgctttggcaactcacagtactacttatttgagacctctcaaagtcataacgattactacttttaaggcgctctaaatgtactgattgccttgaagacccttgatcaatggaagaa

SEQ ID NO: 35804 - DNA, 778 bp, Setaria italica
  misc_feature (44)..(44): n is a, c, g, or t
  Peptide Sequence Number=SeqID_101778
gtcttggtcgattcgcctcgtgggtcgggcttcagcgaactatnaccccttcggaatggattgtctaccatggtaactgttgggcgaggagcagaagcaaattctgactgctgctcacgctctagtccaattgttgcagccctgaatgcaatgtcatgagcaatggaactgcagaagagaattgtatccgtaacctcttctaaagtgaagcatctctgaatttgctcccttgatccctcaactgtagccagcaatccttcattatcaggaagctccattgtgttagcctctgttgcagaaaacaacacatcctcttcagagatgacagatacacaaccatcatccaatctctttgcctcattagaagctggaactgcttcatactgcatttgataattatcaacgccacactcatcaccaggatgttctggaatgccaactgaatagcactgactgacagcagatgtaccttcttcagttttttgtatgcaactttcttcaggagccaaagacagtggaatattgttatgtgtttcggtatctgatgaacatgtgttggcacttaagttctgaatagcatctccaaatgaatcaatatcatcattaacaatagcctttgcagcagaccagcactctatagcgcttgagagagtgcacttacatgactcatcaagttcctcagtactaatcatgattggtttcgttgtaatttctgaattgtcggttaggaagccaatatctacaattgcatttctccgaggacaaattgaaactgaac

SEQ ID NO: 35805 - DNA, 391 bp, Setaria italica
  Peptide Sequence Number=SeqID_101779
tttgcccgactctttccctgctggccacgactcctctccctcccggccaccgctcgccggccgccagccccgccgttccgtccccgcgcagccgcgccctccccatccttccgtcgacgcggttcctcaccttgtcgacgcagtgctgtacaccgcaggagcctaccgtagctaggtctccaccagcgctaggtgttggtgttgctcttgccatcggccgctcaaatcctcgcgctccgacgctgccagtgaggaactccaccgcggtgagttctacttagctcttacacaagttatcgtcgtcaatctgccgtggaaggacccatcgcgtgaaccccggttctcggcgccggttcctcccccgccgctagatcccgtttctcggcgccgc

SEQ ID NO: 35806 - DNA, 436 bp, Setaria italica
  Peptide Sequence Number=SeqID_101780
ttttttttaacctaagtgcgctcagaatgagtcgatgagatccttttcacacaataaattgcatagttttccttattacataatgtttgccgatgccggcacgatgaagctgctattgcaactttgtgcgccactagtagtctagtaccatagcaagaaaaactcaagatgatgaaacattcacagaaaccagggaatacaacatcctgcaaacatggcaaagttccgtttccaactgtgccaccagtagcataacaagaaaacacaaatgacaaaacattcacaaaagcagaaaacttaaatctcatcaaggcaggctaccattgctctcaaactccaaacatgatgctaaacttggtcacaagaggaacggaataatagaataggacaaacaacccaagtagacgaacaaccgaaataataacggtagggaaga

SEQ ID NO: 35807 - DNA, 317 bp, Setaria italica
  Peptide Sequence Number=SeqID_101781
caatctcattctgcaatctgcagggatcatccagtacagttacagcatgtcccggaaaactttgaaaagaattccgtcctgggatacctctcgtaagactccatgttaacagctgtaaacgagaaactctcaccgaagaaaatggatgcccagagccaaaatatcactagacctggaaacttgccaattgatttgatcagatctagtgattcgaaagcatccgctagaaagatattgcaagcggctgaacttgccttcagggataccgttgtatctgctgtcccgccattgtcgccgcccggcgtcgaaacccgaaa

SEQ ID NO: 35808 - DNA, 1518 bp, Setaria italica
  misc_feature (1480)..(1518): n is a, c, g, or t
  Peptide Sequence Number=SeqID_101782
tccagtcttgttgttccagtgcctataagaagtgcctttattttcctgatgatgctgcaagggcgtaaaagtggtgtacagaacaaaggatcttgaggagcagcaggcgaggagtcgaatctggaatgagacttggctttcaggctttttctacaaaccttgcaactatgaactctttgtgaagcaatcactcaacatggagatggctattgtaatggctcgggattatggcatggattggatcattcatcttgacactgatgaactactataccctggtggagcttctgagtattctgttaggcatttgttagctgaggtccctcatgatgtcgacatggttatttttccaaactatgaaagcagtgttgagcgtgacaatataaaagatccattcagtgaagtatctatgttcaagaagaattatgatcatctcccgaaagatacttattttggcatgtataaggaagcaacacgaggaaatcctaattattttctcacttatggtaatggaaaatctgctgcacgaattcaagatcatctccgtcctaatggcgcacacagatggcataactatgcaaagagcccaaatgagatcaagttagaggaggctgcagttctgcactatacatacactaaattttcagatttgacatctagacgtgatcgctgtggatgcaagcctacaaaagaagatgttaaaagatgttttatgctagactttgacagagcagcttttataattgcatcaactgctagtgaagaggaaatgcttcgctggtacaacgagcgggtcgtgtggaatgataagcagctgaatctgaagcttatgaggaaaggagtgctaactcgcatttacacccctatggctattgttcaaggtctgcgggaatctggtgtcttcacttcggtcattgcaggtggccaagctgctgtaaacgagaaactctcaccgaagaaaatggatgcccagagccaaaatatcactagacctggaaacttgccaattgatttgatcagatctagtgattcgaaagcatccgctagaaagatattgcaagcggctgaacttgccttcagggataccgttgtatctgctgtcccgccattgtcgccgcccggtctggacgatgaacacaggcatcacagtgaataatgtcagacaaaaaaaatctttagctggacgtataaggtcctaagaaatggtactgacatattgcaaaaaagggtgctgacagaaggcttctttttggcgatcaaagggatatgcgggcaactttgatagaaagatagatggatatattgctttcttgggcacaaacccaattttcagcgattttgtacatggggtttacagttgttaacatggagtcttacgagaggtatcccaggacggaattcttttcaaagttttccgggacatgctgtaactgtactggatgatccctgcagattgcagaatgagattgattaagatagnnnnnnnnnnnnnnnnnnnnnnnnnnnnnnnnnnnnnnn

SEQ ID NO: 35809 - DNA, 607 bp, Setaria italica
  Peptide Sequence Number=SeqID_101783
tactcttattaggtttggttttgtttctcgatttggatttggatgctgctcgaattagtttattgttttcgacatgcaaccagtaacatacttttacaaaggcaaaccaaatttttttcacttttgaggggaaatagaacatctcattctcagggtgtacccatatgatttgttgcaaatttgcatagtcctaagaccgagatcagggtcaaaacttgattttgtcatcacaatgtctgaaactctgaatgaaaaggagaacccaagaactatccatccaattccaaccatactggccaactgggctgtgtgctttggttgggccgagctgaggtggatctgatctcccactaccaacatcagcccatgttcctactgtccaggctccagaacttttctctgttccttttttgtgttgaaaggatttttttttgaaattttctctgtttgctttctcccccctactaatgtgcagtgaatcaggctcttatcatattaacatactcccaatgatattagcacggtcgaatagttaagaaattcccaatgctttattttatattattcttgctgtttgttctgctctggcttcgcaatgtctgatgat

SEQ ID NO: 35810 - DNA, 969 bp, Setaria italica
  misc_feature (933)..(969): n is a, c, g, or t
  Peptide Sequence Number=SeqID_101784
ggcccacagagcaccaccacctccgcgagagcagtctgagcacagctcggacccaaagattcagagattcagaggccagcaggctccgacctccacccaattcgtccgaggcgcgggcgacggcggtcggcgacatggaagccgcggtgcccagccgtgtcgcgctctccgcggcaagccgcttccccaatcgccacgcggtggcaggagatagatctaccatttacaagggaaggtgccaaagtcttgcaatccctatggctttgtcagcagctgcaccgggcaaaggaggtgtgcttgatcggccagttgagaaaactactcctggtcgtcagtccgaatttgatgtgaagaaaaagcgcaaaatgacgcccccataccgcgtgatcctgcacaacgacaactacaacaggcgcgagtacgtcgtcaaggtcctgatgaaagtgatcccaggtatgacggtggacaacgcggtgaacatcatgcaggaggcgcacgtgaacgggctgtcggtggtgatcgtctgctcccagtcggaggccgaggagcactgcacgtcgctgaggggcaacggcctgcggagctcgattgagcccgcgagcggcggctgctgaggatccagaaaacgggtgcccctgttttgccgcgtatagtttgtaaataccctgcgtaccaaaggtaaagctgaaacgggtggggaggtcacgggcagttgacgttgccgcgaaaccgaataccactgggtaggtgtgtaaatctttgtacgggtaccctgtagaacagaaatagcgttttcagttgtgattcataaaaacatttagagcctgcttggttggactctaaaacttgcccagctaaaattagggcaagctcataaactttggcacttgtttggttcgaagtcaaaaaaatttttggcttaccacatttttnnnnnnnnnnnnnnnnnnnnnnnnnnnnnnnnnnnnn

SEQ ID NO: 35811 - DNA, 199 bp, Setaria italica
  Peptide Sequence Number=SeqID_101785
cacgccataagacaaaggaaaaaagcctagatgtcataaacaatgtcctaatgacagcaaccattgtgttggatgaacaatgtcctaatgacaccaaatgaacaaggcctttgtgttgaatgacagcagccaaagataaagtgtgctgtgatacaaacatggcacactggcaatgggtgcatagtatgctgtcctgcat

SEQ ID NO: 35812 - DNA, 323 bp, Setaria italica
  misc_feature (284)..(284): n is a, c, g, or t
  misc_feature (292)..(292): n is a, c, g, or t
  Peptide Sequence Number=SeqID_101786
gaacggcgcgacatggccggcaatgtcgtggcaccgcagcggcaagggcctggaccaggccgccttgttgaaccgggcgtactccttgaggtcgccggtgaggaagcggtacggcgtgccgcggaggccctgcgcgcgcagcgcccgctcgaggcgccgcggccccaaccacagccgctcgagcagccgggcggcctgccacaggagcagagcgcccaggagaccgtagatgaggaagctccatggcgttgaggcgacttcacttgccagcgctgcaagaaccntttttccnagctctcaagtgaagctggagaaggcagagt

SEQ ID NO: 35813 - DNA, 1053 bp, Setaria italica
  Peptide Sequence Number=SeqID_101787
agataaaattcctttgcgctggcaatctaattcactccagaggggaggaaggagtcatgccagggggatcatcgttcagtgggggtgcggagctgaagtcgatgttcgggaatactccgggtggcctctcaagaggttgtatggacaataactgtgtcgagtccccgacgacatcggcccatccataatgaggctcggcctcatagtatgtctcctcatcgactaccaaatcccagctctcgccagttgtgctctttccatacttgtggacttttccattaccaaagtgttcttctccccaagtccttgaccagcgtccaccgccaggagatacatgccatgtctccccttgtcgagaaccaattcctgcaaagaatttttcttcccacttatccccccatttagtgcctaaatctgtctcagcccacttatctgtccatttcaatacaaatccacggccatcataatgttcaccccacctctcccaccaagactgctcgtttaaccttccatatttgtgagcacctttttctgtccagcctttggcatcatatttctcccaccatttctcataccacccagcattttctgcacctgattttgcttgtttttcagcacttctctctattcttgcaagattgctccattcatcttggtacaaaacttccttccatttttcccaccaagagtcacctaaagcattcttcccagatttctcggcacctagttccttatatccagtccagtcacttttctcccaccaagtctctttccattctgtggaaccatcatggctctgtcctcccattcttgcccatcggcaccggaacccattctcgccgagatcttctccactctccctgtaccaagtgcttccatcttcgttcgttccggactccttgactgcttcatccagcaagttgatttcccccactccttctcactagcaataccagtgtctctcttgggcggggtatcccgggattgaggggccggtcccctctgcgtgcaccgcggatagaaatcttgttgcttgaattgccttctagaacg

SEQ ID NO: 35814 - DNA, 559 bp, Setaria italica
  misc_feature (423)..(423): n is a, c, g, or t
  Peptide Sequence Number=SeqID_101788
caacaataaacaagatcctgttagtgctagacctcacatgcaacgacagctcaccagcaaggataactacacctctgcaatccatggccttgttgaccaaaaccttactgtttgcatggtttctatgttcctaaggcaagatgtttgtccccatatatccaagcatataggagcagcaattcttgctccagccatgttgcatgatgaggtgacgtggcagaatcgtaaaatccatttatttggactttaccctgcaagacaaatactatgttactatacacatgaggcctattcacataggccaacaggatgtcaaaaaatgtcataggaaaccagtggtgcaggcagcaatgataaccaccagacaaggcagcagttagtgcattgcagctatgattataaggctgtgtcatggagaaaggngaggggtacagcatgaattaaggagtactttatgataaaatacacattaactaaatctaaactataagcaacaaattaaatgtaggctagttacgaacagaaaacacggtcaccaatttggtggaacttcagctca

SEQ ID NO: 35815 - DNA, 242 bp, Setaria italica
  Peptide Sequence Number=SeqID_101789
acgctgttgttggtagccttttagtggatccggaagacgtacttaagctactcgcctttcagggatatgaacaggacccccacaccagctccttcaaggttgagggtggcatcaaagtacatcatccagtgctccggcctctccagggagggcagcacttggatctctgtccatccaacgatgaagtcagccaagatctggaacttgatcgcatgatgtgggcagaagtcgatgtcgaattc

SEQ ID NO: 35816 - DNA, 473 bp, Setaria italica
  Peptide Sequence Number=SeqID_101790
taactttaaatagacaagacctagaaagaaatcactgtacccttggatgatgcttccatgcaaccaactggcaataaagtcacgatgatacctggtaaaaccaaagtttttggcaaaatttgttgcaatcaaaatgtttcagttgctgataccgacaatttatctaccttttcatcagggggtgtggttagaagtgtctccaatgaagactcctgtccaaaatcgtcgggaaaacaaactgcagatgttcctgcaagggttcagctttctcacaatgatgacgtccatgaaaccctaatggaaaatggaccagtggaggcagtggcagtggaagaagatatagggttgtggtgacagtttgtccattcctgtcaactagccggtcagacagtagcaaaactgccagttacagatgcccagtcacatgctagctctgcagatcattgtgttgctggaagttttgaccaagcaca

SEQ ID NO: 35817 - DNA, 245 bp, Setaria italica
  Peptide Sequence Number=SeqID_101791
aagcaattttagtacttctgttttcagcaactagttacatactaaaagacctcctttcttctgtaggtcagcacaaagtcatggttctactgacaaaaatagagtgtgtggtgctgaggtgcttgaggagttagagagtatgacaccggcagtctatagtgaacctcccagaaatatacaacttagcttacgaagtgcttctgctaaaaagagccttctacactaccaagacggtcagcaaggct

SEQ ID NO: 35818 - DNA, 1334 bp, Setaria italica
  Peptide Sequence Number=SeqID_101792
catctgaactccactccagcaagttgggccaagaccttcatggcagaaatgtgcattgcacctcctgaacatgggaatttctccagctttattagcagcttggcaactaaggatgatcatagcactgtctcaccgtcagggaatatcattgttgacatccagagcaagggagctgtgaatatcattccttccactaattcgtcacgtgcttcagatgttggtgagaactctcgttcagttccctatccagctgacacaattactgtgaactcagtgtcatccacatctacattagctggtgctccagttgaactttctgggtatcaggaaggtgctccagtggtttcttcttcatgtttaacagctgatgttcggaacaatgtgacatctgagcccagtgctttggataatgaggtgcttcctccagaatctgctaatgtctttatgcagcctgaaagaatcactgtacccttggatgatgcttccatgcaaccaactggcaataaagtcacgatgatacctaggggtgtggttagaagtgtctccaatgaagactcctgtccaaaatcgtcgggaaaacaaactgcagatgttcctgcaagggttcagctttctcacaatgatgacgtccatgaaaccctaatggaaaatggaccagtggaggcagtggcagtggaagaagatataggttgtggtgacagtttgtccatttcctgtcaactagccggtcagacagtagcaaaactgccagttacagatgcccagtcacatgctagctctgcagatcattgtgttgctggaagttttgaccaagcacatccaacatcatcatctgctgcctcggataatgctattaattccctgacttcaaagtatggtgcagagtcagcacaaagtcatggttctactgacaaaaatagagtgtgtggtgctgaggtgcttgaggagttagagagtatgacaccggcagtctatagtgaacctcccagaaatatacaacttagcttacgaagtgcttctgctaaaaagaagccttctacactaccaagacggtcagcaaggcttattcctaagtaaccgctctaaatgatacagatgagacccattgtgagagtagcttcactaccagtttagtcagattccgtgaggctggagggatagaatacagttgttaacatgttagattctaaacttgtctattctggttaattctttcgtcctagcaactgagtagattggttttgggaggttagcactgctgccagacatttgatttcccttctgtttttcagcatatgttacagttggtgtactgtcgagctttcatatatcag

SEQ ID NO: 35819 - DNA, 1251 bp, Setaria italica
  Peptide Sequence Number=SeqID_101793
cacagccgcctgaccctggccgcctccattctccaatccaccgaccgaattccaaacccttcccaggacctccctcctcccgcgccgcccgccgctcgccggccgcctccgccccaatccaatggggtatgaggagagcaaaaatcatcttctgagtctcagttaccaggagctccaatgtttgtgcaaaaggtataaccttcctgctaagaagacccacactcagttagcaagcttgcttgcatcgctgcttgaggcatctcctcctgctgctttgactatcccattagcaactgtgaaagaaacagccacgtgcgaccatgttagcaacaaaagaggcccatacaatggcagagatgatggtagaccacctgcgcaggtgaagcatcaaaaaggatctcaaacaccagtcgatgaaacaactaaaggggggattgacactggtacaagtatttctccagtttctatcaaccatggaaggccagattgtcatggtcattcatcttctgaacggggtactgatcataatttgcaatctcaaagggatgtgggtattgcatctaagtcagcaaatccaggacttgttagcaaacatcatcgttcacctgataacatcattgatcaaatttgtccccctattgtcgaaaaatatcctgaggcttccactcctttcagccatacagaagataccgcagttaaaggttgtgggccatctgataagatgtcagcaaatgctcctgctgttcaattttctgtaatgtcagacgagggcattgatcttgttgttgatctgaactccactccagcaagttgggccaagaccttcatggcagaaatgtgcattgcacctcctgaacatgggaatttctccagctttattagcagcttggcaactaaggatgatcatagcactgtctcaccgtcagggaatatcattgttgacatccagagcaagggagctgtgaatatcattccttccactaattcgtcacgtgcttcagatgttggtgagaactctcgttcagttccctatccagctgacactactaatttacttgtttgttaacttcttagcttgtttcttatttccttagtcctagcaactgagtagattggttttgggaggttagcactgctgccagacatttgatttcccttctgtttttcagcatatgttacagttggtgtactgtcgagctttcatatatcagtgtacaaacaatgcatacttttacagaaattctggacctg

SEQ ID NO: 35820 - DNA, 389 bp, Setaria italica
  Peptide Sequence Number=SeqID_101794
cacgcagtgtttctccatcaccaaagcgtgcaggctcccatagcccaggcagagacagcaaggagtaaagcttgttgatctggtgatgcctaagaacaatcttccatgggattgcagaaggttgactgagcacaatggaagcagcactgaactgctattcaagttatctgttcgtgagatgggttgctgtttactggtagaatgatattgcacgggatcgactgtggtggatgttctagctgttaagtctttatcattggtgtcgatgttcgtgatggtgcagctgatgatacggtgatgctgatgctgctgaccgtgatgatcttgatgcagtctctttaattttgttcaaaagattttgagtcaacgaaactccagatggatctcat

SEQ ID NO: 35821 - DNA, 1273 bp, Setaria italica
  Peptide Sequence Number=SeqID_101795
ccaatctaccgcccgcctgctctcccctcgccaaccccgccgcggcggagcgctaaaccctaggcggcgtcgtcgtcggcggaggcggaggaggagccgcgatgtcgcacttcgggaggtcggggccgccggacatccgcgacaccttctcgctcctcgtcctcaacatcagcttccgcaccacggctgacgacctcttcccgctcttcgagcgctacggcaaggtcgtcgacgtcttcatcccgagggaccggaggaccggggactcgaggggtttcgcgttcgtgcggtacaagtacgccgacgaggcgcagaaggctatagatcgccttgacgggcggaatgtggatgggaggaacatcatggtgcagtttgccaagtacggccccaatgctgagccaatccgtaaaggaagggtcaaagaggctgtggagaaatcacaagacaggtcaagaagccgtagtccaaggccaaggcacagagacagagatcataggaggcgaagtcgcagcaggagcagagaaaggcatggccgtgatagagacagggactatcgtcgccagagccgaagcagaagcagaagcagaagcccgagttcaagtcctgacctcaaaagtcgtcgtagagcaagagatgattgtaagcgccagagcaggagcaagagtaggagcagaagcagaagcagaagcaggagtagaagccgctcataccatagtggttcacctgctcgacgcagtgctagccctcgcaagagcccaccaccacggaggagccccactcctgaaaagcacaccaatggaaaagattcacctccgtcacgcagtgtttctccatcacccaagcgtgcaggctcccgtagcccacgcagtgtttctccatcaccaaagcgtgcaggctcccgtagcccacgcagtgtttctccatcaccaaagcgtgcaggctcccatagcccaggcagagacagcaaggagtaaagcttgttgatctggtgatgcctaagaacaatcttccatgggattgcagaaggttgactgagcacaatggaagcagcactgaactgctattcaaggttgctagttgtccttaatggtttttagaattgtgttttccagttgtcaaaattatgctgttggattgtattttgatccctatttttcttcatgcccatctactttatatgcattaaacttcttcataccatcatattaacttgttaaaacatttgtgcattttctagttatctgttcgtgagatgggttgctgtttactggta

SEQ ID NO: 35822 - DNA, 480 bp, Setaria italica
  Peptide Sequence Number=SeqID_101796
agtccatgagaatcagctatccagagaggtcactaaaaacaagaagtcacctgacaaccaatgcaaactcaaaacaccaaaactggaacagcagcacgagatggcagagcactctaatatgaaaaacatcatgtgcatgaaatagctcattgcacagtggcatgggtttgaatttgtaaatatctgattcacactaatgatgggttataaatttataaatgatgaagtctggcaagcaattccagagtgatctgactgtatttgtgaactcttctattgccaattacataatatagttgcaactgtgtatctgcatatagcttgcctgccccagggtgtaatactgctcacctaacatagggtgaccccttatgacagtttggcaagaagctgatgtaaaaagataaactctgctgtgctagcttcaggtgtgagacatggtaacaaaaaacccactattgtccctagcttccctccctt

SEQ ID NO: 35823 - DNA, 322 bp, Setaria italica
  Peptide Sequence Number=SeqID_101797
cgagcggcggccggagatggcggagccgcgggggagaccgagaggtgtgcccaggcagaggggaggcgggttgcggaggggagcgaaatcggtgggatttttcccaaagcgacgggaggcccgatttttgcaccgcagtgcattcctttgctacgggaaaaatcgctgcgcgaggaatcggtcgagaatcgcgccgtttggggggcttgctcgattattttcacgagaatcggttggagaagctgaaacaaacaccccctaaatgccaaagttactacaattttaagtttgtcaagtgtaacaaatatcacttgcaatttag

SEQ ID NO: 35824 - DNA, 691 bp, Setaria italica
  Peptide Sequence Number=SeqID_101798
tacttttaagttaggtaatctttagtggagaggcaagggacgtaagaagttgcctaattcttggattgaattaggcacttcttcgtcccacaatcctctctttatttgtaatacatatagttccaatttttaaccacaggatctaagcattcaattatggagggattggtaggcctcttgaaagtgcgggtggttcgtgggatcaaccttgcctaccgcgacgcaagaggcagcgatccatatgttgtcctacgacttggcaagaagaaactcaagacaagtgtgaagaagagatctgtcaatcccatctggcatgaagagctaactttgacggtcacacatcccagtcaaacacttaagcttgaggtgtttgacaaggatactttcagcagagatgaccctatgggagatgcagagatcgacgtagcacccttgatggaagttgtaactatgaacccggacgacattaagaacggcgccatcataaagtctgtgcggccaagcacccggaattgccttgcagatgagagccatgtttgctggaggaacggtaggtttgtccaggacatgattctccggctcaagaacgtcgagagcggagagatacagctccagctgcaatgggtaaccattcctggcgccaagtaaccctcgatttccctttggagatcatagctcttcctctcattgc

SEQ ID NO: 35825 - DNA, 310 bp, Setaria italica
  Peptide Sequence Number=SeqID_101799
gaaagtgtcgtctggcttccaccccgccgaggcgccccaccccaacgccaccgccgcgcgctccatcgcccaccccgccgccggcttctccttcgactacctccctcccaccagatgcaataggaaaccgtgggacgcctgcgacgtgcgcgatggccgcgtccttctcaagagcggtcccgttgggtatacgggcttcaacttccccgacctcgcggtgtgcgaccccgttttccggcggtaccggctgctgcctcccatacccgacgacctactcgcctccgtccaccaataccagcaaatttttcca

SEQ ID NO: 35826 - DNA, 268 bp, Setaria italica
  Peptide Sequence Number=SeqID_101800
tcagacttcctgtcattactgctatttcataatgaacatgtaaaatgttggctgactaaatgaaggacgtatcatgacttaatacattgttacaaccacacatgttgccatacatgcgcagttgcacactgaatatactgtacagagaatgccacttggttaccataggaagcatgcagatttgtggctgaagtgcaaattattgcttgctttgaaccaaacgtgctttattgattgtcgtggggcaaaaatctaacaacttgctatc

SEQ ID NO: 35827 - DNA, 253 bp, Setaria italica
  Peptide Sequence Number=SeqID_101801
cctgacccgatccgcgagttttccgcgtgccgagccctccccacctcgagggtccggccgcctcttccccgcggctccccgagcgacgcagcgccgtcgcccgtgcggctccccctccctgcgcctcgccgtcgctgctcctcgtcgcctccccgtcgcctccccgtcctccccgtcgcctccccgccgcctccccgtcgcctctccatctccgtgccggctcgatctccaccactgctccgtgactgccccg

SEQ ID NO: 35828 - DNA, 209 bp, Setaria italica
  Peptide Sequence Number=SeqID_101802
tttggcgtgagctccgatgttgtgacagtggtaagcaatcccggacagcaggctcatcgccggcaccccaagaagtgcaggttcaaagggtgctccaagggcgcgcggggtgcgtcgggcctgtgcatcgcccatggcggcgggcagaggtgccagaagcccgggtgtcacaagggcgccgagagccgcacagcctactgcaaggccca

SEQ ID NO: 35829 - DNA, 440 bp, Setaria italica
  Peptide Sequence Number=SeqID_101803
gtatcctcagcattccaaatagtttttggttgtaacaaatgtccatattgattgggcaatatgaagcaggtcagcttagatagtgcgacaacatttacttgatgatcggaactattggttccgtaaccaaagtagtcatacttatttaacacatagtctgggcggtttgcttcttctgcattcgcaggtgcagaaacttcagcctgaccatccaaaatgatgtaaaggccatctacaggttcaccttcacgggcgacataatcaccaggttcgtagcgcttgacctggacggcgtcggcgatcctgcggatggaggagcccgggaggcactgcaggaggggcacctgccccaggaactcggtcacttcctcacgatccatcgccggacggcgggagcagcggcgggggcaccggagcagcgagggcggctgcggtcgagg

SEQ ID NO: 35830 - DNA, 3583 bp, Setaria italica
  misc_feature (3561)..(3583): n is a, c, g, or t
  Peptide Sequence Number=SeqID_101804
tttttttttgttcaactgaagagaagccaagtgacattattttcccaaccctcactcatattcaattaggcctgtttacacttcgagaagctacaaatatccagctcataacaatcggtatcacctttttccttctatataccgcctaacattgtacattttcgcgcaagaaattcgtaaatatctaaaccaaattgaaagagaagaggctactacagactcttctgcacctttcaaagctttggcctcgggtttggtcctcgtgtcttctccctcctaatcagcgcctcttgggtcagcgacatgataagctctccttgccggttgaacatgcgcccggtgacgaaacccctgccaccatgcgcggatgggctctcgatcacgtacagtaaccagtcatcagccttcacaggcttgtggaaccagatcgaatgatcgagactgagtgagtatgtcttcaaccccttctcccgatgaggattcaggctgacaccagaatatagtagatccgaagcatatgctacaacacacctatgcagagcttgatcgtctgaaagctttcctcgagctctaaaccagtaatttaagcttggtttatattgagacgctgaatcttcacagaatctcatttctatgggccaaggcgtgaacttctttttagctgccaagttcctatattgcgatgggaagcgtgggtcagtaagccgtctttctcgtatctcctccagattaaggagctgttctggaggaggaacattaggcatggttgcagcctgatgctgaaaacctacttcttccttctggaaagaagcaatcaaagtgaatataactaggcctttctgctttgcctccacttttctggttgcaaagctggatccatcacgtgcccgatgaacttgatatattattggcatgttattgtctccagcaataagaaaaatcgcatgcaaactatgcaccatttttagacaatcaacagtcttggatgctgcggctagtgcctgtccaatcaattgtcctccaaaaacttgcctaaaagttggagcttctggtaaagtaaacccacggaagatatcgacctctaatggttctaagtgcaaaatttgttccagcaaagaatgttcaggtgtatcctcagcattccaaatagtttttggttgtaacaaatgtccatattgattgggcaatatgaagcaggtcagcttagatagtgcgacaacatttacttgatgatcggaactattggttccgtaaccaaagtagtcatacttatttaacacatagtctgggcggtttgcttcttctgcattcgcaggtgcagaaacttcagcctgaccatccaaaatgatgtaaaggccatctacaggttcaccttcacgggcgacataatcaccaggttcgtagcgcttgacctggacggcgtcggcgatcctgcggatggaggagcccgggaggcactgcaggaggggcacctgccccaggaactcggtcactgcacaccaatggcaaccaggccgcagattagccagaattggtcccaaattcggcgggctctgcgccggcgctgatttaccttcctcacgatccatcgccggacggcgggagcagcggcgggggcaccggagcagcgagggcggctgcggtcgagggggcggaggcggccagcttccttctccttcccactagaccaggctcggtcggtcggctcaccgccctggtgaccgccgccgtctttgacgcctgcctccgccgccgccccaccacaaatctctgtgcgtgtttggccgaaacccacgggaagcgcttgtctttgctgagctgctccgcagcggagctctggatacttgagttcgggtttgtttccccatctcagaccaagattcggagcgtcgccgaggagaggcgatgaaggggaaggccggcgcgatggacaggaggtcctccgccaggtggagggtgctggtgctctgcgcattcagcttcggcctcggcatgctcttcacggaccggttctggacagcaccagataccagtaaccatatcatgtctcaacgccggaggcaagatcaagagctgcaacttgtatcagaggactgcaatacaaagaggaagcatggggaagacaaggatataatgggagaggtaaccaagacccatgaagctatacaatcattggataagtccatctcaacgctgcagatggagcttgcagcaaagcggagcacactggagttgctccgttctagtggttcgccggtaacctctgaaactagccaaccaaggaagaaggcatttgtcgtcattggagtcaacactgctttcagtagccgcaagcgccgtgattcagtccgggagacatggatgcctcaaggtgaaaagctgcaacaattagaggaacagaaggggatagttatccgcttcactattgggcacagtgctacatctaatagtatactggacaaggctatagattcagaggacgcccaacatcatgattttcttagactggaccatgttgaaggataccatgaactctcagcgaagacaaaaattttcttctcaaccgctgtcggcatctgggatgctgacttctacgtcaaggtcgatgacgatgtgcatgtgaacttaggaatgcttgccactacccttgctcgacataaatcaaaaccaagaacgtacatcggctgcatgaagtcaggcccagttctcgctgacaagaatgtgaagtaccacgaacctgagtactggaaatttggagaggaagggaataaatacttccgtcatgctacggggcagatatacgccgtttcgaaagatctcgcgacttacatttcaatcaatcagcctatcttgcacaaatatgcaaatgaagacgtgtcgcttggatcatggttcattggtttggaagttaatcacattgatgaaaggaacatgtgctgcggaactccaccagattgcgagtggaaagggcaagctggcaatgtctgtgtagcatctttcgattggagctgcagtggcatatgcaagtctgtcgagaggatcaaggatgtacatgctcgctgcggtgaaggagattcagcagtttggagcgcccttatctagcacataccctccttttgcccgtaaatatgtagcatagttggtaagctctcatggtgggcctgcataggcaaacacccctggtgaactcgacaagaccaaggatcatgccccatcgaatataatctggaactgcagcaaacaggacgttgccaatgttgctttggcttgccggttctatggcatcacgtaggttatgggatgcttgtggagatattttgttagatggcttgctgcctgtcacgattggcgactttggtgcggttaggattgagaccaaagtaggggttgcaactgatgtactgatcttacatgtagccatgtagggggagtttcagctggtgcgtatggaggtagagttcatgtaatgtagagaacatttttcatgcaaattttgacattctttttgctgagttaatgaaaaaaaatgtaccatgattgttaaactaaaaaaaaaaaaannnnnnnnnnnnnnnnnnnnnnn

SEQ ID NO: 35831 - DNA, 358 bp, Setaria italica
  Peptide Sequence Number=SeqID_101805
gcagccgcgagagctgtagcctagttagttgtggcctcctccctgggtgtagatgtagtcggtgtgcgccaccagccgtaccgacctaatcaggcactcctcttgctccgcttcgcctccctctccggcggcggcgccgccgcacgggtcgtcctctgccaccgccgccgtgaagcccgtcatcgccccccccttgctgtccaccacctgcaacgcacgcagagaaattgaaagagactgaggttgctgctgtactacgcgtgcggtcgtctccaacgccatgcatgcatggcggcggtgagatcgaacggctgccctggcaatgagcacgcacgacgcacctcactgtcttgtcctt

SEQ ID NO: 35832 - DNA, 666 bp, Setaria italica
  misc_feature (1)..(8): n is a, c, g, or t
  Peptide Sequence Number=SeqID_101806
nnnnnnnngacaccaatcaataatccaacaagttgaagaaaaaagacttgattacatacacaaactctccagcagagccgcgcaaaactgtcatcactaacagtaacacacatacaactttctcccatggatcatgcaggatgcatgcagcagtctcggttacaattacagtgatccggatcggagctaccgtgcatgcgtatggaatcgaattgctcggagcgatatgcggaggcagccgcgagagctgtagcctagttagttgtggcctcctccctgggtgtagatgtagtcggtgtgcgccaccagcgtccgcctcatcaggcactcctcttgctccgcttcgcctccctctccggcggcggcgccgccgcacgggtcgtcctctgccaccgccgccgtgaagcccgtcatcgccccccccttgctgtccaccacctcactgtcttgtccttcttggagctccgcgtggcctctactgctcgccgccgcctccctcgccgcgtgggcggcgacggagaagaggagcaggagcgacagcagcagggcggcggttcgccgtggcggcgattgcgccatggctggcctcctcttgctggtagtttcttgggccagagaggaactgagggagagagtgtggtggttatgtgttagttgggtcgttgt

SEQ ID NO: 35833 - DNA, 1184 bp, Setaria italica
  Peptide Sequence Number=SeqID_101807
agaaaccgtagttacaagtagtgccaaattcaaattgcccttcctgcgatgcaatatgagttcagtctgtggaaagacgtcggacatggcggacatcaaactttcaccgcaaccatgagctcgagtgttgttttggttcagagttcagacaattgttcaaacatgtttacagctgcttgactcgaccacccgtcctcgccgctaaattgatgcagggaaattgcaaacttcatcaatggcgactcccaccacctactcagtccgcatctcctcagagaccccacaagatcgagacctggctgtcgtctgacgaagctctggccaggcagctgcaggaggaggagaacacgcgcgacgccgctgccgacaccagagaattcaccggtaatgtgtccttggagccatcgtcaccggctgttgagtacaggcctgcacagaatgcagctcaggtggcacgggaagacaatgtggacccagataatatgtcgtatgagcaactacaagcattaggggaagcagtaggaactcagtccagagggttatctgatgagctgatatcttatttggagccatttaggcacaagtgcaccttattctccaggaataagaacaatgaagaatgtgtgatatgcaaaacgacttataagagccgtcagaagatgataagactgccctgcagccattgttatcatgcaaattgtataactcgctggcttaagatcaacaaggcatgcccagtctgcaacgaggaggtatttggatgaactaagaggctctcggcaaatatttcagcttcatcgttcacgttgggcttcatatgggccatgctatgtgattatgttaggctagttgggttatgtgcttacgaaaactgtttgttggtttacacgcactgttaactgtacctggtcttgtttgatgacgggtcgatgaatccacgagttgataaatgtgtgggtacagtacttcggttgccagttttctgtctatgcaaccaagcaggattcctttttccatttttcttggagaaattaaagcaggactagttcaatgtaatggtatgtttatctctgtatttctccaacatctacatgatttaattctgtaaagaaaaactctcctgttctgcgacctactcgtaggggcaaaacagggatgcaaacacaccaaaaatatcttgggcc

SEQ ID NO: 35834 - DNA, 764 bp, Setaria italica
  Peptide Sequence Number=SeqID_101808
gggggatagggggagaaagcgagagagaggagaggagggaggaggaggcggcggcggcgcgccatcactctacccctgctctgctgatccggaggacggaggcgagggaaattgcaaacttcatcaatggcgactcccaccacctactcagtccgcatctcctcagagacccacaagatcgagacctggctgtcgtctgacgaagctctggccaggcagctgcaggaggaggagaacacgcgcgacgccgctgccgacaccagagaattcaccggtaatgtgtccttggagccatcgtcaccggctgttgagtacaggcctgcacagaatgcagctcaggtggcacgggaagacaatgtggacccagataatatgtcgtatgaggtatgccaattacattctttcatgcgctggaagagatgatgtgaaattctcgtgcattgtttcttaacaacaaacaaaatgaatggaagggaatcttggttcatcagcagaagtactctgtgtcaggaatagagtattcagggtatatagcatgttatattttactgaatttcctgctgtacggggctcctaagcactgttgacagtgtccaatgtagagcgaaatagtgaatgtccatcaaagcaaatgcaatagtataacttcagtgttgactcaggttcgcaaatcacaagcttctagctactctctgccctgagcgtctagttgggtagcattctctttcttcgtttcatgtgtagtccttctggttttagtgtct

SEQ ID NO: 35835 - DNA, 1046 bp, Setaria italica
  Peptide Sequence Number=SeqID_101809
ttaagagtagttttacctgtcctaattttaaccaacctggtgacattggggttggaataagtggcgctgaaggaatgcaggctgtgatggcaagtgactttgcaatagctcagtttcgtttcttagagcggttacttcttgtgcatggtcattggtgttatcgtcggattgcagctatgatatgctattttttcttcaagaacatcacattcggcattacacttttctggtttgaggcccatgctatgttctcagcccaacctgcgtacaatgactggttcatttctttctataatgttgccttcacatctctccctgtcattgcccttggtgtttttgacaaggatgtctcttcccgtgtttgtcttgaggtcccttcattacatcaagatggcgtgaataatgtattctttagttggtcccgaatactcagctggatgttaaatgggctgtgctgttcaataatcatatactttggttccctcaatgccatcctgattcaggctgtccggcaggatggtcgtgttgctgggtttgacatcctaggagtgaccatgtacacttgcgtagtgtggactgtgaactgccagctggctctctacatcagctatttcacctggatacaacattttgttatctggggcagtatactaatctggtacgcgtttctagtcatctatggactatttcccccggcaatatcaaccactgcatatcatgttttcttggaagcttgtgcgtcgagccctttgtactggttatcaaccctaatgattgtggtcacagccttgatcccattcttcgtctacaaaatatcgaggacactgtattacccacagtaccacgataaagttcagagaactaactcaaagaattggtgatgccagtcgtataagaagctactgaatgaatatatgtacagtcagtattctatttaacgtgcagtgtgcttaactttctagatcatgatgtcagcggcagtgtatataagcagaggtgttgtttattaggttctgtacatacttgggcttatgcccataaatttg

SEQ ID NO: 35836 - DNA, 327 bp, Setaria italica
  Peptide Sequence Number=SeqID_101810
gttgcgcatcctaaggttgcacaagagcagattggcaagggaggctacttagccggaacccgatattcatgtgccatggttagttcttacaatccatcatttgcccaatattctaccacttgcatcaaactgtatctccatgaattttccaaatcagctgcaaccaagcgttttccgaattggcttggcacaatatttgaccaaatgcctctaaaagagggttcgactggagggagcaaattaagacatataaagattacattatcatcagcagtagcaacagaaaatgcataatcatcaaaaattcagattaagaactcccagttt

SEQ ID NO: 35837 - DNA, 608 bp, Setaria italica
  Peptide Sequence Number=SeqID_101811
aattcctgacaagagagcaacgcaggaaaaaataaaggcatttctttgtagtcacaaactattataattaaaacttttgcgctctattaaattttcaaccaagaaataaatcacagatgcatgcctacagctagaaattttggctataacagctcaattaatctcatcatcaaataactaattgaatatgaagggtggaataaataaattgggttaataaggtatgcctatagtagttcgacatgaagataccggtttctctgttttaaccaaatatacacaaatacctaatgtcctattttcctttcattaaggtacttggaaaaggaaattgataggacgcagtatggaatgttcctgtacagaatcttttgcagatttcaccattatttggctatgttcatattcttcttgttgttccttgtaaacaaaatggctatatgactaagaggaatagcagataaccaagcaggcactaaaccaaataatagaagcattaatagagttcagaggaacatgttaactcaaacgccaaatggtaaatcaggtcaacaatatatgaccactgaattaggagtaacataagacatcaaaacatggtacatcag

SEQ ID NO: 35838 - DNA, 466 bp, Setaria italica
  Peptide Sequence Number=SeqID_101812
atcagtcaagaaccagagtgcacaaggaaagccaactgcctttaggatatttcctgaactccatgatgcaaggtccagccaaagaaaggctgaaaatcatttcctcaaatgctgagtgtgtgtctatatgtggagacaaacctacaccacaaggatattcgtttactgtcaattgatcaactaatccggtagtacagttcttcacaccaggaaaggaagcgatcttctcaaggactattgaaacaaaagccggtaattcacccaagaactgcttcgaatcaacattccttgcatcatacagaaactcataaccgtaatgctgaactcgtctcttcgccaaatttttccatggcctgctatcaacagctgcaagtagctcctgttcctcagtggcagtcacgaactcctcaaccatgtaaatcccggggatccccagctccgacgccgagagagacactagcagcga

SEQ ID NO: 35839 - DNA, 1699 bp, Setaria italica
  misc_feature (1696)..(1699): n is a, c, g, or t
  Peptide Sequence Number=SeqID_101813
ctctcttcgacgacgtcggcgagagctagggtttggtgcgccaccgccgtccgccatggcagaggccccccagtaccagatcctggtgcggctcctcgacgggcgcacccgctgcctccgcttcaccacgcccacagtctccggcgccgcgctcctcgacgccgtcgcgtccctctcccgcgttcccgccgccgccctccgcctcgtcaccggccgcctcgacgtctcgccctccgccgtcctcacctcagccgccgacggacagttcccctcggcgtccgcgctcctccgcctccggggaggcaagggcgggttcggctcccttctcagaggggccgcctccaaggcaggccagaagaagaccagcaatttcgacgcctgccgcgacatcaacggccgccgtctccgccacgtcaacgccgagcgccgcctcgaggaatggaaggccgaggccgcggaccgccagctcgagaagctcgccgaggacttcatcaagaaaaaggccaaggaggcgggccgcggcaaagggccctcagctgccgaggtggacaagtaccttgagaagttccgcaaggatgctgagatctgcgtcaacgctgttgaggaatccgtgcgtgcatctcttgggaagaggaagaccgcgcctaagccgccccctggggcagactccaagaagcttaggatttggttgggaaagaataaggtagaagatgatgaaagcgatagtgacagtgatgaggatgatgaggatagagaaggtgatgagggcacagatgccaaatctatagttcttgatgatgggaattgctcgaatggatccagcaaaagtgacgacaagaagcatgatctgggttcagtttctgggtcacattcagaaggagagtcctcaggtgaaaagtccgggcacaatgattcagaagaaaacggaaaatgtgttcagtcaattgtggaactaacaatgagatcagaggctgaaggtggtgattttgaatctgatggtagtgtggaaactgaagttggaatggtggatcagcccatttctgagaaatcagatgaagtgaaagcagatgtggataacactgcttcagcggctttagacgaagtgaaagcagatgtgggtaacactgtttcagctgcatcaaatcaaaacaacccagaggtgcctcaagtagaagaatctgctgatgtaaacaaatcttctccttcagaaccattagacctggcaaagtatggttcagctgcagaattggagactcttggcttggagaagctcaagatggagctacaaactcgcggactaaagtgtggtggaactttgcaggagcgagctgcacgacttttccttctgaagacaaccccactggacaagctaccaaagaagctgctcgcaaagcctgccgctgggggaaagtgagcagtagtagcaaacatataacaagttcaacgattaaggaaacaaaaatgtaatgttcaagttgtatttgaagatactggagtctgttgtaatgtatcataagcctttaacttggctttggaaattaatgagatgtgtctgtatattaacagcagctcgatgtttgttactaataccactccaagccataagcattgaggctacacaaaaaaaaaaaaaaactaagaaccgaactaagggggaaaaatttaagaaagtaaaacttaactttaagtaactaannnn

SEQ ID NO: 35840 - DNA, 322 bp, Setaria italica
  Peptide Sequence Number=SeqID_101814
tggctgttcatggcggggagctgggcggcgttcggcacttccatgctcctcaccttggggctcctcacgggggtgcccgccaagtcgcgcctcgtccggtacgcgttcctggtggcctactccagcctcgtgctcacgttcgtgacgtcgcagccgcgcacctcgctcgccatggacctcgccatctggggcgccctcatggccgtgctgaccgtcttcaccaagtaccttcgcgtcgacacgctccccagctgggtgccgctcattgtgccctcctccagcctcgtgctgctgctcaggttcctgacttcgcagctgcgcg

SEQ ID NO: 35841 - DNA, 419 bp, Setaria italica
  Peptide Sequence Number=SeqID_101815
tttttttttttttttttatttcaacccaaaccatgatcctgtacttcatcaaaccgagaacacacttacaactcgaagtacccactggagcagggaccttttcactctctttttgcaaggtcacatacatttactagcaaagtctcgacaaaagaaataggacatgagatatgatatgaatgttacagtagactatgtagtagcacactgcaaaaaaggcctcacccagatgcaagctcaagtcaagcaggcacttaaaacactcacgaagaaggggaaccgagctgttggtcggaactgaacttatcatgctgctgcttctcctgcctcgggtgattcaacttcgagcacccgtgcctggtagggtgtgacggcattgccatcatccatggcagcggtgaagaaggaatcgcttaccc

SEQ ID NO: 35842 - DNA, 1150 bp, Setaria italica
  Peptide Sequence Number=SeqID_101816
gagggaattcaaggttgaggtggaagcgattgggcgagtgcggcacaagaacctggtgcggctcttaggatactgtgctgaagggaaccaaaggatgcttgtgtatgagtatgtaaataacggaaacttggagcaatggctccatggtgatgttggtcctgtgagccctctgacatgggatatcagaatgaagattattctgggaacagcaaaaggcttaatgtatttgcacgagggacttgaaccaaaggtggttcaccgtgatgtcaagtcaagcaatattctccttgacaagcgttggaatgctaaactttctgattttgggctagcaaagcttttgggttcagagaggagttacgtgacaaccagggtcatggggacatttgggtatgttgctccagaatatgcaggcactggcatgttgaatgaaactagtgatgtctatagttttggaatccttatcatggaaataatatctggccgggttcctgttgattacaacaggccaccaggggaggttaatcttgttgaatggctgaagacaatggtcagcaaccgaaattccgaaggggttttggacccgaagatgactgagaagcctacttctagggcattgaagaaggctttgttagtggctttgcggtgcgtagatcctgaagctcgcaagaggccaaagattgggcatgtcattcacatgcttgaagttgatgatttcccctacagagatgaacgtcgcggtggcaaggctccaactcaagcgagatcagtggaaacacctgcaagtgatccgggcgatagcagtgggaacaacacgccaaaagacacaccgaaaggaggagagcctttcaaatggagaactcaggagacctagctgtcaggaaaagcggtgattgttccgagtcctcgtgcccgaccgtaagtctgtacgccgcgaggccacaaaaggctcatttgctgtctcgtcagttgatcagttgggcacacgagctctgcaagcaccagtggtgatcgtcgtgacagtatctgtacattgtcggattaatatgttaggcatagtgattttttggttgttttgttccagggtcgtatttattcgagagatgatttgtatgggtaaaggcgtgtctactcttgaggtagaaaaaaaatg

SEQ ID NO: 35843 - DNA, 311 bp, Setaria italica
  Peptide Sequence Number=SeqID_101817
ttatctcaacatcagcgattatctgggcttcccgtccgcagcgccagccaatgcagagcagtaccaagacttggagcagcaggtgccgagtacagaggagcagcaggtcatgacgccgcagttgatggtgcacacttctgcagatgaagaacgctcgcagcttgtccctaccgatgacatcttcctgctgagtcctcttctcgacatcagtgattatctgagcttcccgtccgcagcgacagccaatgcagagcagggccaagagctggagcagcaggtgccgagtacagcggagagcatgtcatgatgcc

SEQ ID NO: 35844 - DNA, 259 bp, Setaria italica
  Peptide Sequence Number=SeqID_101818
tttttaaattaagcacgcatatctatacagtgtattgaatgagtttcacgctaaatttcattacaatgtgtttttaattattgaagttatatccaaacagaggacacgcactagacatgcacaagaagcaacctcgatgaaactcgatgaaccatacacgtttagtcgtgagcaacaattaaacttttgtgaggctaccgcacaccaaaccaagccaaacatagcacaacaatataatcatagttggagatgaaccggg

SEQ ID NO: 35845 - DNA, 529 bp, Setaria italica
  Peptide Sequence Number=SeqID_101819
ccttctccgctccaccaccagtctcctaattctgatagtttatgggtggtggctcttccgtctcgcccagccctgtccagcagtcgtctaccttcctcgcttatcccactcctctctaaccactgtactaaactagcagtaccggagctggactgcctctacttgtactgattgcttgtagctgtactgcgctgacattatatacctcttcttgctcgtgccaattgccattgccaaccacaacgcgactttcattgcttcgagaacatgggagttgcaagagttttcgtcgtcgttcttgctctgatttgcatatttgtaagagaggggagggcagcgacattcacgttcgtgaaccggtgcacggggacggtgtggccgggcatccagtcgaacgccggaagctcgaggctggacccgacggggttcgtgctgccgccgggcacgtcgcgcgcggtgccggcgccgtcgggctggtccggccgtgtctgggcgcgcaccggctgcgcgcaggacgccaccgggaaga

SEQ ID NO: 35846 - DNA, 500 bp, Setaria italica
  Peptide Sequence Number=SeqID_101820
atgacaggtcaatgcctaaaaagctgaagtgaaacatttaacaccaaagtttcaatatgaacatcagataaaaggaacacaaacaatgaaagataacaataatgagactataatagagggccttttatgcaaacgagaaataccctaagttcttatggaccaaagcaaccgcaaaagctgaagtcaagtactatgttgcctagttgaacagaaacaattcttcttcttaaaactataccctatgaagcaaagcatggtataaaaatagtctgtggtgatacatgctaacatacaatccaccaaaaacagcataaatacaatagcatttatatatatttacctcatccctttgcacctttacaacacgcaacactaactgaccatcatttcttgtcttcacgatcttaatgttaaatttccaaaagctccctgacccttactcaacggaagatactcatcgacaactagacttaaattaattttactaaattagtagtaaa

SEQ ID NO: 35847 - DNA, 1056 bp, Setaria italica
  Peptide Sequence Number=SeqID_101821
gcagagcaaggttggtatacatgtgaaccttgatgcgctccagctgctcatagatcatacaagattgcacatatggatcggaacaacaatatttagatcagaaaatgttagaaaagcttcggcttttcctactaaaatctgcatctcaggcttcatgctgtacatgaatgctgttaccgaagcttaaagaatggcggaaaacacggaatcagactgtcatgacaatgtcaagactgacgttacttgtccctcgaaatgattcagtgttttgaatttgatatcagatctttcagttcatctgcgattgcctggtggcaaaacttgaattgctcctctgtttggaccattccaggccgttctgatctaaatttttttagagtttcagcaagattgacggcaccctgatctccaagtaaaatacgatctattgcattatggatggtgatgtaagcacccgttcttccaatgccagcactgcaatgtgcaactattgggtgttctcgtggaatgtgatataatcttttcagaatttgtcgtacagcattactgttgcttggcaccccatggtcaggccattcagaatgctcgatgtgcagaagagagtgcactgaatctgactcatccctttgcacctttacaacacgcaacactaactgaccatcatttcttgtcttcacgatcttaatgttaaattttccaaaagctccctgacccttactcaacggaagatactcatcgcacttataaccatcaaatttggtgagcataacgatcacaggacagtgattctcatatatcatctgccaaaaatcttcaattgtcctggctagcgggccttgagtggaaataaactttgtttgatatctgccaccagtatttataaagctggcattgatgtaatcattgcctgttggggactgtagtcgtactctggttttgtcaattggcaagacatcagtgtagcgatttcttcctctattaacagcttcccgagccgacttttgtgacgacggaggcactgttcctatatccgggaggttccagaactccttggcc

SEQ ID NO: 35848 - DNA, 386 bp, Setaria italica
  Peptide Sequence Number=SeqID_101822
agtgggacgacgggagcgtcgtgtcggaggggctcgtgtccatccggcggaccgcgcaccggagcaattacgccgggccgtccgggtcaaacacgacccagttctgaaaagtcaaagtcttcgtttctgcactctgtcttgctccttgttgcgtgaagtctttggaagtctatttggcattttggctaccataacagaaaaatatggtatggtccttgtgttgtataaactgtaaggttgattcttttgtttgaactgaaatgtaactttatttgatttgtgcagtttttgggattatgtcaaagtgtaattgagaatagagaaaagattttattatggtcctgtgattctaatatggaattgaccttatgcaaatttaagcccta

SEQ ID NO: 35849 - DNA, 412 bp, Setaria italica
  Peptide Sequence Number=SeqID_101823
tggcgaacctcatgtattgctttgactggacgttaccggccggcatggagaaggaggatattgatatgacggaggtgtttggattgacggtccatcgaaaggagaagctcatccttgttccaaaaccacatggtactttgctcacgccatgaaaactgaggcaggatcaattaaggcgtaagtaatacagatttgcacattaatgtaccgcaagtgtccatatatacacttccttcatttttaaatatacgatgtttaggatgtataataatttgctggtctgaaatgctatatatctagaaatggaggaaccatgtgtgtgtttgtgtgtgtttgtcaagcagctctatctacaccaatgatgctatatttccttaataaagttacaaaaatcattcaatagaaaaaaaaa

SEQ ID NO: 35850 - DNA, 313 bp, Setaria italica
  Peptide Sequence Number=SeqID_101824
ccaggccggacctgacctgggccctcgtcccggccatggccaacgtgcagaaggcgctggcggacctgggcctcgccgacgctgtcaaggtgtccacgccggtggcgttctccgcggtcgacgtgtcgtggccaccgtctgatggcaggttccggaacgacctcgcggagccggtgatgaggcccatgctcgacctcctgcagcggacgggctcctacctcaccatcaacctctacccgtacttcgcttacgccgcgcaatcggccagcgcgatctcccgcgactacttcttggggaacccccaaccccggcg

SEQ ID NO: 35851 - DNA, 196 bp, Setaria italica
  Peptide Sequence Number=SeqID_101825
gtaacccccttttgtccctcgattctcctctcctttttctttccatcctcgctcgaaggccacctcccaatcctctcctcccgcagcaccgctccaccatcttgcgagttgcgatgcctcgccccacaccccatctcctcccgcagcaccgctccaccatcttgcgagttgcgatgcctcgccccacacccctcct

SEQ ID NO: 35852 - DNA, 244 bp, Setaria italica
  Peptide Sequence Number=SeqID_101826
gcgggaagtttggctgacatctttgtcaagcgcccaacaaaacttgagcaggcgaagctagcttctgctgccgaagaaaaactggccagtggcttaaaccctgtcgaagagcgtagaagagcaagagagaaggagcttctggatgtgtggggaggaatgggcctggggaactcaatgaagccccatgtgtccaagattgagagagataaggctgcttacaggatagctgaggctgaacagaagc

SEQ ID NO: 35853 - DNA, 237 bp, Setaria italica
  Peptide Sequence Number=SeqID_101827
ctcatcaggtatctgaccggagagctcgttgccggccaatgccagccgccgcagcgaggagaagccggtcaggaacgccggtatcgggccggcgaggagcttgttgccggacatgtccagcgtctcaaggcggtggcagctggcgaggcccggcggcagcctggcgccgctcaggccgttgttggaccagtccagcaccgtaagattggcgcacccgccgaagtcgtacgccgacac

SEQ ID NO: 35854 - DNA, 179 bp, Setaria italica
  Peptide Sequence Number=SeqID_101828
gtttatagcaaagttaattagataactcagtatgatgccctccaaaaaaagattaacgtagtctgatcttagttaagcatttgacagtacatgacagtatgctaatgtataaactttcaggcaatataaggtttattcttgaggggaatggcgtaatgagtatagggtatgatcaaaag

SEQ ID NO: 35855 - DNA, 852 bp, Setaria italica
  misc_feature (1)..(38): n is a, c, g, or t
  Peptide Sequence Number=SeqID_101829
nnnnnnnnnnnnnnnnnnnnnnnnnnnnnnnnnnnnnnctatctgttaaaacagattggaaaaggactcaattcgattcatatgttaaaacagactggacaggagaggcagggaaatatcgacaagaacagattaatgatatcaaaacccattaggagcatccattaaccatcccattcatgcataacatccactgaaacagactagcatgccgcaaaacctcgatggactcagcaaatctgatgtgaacctattgattaggatagaattcctctgttacaccgagttctcatgctagaaagtagaaactcaacatcctgttcagttgcatttcaaatcctctgaaacgataagatgctggataccacattacgcttcgctgatcgtcacctcaacctccacgcctggctcgatggtgatggaggtgatctgcttgaccacatctggtgtgctgacgagatcaatcaccctcttgtgaatcctcatctcaaagcgatcccaggtgttggtgccttcgccgcagggagacttcctggtggtgatgtggagcaccttggtgggcatgcggacggggcccttcaacttcagctccttgcccttggcacccttcaccagatcgccgacaactttctcgaggttcttgacgctcctggaggagagggtgatgcggatcctgtgctgcgcctccagcaggcccgcctcgtaccccgccttgccggacttcattggcggcgcgtacgccacgtcggccgccgccatcgctcgcgggaggagaggagtggggtggagcgagtagaggaggtcgggcgctagggtttcgcctcgaggaagccggaggggaggtggcggcgg

SEQ ID NO: 35856 - DNA, 750 bp, Setaria italica
  Peptide Sequence Number=SeqID_101830
aagctcgagatcttagtggtgtaagctttttaaggtttatggatcagctttatgagcagatatccagtttactgcagagcaatgatatcgctgaaaatttactggctctccgtgctattgatgccttaattgatatgccctttggagaaggtgcttccaaagtttctaagtttgccagcttcttgaggaacgtatttgacgtgaagcgtgaccctgaaatcctagttccagcaagcgcagtgctgggtcatttagcaaaagcagggggagcaatgactgcagatgaagtggaacgacagattaaaacagctttggggtggctgggtggtgatcgagtggaatatcgtagatttgcagcagtacttattctcaaagagatggctgaaaatgcatcaacagttttcaatgttcatgttcctgaatttgttgatgctatatgggtagcactgagagaccccaagcaggctgttcgtgaaagagcagtggaagcgttgcgtgcttgtctccatgttattgaaaaacgggagactcgttggcgtgtacagtggtattatcgaatgtgtgaagccgcacaagttggacttggcaggaatgcttctgttcatagtattcatggttcattattggctgttggagaattgttaaggaatacaggggagtttatgatgtctcggtacagagaagtggctgatatagtcctcgattatttgaagcaccgagatcagcttgttcgccgcagtataacatcgc

SEQ ID NO: 35857 - DNA, 996 bp, Setaria italica
  misc_feature (1)..(47): n is a, c, g, or t
  Peptide Sequence Number=SeqID_101831
nnnnnnnnnnnnnnnnnnnnnnnnnnnnnnnnnnnnnnnnnnnnnnnagttttgtttttttttttgggtttacctgcaaatccttggccggcctatgcgtccattgcaagatcaacaactgcagaaggatgaaagctcgacagtttccgacagtagcacagacttgtttacaaacagatgttcccccaaaccaaacaagtttcatcaaagtactcaggatgcagcaatacactgtacgggcaccacggccacgtcgagcaacagcagtcatcgccattgatcagtgggtgaaggtgtagaagacggtgccgacgtagactgcgagcgcggtggtgacgagccccacgagccccgcggcggccttggcggcggcgcggttgctggcgcagcccagcgtgccgagccggatctgcacgaccatcaccatggacaccatcaggaacacgcacccgaccacggaccccacggcggaggccagcatcccgagtcggagcacgcgggcgtcgatgtgggcgcgcagcgcgtcgtgcgggtccttggagttgatgaggttcagcgccagcttcaggccctgcgccaccaggctggagaagaggaaggacgagaaggccaccacctccagcactagcagggaccgggccaccccgggccccgcgtcgcaggacgggtcgccggcgaggctccgcagctgctccggggtcgccaggggagaggcccacgaacacggccaccgtgaagagcgagttcacgttcaccacgccgtccagcgctgtcacgtgcacgctcgtcgtgttcgccgacagcgctgccgggaacttccactcgtaaccgtggtggtggttgccgttgctgtgctcatcagattcatccatggcacgagaggaggtgattggatcggatcctcgcggttcttggaatgagtatttcgcaaatcgagctgcaggatgggagaacggggatgggaagggaatacgggagagcaaggtttgggggaag

SEQ ID NO: 35858 - DNA, 404 bp, Setaria italica
  Peptide Sequence Number=SeqID_101832
ttttttgaatccataaaagcaactccttatcacaagtcactgttcaaggcaagaccattagcaacaacaggtcaacaacaacataaacaggagcaagactgccttacaagcacctctcatctgaagcggaggtgctgttttcaatcttgccctcagattatgccatcgccaggaaacgaaaaacgatcaggtacaaggaaagaggtctctggttgtcgtcatcatctcatactctgaataaaccaaaaagagaacgatggatgaagcccatgtccatcttagaattgcttcttcttccggatcctcttgcacctccaagagatgagagccgctgctgctgcggttggacagcctcgtctgcgcttcatttgcttctttggcttccgctcttgcctctttctgtg

SEQ ID NO: 35859 - DNA, 1252 bp, Setaria italica
  Peptide Sequence Number=SeqID_101833
ctttccaccgagctctggttcgggaaggcgttacggattagctgattctgaagatggacgtacaataccatgaggagtacgtgaggaatccgcggggcgtgcagctcttcacgtgcggctggctgccggcgtcctcctcgcccaaggcgctcgtcttcctctgccatggttacggaatggagtgcagcgacttcatgagagcatgtgggatcaagcttgccacagcagggtatggtgtgtttgggattgattatgagggccacggcaagtccatgggtgccaggtgctacatccagaagtttgaaaatcttgtggctgactgcgacaggttcttcaagtccatctgtgccatggaggattacagaaacaaaagccgattcttgtacggcgagtccatgggaggagccgtggctctactgctgcacaggaaggatccgatcttctgggacggtgcagtccttgtagcgccaatgtgcaagatatcagagaaagtgaaaccacaccccgtcgtgatcaccctcctgacgcaggtggaagagatcatcccgaagtggaagatagtccccaccaaagacgtcatcgactctgcgttcaaggaccctgtgaagcgcgaaaagatcaggaagaacaagctcatctaccaggacaagccccggcttaagacagcactggagctgctcagaaccagcatggatgtggaagatagcctgtcagaggtgaggatgccattcttcatcctgcacggcgaggccgacatggtgaccgacccagaggtcagccgagccctgtatgagagggcagccagcactgacaagaccatcaagctctacccagggatgtggcacggcctcaccgccggtgagcccgatgagaatgtggagctagtgttctccgacattgttgcgtggcttgatgagcggagtcgccattggaaacctgaagagcgggtaaggcctccatctgagcccgagatgttccaccaggtggcgcccacgaaaatcacccgcgtcgccagcagcggtggcacagagggtccggtgccggcacaaggccggcctcaacggcgcggcagcttcctctgtggactaggtggccgaccacaccagcagcaatgtaggatgtagatagaaaaaacacttccattgatctgttgttcactatgaactgtacatggcataagaaacaggtctgatggtgatgtaaacagtgtactgaacttgatgctcaataaaatcttgttgcatcaaccaag

SEQ ID NO: 35860 - DNA, 555 bp, Setaria italica
  Peptide Sequence Number=SeqID_101834
tgaagatggacgtacaataccatgaggtgagcaaagtcggcttcttttttccttttctctgttcttgctctttggtcggattgcgtcgatggcgtttcaatctggtttccttgtctagctccaaaaacgagcgtttgttgctcgtcattaagtctgctaggttcttcctcaatttaattgcttcctgcgctcctgttcgatgattattccctctctgacggtcttcttgatcgagcatcgtctgatggtcgcctcgtcgacgatgtctgccgcgcgcaggagtacgtgaggaatccgcggggcgtgcagctcttcacgtgcggctggctgccggcgtcctcctcgccccaaggcgctcgtcttcctctgccatggttacggaatggagtgcagcgacttcatgagaggtgcgctccagctctcgtgctcatgccgccattttctcatgctctttccttatcggtgcgcaaaccaaagaggatcatcaggtcatgcatgattggttgaaaaagcgaaacgatgtctcagtttcactaactcttgcatgtgggatca

SEQ ID NO: 35861 - DNA, 646 bp, Setaria italica
  Peptide Sequence Number=SeqID_101835
gattctggggctgaaactaggaggatgtgcacagtacaattatccaattttggaatagtaaacctggctgccaatttcttcaacctatatggaatatgaaatccaaactaaacaacaaaagtatctttgaatttaataaaagaaacccaatttgttgcacttttccaagctgatttgatctgggaaaggctgttcaaacaagggatggagttgataacaaactatgtcagcatgacatcagagatcagtatgcaggagatagagaaactaacaagcatcagtgcagcccggctggatattgagtttgagccacgctttcgagacctatccattctgcccctcagaaatgtgactgcagaactacacatgtccattactttctccaaacgaacatcagaaaatgttgctgcaaaggcagcatgtccagtagctacagttgtgccagcattctaggtagttttctaagtcttgtcgttattttggtagaatgatcagactgaactttgctaagttttacaccaacaggaagagtgacaatatcaagctcatcatttttactgcttccacttgccattgtagcgctctttagcccacaattgtgcaatgccaaaaccaggggagttgctcaagaaattatgctcctgct

SEQ ID NO: 35862 - DNA, 565 bp, Setaria italica
  misc_feature (9)..(9): n is a, c, g, or t
  Peptide Sequence Number=SeqID_101836
aataaggtnatcctccatgttccatgatacacatcaccattactgtgaaagagagtccccaaaccagatctcttaccatacctccagagtccatcataaaagctcccagcactgaaggttagacgtccctttccttcagggacaccttcttggcatctacctctataaattccccctctataccgtatttcaacaactgggctccatgtcttttctggttctctttctgcatcaagcatcagtgcagcccggctggatattgagtttgagccacgctttcgagacctatccattctgcccctcagaaatgtgactgcagaactacacatgtccattactttctccaaacgaacatcagaaaatgttgctgcaaaggcagcatgtccagtagctacagttgtgccagcatcaggagtttcaagctgcgtatttggagaatgatcagactgaactttgctaagttttacaccaacaggaagagtgacaatatcaagctcatcatttttactgcttccacttgccattgtgcgctctttagcccacaattgtgcaattaattgcctaa

SEQ ID NO: 35863 - DNA, 926 bp, Setaria italica
  Peptide Sequence Number=SeqID_101837
gtagcttggatactcaagaccccgaccttctgtcgcttactctgattttgaaacaccaagccagtgaatggaatgaatctggtattggtaggtgctgataccgtccagatcaagaaggggagtcgcacttgagctcttaagctgtcagttcgctgaatatttgattaaactagctctattgtgcttcaaaagttacctttattcataccaaaaagaggggatgtcattgtctgcacagatttgcctatagcccactgaaacacccaaactcagaataccaggtgtcattcatcagaccagagtgccttgcaacatctgagattttgaagcatagcctcctaccatctgagaagcaaatttcgccagtatctggaaaatctacttagatccgaaccctatttctccattttagttctgccaacaagtacaccctcatcccaaacttcaatccaccttaatccatttgcatccaccaacaggctctccccatggcgccatccattttggaaatggccaaagaagatactcccatccttggcataaaatctaccctcgccattagccttgcctttccaaaagtttgcaaaccagcggtcaccactgtgaaaataataccagccctttccatgaataaggtcatccctccatgttccatgatacacatcaccattactgtgaaagagagtccccaaaccagatctcttaccatacctccagagtccatcataaaagctcccagcactgaaggttagacgtccctttccttcagggacaccttcttggcatctacctctataaattccccctctataccgtatttcaacaactgggctccatgtcttttctggttctctttctgcatcctacaagtaaaataatggattgcagatgctaaggctcttaggacatgaagagtcagagctaaa

SEQ ID NO: 35864 - DNA, 620 bp, Setaria italica
  Peptide Sequence Number=SeqID_101838
gcagtatgcactgattggaacatgctgtattcatccattcctgataacagttaactgccatagttttcgtctggtagcaccatagggagcccttattgttaataaattattgtatttccctcattccctatattaaagctatattctgatgctgctcctgcttcctttcaaattggtattctttgggctggctggtggtaatgtggaaattgtgagcatatgtgtacaagaatcagccttcacttaaaacaaaagttgaggcaacactttaactttttgttcataaaataagtaaactgaattaatttttgcctgggaatttataatttttatagaagaggaacagtagatttactacatacacttcctgcttttctatagaaggcctgccattgtttcatttttagatggttttagttggatgcattcttggaggtgatcatggatcctacatcaagaagagtgacaccggttctcaactcatgccactggtaattttattggatagcacttgtgtattatctcaattcatggttatctttctgggcccagctaaaggatactttgtacttaaactgtggatctgttctatagacgatcttatccactctaattgtggg

SEQ ID NO: 35865 - DNA, 216 bp, Setaria italica
  Peptide Sequence Number=SeqID_101839
taaaactgccaggattatcaggaaatctttcagaatatttggaaatcattgtagagtgcctgatgtgtctcaaaatgaaatgcaataaaaataaacataacacacacacatcattagtttaatatagcatcgtcttgcactgcaatgaaaggcagcagatgctgccattgtttgtacctctgtatgttcttgagacaaaatatacaaacagtgtgc

SEQ ID NO: 35866 - DNA, 2670 bp, Setaria italica
  Peptide Sequence Number=SeqID_101840
cttatggcgagctatctggcatgttctgtggaggcttgtcttacgatggttacgcagaccacagcagctcaagtgattatttcaggttcatagatccactgcctgcggttgtgccccagatcgcagcagagccctattccaatccttcatccaccgtgtcgagggccaacactgaaactgacaacccggaggattgggagttcatctcagatgagtccctcaactatattagccggatgctcatggaggaggatattgatgagaaatgcagcatgtaccaggcggagtcagcagcactacgtgctgctgcaaagccattctacgacattcttgggcacaagtttccaccgtctcctgatcaccagctgaccccttggtctgtggacagccccagtgagagtggcagtagcagtcgtacacaatctgtggcaagtactgttactagcagcagtgttggtggtgcagtggatagcaatgcaatcggcgctacgatgctggacgcagtggacagatggaatcttatcgaggcttgtgtggtcagtcttctcagccgctcgttggtccatcaagtgacgcatgcagtgcagcgggtgtgctagaagatcctttgatcacaaatgggaggatccctgagtatttgtttgagagccttccaacttgggatttcaggagaggcatcgaggaagcccagaagtttcttcctgttaggaataaactagtaattgatttagaagctggtggtgttgctagaccccaagaagcaaggaaagatgtttctttaaatgctaggaaggcagatgtgttgaacagcaggaaaaacagacagagtgaagaccttgacctgatggaaggacggaacattaaacagtctgcattttgttctgatgagcctgattggattgagatgtttgatgatttgcttcgacaaactgagaagaaggctacagatctgcgagagctgatgcgcaatgaagcttccaagaattctcaggtcactcagacgaaagggccaagtgggccacggacacgaggaaggaaaccaacaaagaaggatgtggtggaccttaggactatcctcatccactgtgcacaggctgtggcagcagatgaccgcagaactgctaatgaattgttaaaacaaataaggcatcattccaagccaaatggtgatggcgcccagaggttggcacattgctttgcagatggtcttgaggctcgcttagcaggcacagggagtcagctttaccacaagcttgtggcaaaacgtacaactgcctctgacatgcttaaagcctaccacctttacctggcagcatgcccatttaagaggctttcacattttctttccaatcagacaatcttgagtatgataaaaaatgcatcaaaggtgcatatcattgactttggcatttattttggcttccaatggccatgcctaatcaggcgcctctccaagagggaaggtggtccgcctgttcttcgcatcactggaattgatgtacctcagccaggtttccgacctaccgagagaattgaagagactggacaaaggcttgcagaatatgctaagaagtttaatgtcccttttgagtaccagggaatagcatcaaagtgggaaaccatccgtgttgaggatctcaaaattggcaaggatgaagttgtgattgttaattgcctgtaccggttcaggaacttgattgatgaaacagttgctgtagacagccctaggaatagggtgctcaacaccataaggcaagtcaacccagctattttcatccatggaattgtgaatgggtcatacagcgttcccttcttcatcacacgtttccgtgaggcattgttccatttctccgcattgtttgacatgctagagacaactgtcccacgggatgatgcccagcgtgcacttatagagagggatctgtttggccgagaggcactcaatgttattgcatgtgagggctcagacagagttgagagacccgagacgtacaaacagtggcaggtgaggaacctcagggctggatttgttcaatcgcctttaaaccaagaaattgtgatgaaagccaaggacaaagtaaaagacatttatcacaaggacttcgtcatagatgaagacagcggatggctcctgcaaggctggaaaggaaggataatctatgccatatctacatggaagcctaagaataactaggttcttggtctcattctgcgtctcctatcccattttgaagccttggaggggggctaatcacagtcatgctattttttctggtttggaccttgacctgtgaacctgtgtgctcaaggaaatggcttgaagaacgaacaattatcaatgtgatagctttgttagatttacatctctccagctggtgctgcgataaactggagaaaaggagcagttgttgacctctcttccttggcgttggtatcatcacccttatttaattcgtagttttcttctttccagttacttccatgaccatcctattagcaataaccagatctcagcttctattattagttaattagctagccaactacctgctgtcttgagctctgtatttttttacttgttatccatccatgttggcaaacatgagtccggttttgagcttcagcagatcaaatattccccaacgagtaagctaaattatctaccttacg

SEQ ID NO: 35867 - DNA, 369 bp, Setaria italica
  Peptide Sequence Number=SeqID_101841
tcgccggcgagttcccggcggcggaggacctgggctcgtacgacgggttcgtggtcagcggcagcccgcacgacgcgcacggcgaggagccctgggtccgctgcctctgcgcgctcgtccaggcgctccacgccatggggaagcgggtcctcggcatctgcttcgggcaccaggtcctgtgccgggcgctgggcgggagggtcggcagggcgcgcggcggctgggacgtcggcgtgaggacggtgaccttcgcgcggggcctgcaggatcatcggagcctcctcgggtccctcggcgagctcccccggagtgccgccatcgtcgaggtccaccgggacgaggtgtgggaggccccgccgggggcgacgg

SEQ ID NO: 35868 - DNA, 467 bp, Setaria italica
  Peptide Sequence Number=SeqID_101842
ccacagacacacttggtgctgcttcaggttgctccagccccatgcgagacacctcgacggcgacctcgacctcaacctcaacctccgccggcgcagccacagccgccgccgccgcggacatcccgacgacctcgtcgacccccttggtcacgcaccggtggtactggacctccagcaccggcacgggcgcctgatgcatcacctccgcctcagccaccatctcagcacctcaacaagccaaactactcccgatccaaggacgaacgccgccgccggctcgccggcaaccagaaaaagagacccgcccgatccgcaaaccgattcgcccgtcgtgccggaaagagcacggaccgctctgaaagccgccgtctttggacgatccgagggatcggaaggccgatctcgatggtttctaggacacggtttcttgatctagagaaagaaggaaacgaaaggaaggaaaagaa

SEQ ID NO: 35869 - DNA, 1148 bp, Setaria italica
  Peptide Sequence Number=SeqID_101843
atcggcaatctgctcatcagagggacacatgcacacatcactcctgcacacattttctgctccccagcaccaatgtttcattttcggatgattcttcacttcctaaattacaattctgcttcgttttcccccaaaacattcagccttattattgcctgtgctgatcgtcattagtatcacctaattttctatgaaggacacttttcagtatcacacactctttcttcaggtgccaatacttcccccatctcgaagactcatcatggcacattgccattgcactagtatttactcttccacacattctccagcaaggacaccatacaccagaaaccctcaacagccaatgccttctcggcgtcatcgtggccattctgagcaaacatctgtcgagttcttacccctgctatgctggatggtggcattgtcggtcacggcaacacagatcagatctcttggcgcacagcaaaagaaacctcatgtgttctgaaggattcgtgtcagctcatcttttatttcctgcagaacaagtggcttcttcaggacgccgttgatccctgactgggcgcacttctcccacacgttatgctctgatgtcatcgtcatgaccaaaggccactgcgtgctcctgtactgcctgatcctcgaggcaacatccaagggatttactgctgttatctccaggttgaccacaacgagctggaacaaggtagaggtgggcccgacggagttcatgaaccctgaacctgaggggagtgaggacacagtgcagccaagcttctccagaagcttacgagccacgactaggttgatgtcgtcatcatcgatgagcagaaccttcaggcctgcgatttggcttgatggcgatgggtactgaagatcaaatgatcctctgaggctggagcccgagagcgatggttgcagctggaatctcaggaccagggtcatgctctctgggagaccttggccgtcaagaattgcccagatgtttccttgcatcatctgcacaagcttcctgcacatgctgaagctgagcctgagatcaaacccctcagtgcttggcttccgcaagaactgtgcaagcgagcttgatgagtcagcactctcctgcctcttcaccccaatcacaaacttaaccgacgagtgcc

SEQ ID NO: 35870 - DNA, 476 bp, Setaria italica
  Peptide Sequence Number=SeqID_101844
tgttgttacaggatcaatcatgcatttaggtatagaaaatagaaaatgagtttcctaaagttgacagcaattggatgcatgaaattccaagcctaccaaccatccctgtcggtgaaccgtgtctgactgggctctgcactaatcgatgacatggcaaccaacgacatggggattttctcactgcatgcatgatagaacttgcaaagcaaacatatataaatggctattatgataaaggagctcgtttattgagtttgaaataggggccttcatgattattcttaattctgttactcctcgatcgattcgattgtaatcgtaatttacgtagatatatatatgtaagaagatctgccaacaagttaatatctgagcagagacatcattgtgtccgttttatttttgctgtgcgcgcctacgtacctggtacatgggaggacgaggtggtggagccggcggggcgagctttcttgagc

SEQ ID NO: 35871 - DNA, 1801 bp, Setaria italica
  Peptide Sequence Number=SeqID_101845
ccaccgccgacgacgacccgaccgaaaccctaattgtaggaggtaaacgatgaggccgcacgcgacggggacgggcggcggcgtggggagacggaaggcgggggccgccgctgccgccgcgagccgggagtggatggtggtgccggcgtcgggcccggcgcgggtggaggaagccgggaagcacgcggtgatggcgcggacggggcttcccgcgcgcgatctcagggtgctcgacccgttgctctcttacccgtccacgatcatgggccgtgagcgcgccatcgtcgtcaacctggagcgcgtcaaggccgtgatcaccgccgctgaggtgctgcttccgaactccaaggatcccgccttcacgcgcttcgtccgcgacctccagacccgcgtcctcgcgtcctcctcagaccaggtctgcggatctcactgacatggagggtgaatcatctgctgttgcttcaccatttcctgttccaaattcatccaaaggacatgaattggagatgactaagtctactagcgtggtgcctgaaatgactagtagcagcagtatgcctaatttggctgctgctgcaaaagatggaaataccaaggttttaccttttgaattccgagcgcttgaggtctgccttgagtcagcctgcagatctttggaagaggaaacttctactctggagcaagaggcatatccagcattagatgagctgacatcaaagatcagcacattgaacctcgagcgagttaggcaaatcaagagccgcctggtggcaatatccggtcgtgtccagaaggtgagggatgagcttgagcatttgctggatgatgaaatggatatggctgaaatgtacttgacagagaagcttactcaacaagaaatcagtgaggcttcatctagagttgaggttgatgatccatctcagacagaggaggatagggatgaagattatcggagtgaaccagatggaagcaatggtagctttattggttataagcctcacattgaagaactggagatgcttctagaggcttactttgtgcagattgatggcacacttaacaagctatcacatctgagggagtatgttgacgacacagaagattatatcaacataatgttggacgacaagcagaatcagcttctacagatgggggttatgctctcaactgcaactgtcgtcattactgctggagtggcggttgttggactttttgggatgaatattggcatatcgctttacactactccgacaactgcggaggagacaagggcggcaaacgtgaaattttgggaaactacttccgggactgtcgctggctgcgtgattttgtacataatagccatgggttgggggaagagaagtgggttgctgcaatgatggcgcaagcgtgcatcctgacttcacccaaagaaaactggatttacaaagttctccaaaagagatattgggatgcagctcggtcctaatgctgcctgaaaatacatattcattacttggtctgttcacctatgccagtaatatgaaattgggaaacatcttctgtatgcaggtatgggagaaagaaaactgttgtacaatttgttgtcgcgcagttgacatggcaactcagttatattgtctcacacctggtgcgcagctgtttaccatactagtgcagtttctgcactttctattgtaatcgttcatgtagctgttgtatctgtatctagttacctgtaagtctgtaacatgtagatgaagtgttgttatatcataaagatgccacaattctgtcttccctcaaggaagaattcgtctaa

SEQ ID NO: 35872 - DNA, 679 bp, Setaria italica
  misc_feature (655)..(679): n is a, c, g, or t
  Peptide Sequence Number=SeqID_101846
gcgatgggtttcgcgccggtggggattggggatcaggccatgggcaacgggctcatgcctggggtggccgggatggcgagtgctgctgtcactgtgagccccgtggatacgtcaatggcccagctggattccgtgggcaacgggaacgggacctgtcctcgcccatggcgccggtgccatacccatttgagggagtgataagggggaggaggagcggtgcaggtgtggagaaggtggtggagcggcggcagaggaggatgatcaagaacagggagtctgctgctagatcccgtgcccggaagcaggcatataccatggagttggaagctgaagttcagaaactcaaggaactaaatgcggaattgcagaagaagcaggatgaaatgatggaaatgcagaaaaaccaggtcctggaagtggtcagcaatccgtatgcacagaagaaacgctgcctgcgaagaacattgacaggtccctggtaactgagttgttgatgctcgaacttgacaagatatttaacattatggtacttgtacatatcgtcaggatttggtgaacccgaatttctgttgtatattagcgatcaacagagtcgagtgtactagtgcttaattttcttatcctgtcactatgcctccttgagttcgttcttcannnnnnnnnnnnnnnnnnnnnnnnn

SEQ ID NO: 35873 - DNA, 209 bp, Setaria italica
  Peptide Sequence Number=SeqID_101847
ctcggacaaggagggttcggaaaagtctacagtggctctttggcggatggtactccggtggcggtcaagctgcggtctcagacttctaatcagggtgtcaaggagttcctcgcagaggcacagatcttaacacggattcatcacaagaatctcgtgtccatgattggctactgcaaggacgggcaccacatgggacttgtctacgagta

SEQ ID NO: 35874 - DNA, 435 bp, Setaria italica
  Peptide Sequence Number=SeqID_101848
cgaccggtgggcttcgtcttcccgtgacacggtctcttcttggtgacgcaacctgaatttttcctctgctcattcatgataatgatgaactgaataggctggcattaatagctcagtttcttggagttacacatacagaggctcagcttggagaatctcttacccaccgtcgtttcacatcagaggacttggtcacttccaggtgcattttcctgtgctgcataaggaatagctgaataaaacagctgaacaactcagttgtccttgaactacagagacttgatctgcagattcttctattcagcactgtttcatatttgaccccctttgtaagtttagaaatcttacactggtctccaaaccatgatgcttgtttcagttcttggcttatgtaattatctgtatggattccagttttgtaatttgttctgcaat

SEQ ID NO: 35875 - DNA, 406 bp, Setaria italica
  Peptide Sequence Number=SeqID_101849
tttcagttcctgcatgctagtcaatccatttccaacccaaatccaaagtaattcaactggataaactccaatgcaagactagttaggcctcacaccgagctaaacgcgcactattttctcctttgaaaagctaattaggcatgaaaaaagtcaagaactactgtaagggcaagtacattggtgtcgtctaataggtggtctcatgcattgacacgtaatcttgagacgattcaacaggcaactcgtacaatgggttgtcctataagttgtctgatagtggtatataattccttaatttgtgcataagaaaaataaaatattatgagttgcatggcaacaataactcgtacaatggttgttaagttgtctcgtggtcctacaatttagctcatgaggtggttgtttc

SEQ ID NO: 35876 - DNA, 531 bp, Setaria italica
  Peptide Sequence Number=SeqID_101850
ctgggaccgtcgatcaccaatttttaaagtaccactacatcaccaaccacaatatcaaatattgacacttgaatccttctgccgcccctaataacctccacttgtatgttttgcttctcctcgttgaggtgttggaactgcagggactgcttgtagtcactgacagctgtaacaactatcacaagaaacaccgcaaatgcaatacttgtgccatcataccatccttctttgataccctctgttgcaatgcccaatactagagaaattattgcagctatgataagaataactagcgtcatatcctggcaggcctcccaaagaaaaacccaaaagcttcttcctttcttgcgaggatatctgttagccccaaaagcatttgccctgcatgacaaatctgcctcatcgccatgaattcccttctctgagttggttttcagttaaatttgtaagccccttttaaacccctccatattcttgcagagcagaataattgtgatctctagtcatcactgtcagctgctcctctctgat

SEQ ID NO: 35877 - DNA, 331 bp, Setaria italica
  Peptide Sequence Number=SeqID_101851
agatgtctgtttattctaaccgtaccagcttcagaccaagagcgcaaacctcacagcaactgatttgactataggtcgttataaactaaatactgattcatctcatttgatgcactaagtcaactaggttaacttcaaataagctggtggccaacaattaacacagggaaatggtttgacgacactgaaacaaaagccaattggcagcagcacaaggctgatgacaccttcaaggttgcttagctgttacctgcagacaccagctatctactgccaccaaaacaaggatatttctagagtattttgattaaacccgattgctctttctaaa

SEQ ID NO: 35878 - DNA, 2209 bp, Setaria italica
  Peptide Sequence Number=SeqID_101852
tcagcagcgcaggcgcaacagcgctgcggcacagtaccgcgaggggacggggcggcagggcatccccccaccccacctcctcaccactctcccaccccgttccattccccaaacccttcccttccctggcctcgacgccggccggccggcggctccgatccgatccccgccgcgttgcgcacggaaccctctatctgatgaagtggcgttttgctcgaaattcagttgaatatcatctactttgattatctcttattcaactggagtattgggccgccttttttggccaatggggattgtcaagatagctagtggtgagcctgcagcaaagagtggttacagctgcggagatgaggaccttacacgagatgaaaggatgctgcttcagagcttcccagttcatgaacctgatgactctgaacttgcagaggtggactgtgagcttgcaatgtcaagaggtcagatttgcaatgtgccctatgggctttatgatctgcctgacttgatggaggttctttctctggaaacgtggaattcatgcctgacggaagatgatagattctgtctagcagcttccctcccagacatggaacaacatgacttcgttacaacaatgaaagagttgtttaatggtgatgctatgttctttggaagtccacttagaagctttttccttagattgaagggtgggctttattcaccacaagtttctcaggcaagagagttactgatgacatttcaaaaacgaagacattatcatttcctgaagttgtaccatgatggtatggttggtaaatttgcatccgtggccaaggtgtcgagaagttctgatatgagtactagtcttagagcgaaggttcccatctcgcacaactgggcatatgagaagagtttgccgtgtgttggtcttagcatttccactttaccaactactatcaaaggtgaaactgccactgttttgccaatgaagcgagccaaacttatggatgtgtcatcaaccactcattgttcaaccatacataatgaaacagattatgcagccaaatcagcagaaatgaactcattggaaagtccaatcttccatcctcccagtcaccccaggcaaaattgtagtaaagtaccaaaaggtgtgctgaaaataaggactggttgtgcttctcttattaatgaaagtaaagggtcacatcacagacctggactgattctagttgatcagttaggaatgcagagctctagcttttgcgctccacctcatgcttttgcacatgatgtacatggtttttctgagaattcatcttctcacatcaacacagtcagtggtacgtctgctagtcaacaaccaagtcccttgcaatggaagggtacactggaaacttatgcactgataggcaaaagcccacctggagtccaaatgacagttccagaggagcacaatgcagtttacccttccatgatgctgagagacttctatccagcagctaaccttaggttaacatgtgtcaatgacgcatatgacaccagaaaatgtgcccacatgaaagaccttttgaagaactttggtcatcagaacaatatagcccatcaaagttctcctgatccatgtgcgagagctagtgatgatcatcaaatgaatggatacaagacaacacacagttcaagaaatgctgaaagtatttcagagatgttgaacctcggcacaaggatgtacccacctcataacagctttccagagcaactggaaaccatgagcaagtaccatgatggcataaagctggaggcacctcctgccaagcctgttactgaagttggagaagctcgacaatttgcttacacctacgcaaggagaaagccgcacaagaggtcaactatggtggaagatgcagtgtcaccaagtgtgctaaacagcatgaccaacatgaaagcgaaggcaatcaaactctgaagctcggcaattgcaaacattcagagctgaacataactggggatagaatttagcatccacctaacatcggaaagcatgcatttttttccgttctcctatgacatcgataggaccaaagtcttctataactgaactgttgaagtatgcaaatcagccatatctttctcctaagttcaggggattttgcctgctataccatacatattcaggattgttgtttcttgatgagctgaattaaatttacttactgtacttaaaaaaaaaaaa

SEQ ID NO: 35879 - DNA, 1140 bp, Setaria italica
  Peptide Sequence Number=SeqID_101853
gaaccaaaccttacaagaaagttgcccaatacattcgccgcagcataaaggcgcttctgcttcaaagttctgattctcttcggtactcaacagggaacctagccgctgctcagagtgccttaggtggtccaagaacaaacctaggaattgtcaccttcactatctgaatgggaaaaaacagtacacttacgtgaacagagagtttcgtttagaacaaaattttggcgcattcatgtgcaccaattcctcacgcagagattttacatactggccagctacacgattaaggttcactaacgatgcataacaaaccactgtgaaatcccagccttttgtgttaacatgatcatgactgcggttttttggcaaaccgctgcaaggcttttgggagttccatatcttcacctatacgctgcttcttgtcaggtcgcccatcgacctcctttgattgatccaagaagggcctcttggctctgaaaacatcctcctctttcttcctggtccgcttgctgggcttgctcctgcccttggtcttcttcttgcgctcagtgttcttggcagcctcaatagcctcttccatctcttcctcaatctccttcttggtcttcttctctttcttcttcggagctcttacagtggctatcaagtttggattaagcatgatagtgtccggcaggagcttgtccataagagcgtgaacctccttctcccgcttctgctttgtagtttccatggggttggcaacaaaggtatcaaagtttggctcaccagatcctggaacaaggatggatgacaggcccatcgagtgcccaatccccagaatatcttcgtagggccggaacaaaactttcccaacctgatagcccttcatcattctgtgcttcatgtaaagcctatagtcatgcccaccaaaatccctgtagatctctactagagatccattgctgcaggccaaaagccccttctggctaaaatccaaggattgggcacgtgctgcataagaatttacaacctcatactttctcaggtcccagattttttatcttcctgtcaacacctgccgttgccataagatgaccacccctgtcaaatgcaacagcagtcacagggccatgatggcacagcattggttgtactaag

SEQ ID NO: 35880 - DNA, 251 bp, Setaria italica
  Peptide Sequence Number=SeqID_101854
tacacgttccaggccgacgacgagccggcgcagtttcagagttcagggtgcagcagctccgatgacggagacaagaagctcatgggcatcaatggcgtggcacaggatatcaccactgaatgttcagaccagtcttgagctggttcctgacatgaacaatcctattaacctgaacaccgtgatcatagcaagatcgagccatcccgcgtcgatatgaacagcaattttcgtgttccggcattggatcggag

SEQ ID NO: 35881 - DNA, 748 bp, Setaria italica
  Peptide Sequence Number=SeqID_101855
tgaaatcacaaaacaattcagtgaaatgcaaaagactttaaaatatacatgaaatctctttttgtacacaataaatcaataacttctaaaaacaaaaacattggcaaaactttaatcccaaacatatatatgctgtccaatcgtgacgcaattacaatgtgctagatgttaaaagtgactgaaacaggaataagatgagaatcaaaacgagaaacatcttaaaaactttgtgattttctttcgttctctgcattcaccatctttttcttcaccatttgcatctggtttatcatgattaggtgtagacgacagtggcgtcgtgttgttagatctgctgttgttatctataggagcaggtgacaatggtggtgttggatcagtagtcgtctctgtcgtcacctctttgccatcgcagatgatcttgacttcacagtagagaggacaggaacaagttcaatgattgcgttagcgatttgatcgctctcgatgaggtatacatcgacggtaacctgaatgtataaaaagaatgatatttgagtcttcaatttcgtcctacgattcaaaacttgttcagaggtcagaacagttaatgaactggtctagctgctcacctgaaatttgcggcactgatccaggaatttctgcagcatctctcgcctcttcgatctctcttggttcaagtaggtttcgatctgctctgggcttgctcggctcttaggcatcattcctactatttcagaaatcgatg

SEQ ID NO: 35882 - DNA, 551 bp, Setaria italica
  Peptide Sequence Number=SeqID_101856
cttttgtacttgtcctgctattgtatttcctctcttcagcttccgcacattggacttcgaaattcccagcactaactgttttatgtgcaggacaggaacaagttcaatgattgcgttagcgatttgatcgctctcgatgaggtatacatcgacggtaacctgaaatttgcggcactgatccaggaatttctgcagcatctctcgcctcttcgatctctcttggttcaagtaggtttcgatctgctctgggcttgctcggctcttaggcatcattcctaatggggtggggatgctggtgacgacggggaagacgtgcacgaggtagacgaagctccggggcctggtgagccggcccagcgcccacgacagcgccgccatgctggacccgcccttgccgaccgccacgtacacgtcgtcgccgccaccgccggaggaggcctcgccgaccgctgtggagacgccgccgcccgcctgccgcgcctcctccggctccatctcctctatctcccacgtgccggcggcgccgccgccgttgctgttgctcggctcgg

SEQ ID NO: 35883 - DNA, 954 bp, Setaria italica
  Peptide Sequence Number=SeqID_101857
ccccacgccgaccgccgtgagtggcgcgcgctcgatgccacggccgcgtcctcctcccgcgtcaggagccgcggcctccttcgcgtcaggagctgggggcctcgccacctcgtcgtctgggaccctgtgacagacgagtggagccagctacccacggggcaactgcttgccgactactggaacgtggctgtgctctgcgtggcctgtggcactggcggcgcctgtgaccacatcgactgccaccacggacacttcttcttcgtcttcttgggcaccggtgccgagcacatgacattgtgggtctactcgtcagaggctggaacctggagtgagccgacctctgttgttcagttccccaagtaccatgtcgatgaaccgccctctgccattgttgggaatgcactctattgactcaagcaggagaattctcaagtatgatttggccacacgggaaatcaatgtgcatctccaacctcctgggtcctataggacctgtaccacaatcatgacagtggaggatggcggtctgggagtcgcaagaatggaagggcccagactccctgtggtcaatggaggcaagtcctgatggaggcatgggatgggcacaaatcagtcattgacctcccgaagttactctctgtcgatgcaaactccatttgttctgattttcttggctttgctcatggtgtcggcgtcatttttgtgggtacaggtgatgggctattcagttttgatttaaagtctggccaggtgaggaatgtatgtgaggcggcatgctatttcaatagcatccgtggcgttgttccctctatgagcttccacactccaggtgtagacgacagtggcgtcgtgttgttagatctgctgttgttatctataggagcaggtgacaatggtggtgttggatcagtagtcgtctctgtcgtcacctctttgccatcgcagatgatcttg

SEQ ID NO: 35884 - DNA, 236 bp, Setaria italica
  Peptide Sequence Number=SeqID_101858
ggttggtcctaagtccttcttgcttgttgcagagagtactttgagcaagcttgccttttggagcatcgtctatggaacctgctgcggcaagaacatttgaagaaccagcaaatgatgaagtttgggatcctgctgccggcctccctgtggagtatgcgtcgtccattgacatatttgctggtatgtggagcctccagccatatgtccctagtagctctaccagagggcagcagcag

SEQ ID NO: 35885 - DNA, 577 bp, Setaria italica
  misc_feature (525)..(525): n is a, c, g, or t
  Peptide Sequence Number=SeqID_101859
aagggcgtggccagtggcgagtggcgatcgacgaggccttggagaccggtgaggtcaagttgattggatgaagcagatgtcaccggagaactaaatttcgtaatgctttggcaaaggagttgtaaggttatggcgacccgtgtcttgtcacgccaaaatctaagaaagttggctacatttactctccagaatatatcccagagccaactaatttcacctttccctccaggtctcagatctggtgctgtttcccctagcaaatgcttcagtcccctttacctgtttgggcattcatgggctgttagatgggctacatatggatcagtgaatcttgttgtgtctgatgatggcaaacctaagtttcagattgaggaggtggagccctccaaaagggaagatatttgacaaagaagcgattgaagcttcagaggaagcgggtaaagaagaagaggaaggaggcaaaataaaaaatgatccgcgacgcatcaggcccaagggaaagaagataaaacaaaaattccccanagctgaagctaggctcaaatataagattgacaaggccaaaattaaaggaagc

SEQ ID NO: 35886 - DNA, 456 bp, Setaria italica
  Peptide Sequence Number=SeqID_101860
caaagatgcacaacagctttggccaaccaggatttacctgggatgggcggtagattacagaaccttctgtgcaagctcccaactttgcaagatccgatgtacaacaaatagctttctgaccaccataagctgatccaccaataatttcacggtcttctatctcaaaaacaagtacctgaaccttagctgaagtagcctcctttacagaatcaatagcatcttctggtcttctaaaagtaatcttgtcaaaccggatgaaggcgtcggccgccgcggcagcgtcctcgtcgtcctcggcggtggcgttggcggaggaggccgcgtagaggccctcgctgccggcgtggaggatgaaggcgttgcccttgttggcgaagccgaggccgcggtactcgtgcacggacgcctccccggggcggaggaggagcgcgagcgcgacggcgaggaggaagcgcg

SEQ ID NO: 35887 - DNA, 792 bp, Setaria italica
  Peptide Sequence Number=SeqID_101861
gacgggctccgcctgctgcgcgtcgccggccgggctggtctcggccccattgaggagctccgacaccctggccgcgatgctcagcttcgcggccggcgagacgccgtgcttcccgatgatggactccaggacggcctcgcagaggggcctgttctcgatcgcgacgccgccggcctccggcaccgacgagtccttggagaacgcgacctgggcatcggatcggagcaaagcgtcagatcgatttcaacatgtaacgggaaagagaattggtggtgggtacggtgctcacggtgaggactccggcgggcgagtgggtgaagaggatggacgcgcccggcgggaacgtctccggcttgaacgcctccttgaacttgtccacggcggcgccctcggcgtccgtgtacacgccggtggccttccagtacgccacgcagttctccgtcaccttgtccgagtactgctcgcccgtcagcggcaggatcatcgtcacccgcgtgaacttctcgaagtcgcccgtgacgacgtcgcggaagaaggcgacgtcggaggcgagctcgtcggcggacttccctgcccacttcttcgccagcgcggacacggccgcgtcctcctctaagtacacgccgatggcggtgaacttgatgaagttgccgccgatctccaaccctcgcacacctgcgccggcgaggaagtgcgggcgggcggagcccggcgggcgtgccaccggagggaagacgacgccgttcgaccgtcctaacttccgtactacggttccttatttggttttgttct

SEQ ID NO: 35888 - DNA, 513 bp, Setaria italica
  Peptide Sequence Number=SeqID_101862
ctccaggacggcctcgcagaggggcctgttctcgatcgcgacgccgccggcctccggcaccgacgagtccttggagaacgcgacggtgaggactccggcgggcgagtgggtgaagaggatggacgcgcccggcgggaacgtctccggcttgaacgcctccttgaacttgtccacggcggcgccctcggcgtccgtgtacacgccggtggccttccagtacgccacgcagttctccgtcaccttgtccgagtactgctcgcccgtcagcggcaggatcatcgtcacccgcgtgaacttctcgaagtcgcccgtgacgacgtcgcggaagaaggcgacgtcggaggcgagctcgtcggcggacttccctgcccacttcttcgccagcgcggacacggccgcagcattgtaatattagcacccaagagaagtgatatcagataaagattttgagtgttggtattctgatcatggtttagattgatgtcactctagtcattctgcttggtcgtatct

SEQ ID NO: 35889 - DNA, 1034 bp, Setaria italica
  Peptide Sequence Number=SeqID_101863
gtagggggggggggggggggggggagtatgggggatcagaagttcagaacaccgaccacaaacaaagacgacaggtgccggcgtgcggcatctcccagccgatcgcctggttcttttttcttctcgcgcgctgtccgctcacgcggagaccgggacgggctccgcctgctgcgcgtcgccggccgggctggtctcggccccattgaggagctccgacaccctggccgcgatgctcagcttcgcggccggcgagacgccgtgcttcccgatgatggactccaggacggcctcgcagaggggcctgttctcgatcgcgacgccgccggcctccggcaccgacgagtccttggagaacgcgacggtgaggactccggcgggcgagtgggtgaagaggatggacgcgcccggcgggaacgtctccggcttgaacgcctccttgaacttgtccacggcggcgccctcggcgtccgtgtacacgccggtggccttccagtacgccacgcagttctccgtcaccttgtccgagtactgctcgcccgtcagcggcaggatcatcgtcacccgcgtgaacttctcgaagtcgcccgtgacgacgtcgcggaagaaggcgacgtcggaggcgagctcgtcggcggacttccctgcccacttcttcgccagcgcggacacggccgcgtcctcctctaagtacacgccgatggcggtgaacttgatgaagttgccgccgatctccaaccctcgcacacctgcgccggcgaggaagtgcgggcgggcggagcccggcgggcgtgccaccggagggaagacgacgccgtcgaccgccaactccgacacggccatggttgcacaccacgagggaactgatcgaacgcaggcggggtaacagatgaagcttatgcttgcgtacggggcagggcggggtagttgcgataatatggggacgagcgtaagggtacggagatggttagctgggacgcgacatcccaacaggtaccgggggaccgctccaataaaaaacagaccctaaccctaac

SEQ ID NO: 35890 - DNA, 592 bp, Setaria italica
  Peptide Sequence Number=SeqID_101864
tgaggatgataagaaggatgttcccatgccaacgatactgccaaaaggagaggtcaaggtactgctcggaggaggagagaacttcaagctccagcagctgcaaagcctgatgctgcagctgcacagaatgaaaagaagttcagttccatatggttttcattggttgcctcgtttgaccagtaagcattgccaattcgtcacagaatccttttatcttagggtgcgtttggtttggagacaagatgggatgggacggtgccgtcctctattttttgggatgggatcatcccgtctgctgtttggttgagagggatgaattcatcccagttttttgtttggtacgatggattgaaaacgagggacggatggctcgggtaacaccgttagctgcatgtgtttagtgggacccacatgtcatatatgggcccacatgtcatcgtcttttcttttttttctcctaacccgtatcttctccaacgctccctgccgccccaagccgtgccgcccccgctggagctccctaccgcccccgccggagctccctgccgcccaggccgtgggcaccggccgcggcaccgggggcgctcgcccc

SEQ ID NO: 35891 - DNA, 1779 bp, Setaria italica
  Peptide Sequence Number=SeqID_101865
tcttcccttcccccgccgcggcgccggcgcccgcgcccgcggggccggagggggggccgtcgtcatggtcaagcgggacctgctcgcgcgctgcatgacgtgcccgctctgccgccgcctcctccgcgacgccaccaccatctccgagtgcctccacacattttgcagaaagtgtatataccaaaagttcaatgatgaggaagtagaatgctgcccagtatgtaaaattgatcttggctgcactcctactgagaagcttagagctgatcacagtttacaagatgtaagatcaaaactttttccattcaaaagaaagaagattaaggcagaagaagttccatctcctatttcgctccccactaaaaggaaagaaaggtctatctcttcactagttgtcaatacacctaaagtaaaaccaacaggcttgactggacggcgaacaagagcagttgccaggaaagctgcagctgctgctgctttgcgtggccttggtccaattgtagatcctgtgaaaaaggaaattgatagttgcgacagtaattctcagagttcaagtctgcctgctaattcaagcaaagcaccgcaaacaagaagacagatactatcaaatgcggaggcatctaaccactcctccaataaagataccgagggtgatagtaaggagttggcagataaggctgagctttggcagcctttgaattgtttagtagaagctgcgaacaggacaaagtcatttaggtcaagttcacagaatccaattgttaagggagagcaacttaatggctctccgagtagcacatatgctagcaaaacaaaggcaagggagaatctgcagaggtccaaaattgaggatgataagaaggatgttcccatgccaacgatactgccaaaaaggagaggtcaaggtactgctcggaggaggagagaacttcaagctccagcagctgcaaagcctgatgctgcagctgcacagaatgaaaagaagttcagttccatatggttttcattggttgcctcgtttgaccagcaaggagatccacctttaccacagataccttcccattatttgcgaataaaagatggaaatgtacccgcttcatctatccaaaagtaccttatgcagaagctcagtcttccaagtgagtctgaggtggagataaagtgttgcgagcagccagtgaaccctatgcaacctctgcgcaatttagtagagctgtggctgaagggaaaagcgacacaggcaactcagaccatgactggctcctccgcgaaagagtttgtaatggtgctgacatacggacggccaaaggcccctggattgtgaaggcaccatgcaaaaattcaactcattttccccctgaggcagccatagccagccatttattggcctttcaagaggtcatcgaagataaagtctccctggcagcctcacaatatgcagtgggtggctcacccgggagagccaccccttgatgtcacattcatgtattctttgatgttatagtatatgttgttcgattcctttatgatgtcttcttatttattatacatcgatagtggtatagatggaaagtgtgattgatacttgtaggtatcattgatgttttggttggacaaaaatttctatatagagagaaacttgtagcctttgcttgtaagagatgagtagagttgattgcaaagtgcctttcagctgtaccctgaattattgtaacaccaaattgtagcccctgtattcattttgaacctgtcgatggtctaatgtttggattcaaaaaa

SEQ ID NO: 35892 - DNA, 392 bp, Setaria italica
  Peptide Sequence Number=SeqID_101866
attgactcaaaaaaaatgtagcgacgatatgattggtatattcactgcatcctccaggatgtcgtcgaggctccagagctgggtggtggtctccggcgagacgccgtcggagaagccctgcacccagccggtgaggtcctgcagcggcaggtcggcctggaactggaacagctggtggtggtggtcgccgctgccggcggcggtgagctgctgcagcgcggacgccgtggaccagaactcctggtcctgctgctgcatcgccgcccactcgtcgccgccgccaccgaccggcacggcgtcgcgcgcggtggattcggatgacgtgtgggagctggaggacgaggtggtggtggcggtggtgaccgcgctgcagggggagcggtcgtcatcgt

SEQ ID NO: 35893 - DNA, 991 bp, Setaria italica
  Peptide Sequence Number=SeqID_101867
agttttttttttttttttgtaaaatccattagactgcatttacggtaaataaaggatggttgagcattataatgtaatggtgtttgactagtgcattgcataatagtccgcaagcttggtacatagtctattttcttcagaaccgatgttgaaaagttaagaactgaagttcacagtgaatagttctaaagcaggcgagaatcatggatcttatcctctcagccatgtgttcctgtaggaggagttgtcacgccttgaagcatcatgtggtttgtactccatcaaatagctgtgcggcagcttaaggtgcctcttgatagaatcccttaatgtcatcacagcctggtgatctgatgcgttccgattccaaacacttagaatgtcttcattaaaacggacactgagcacaacaccacaaacatcgtcactaaagtcaagttggtcacctactagcaccagcaccaaatcctcccagaaacgacccgaaacagccttcttgaacctaattatccacttgccaccattctgatttgcagggtcctcccaaaggggccggatgccatccttgaagagatgaaggtcagtggggcttgggagggaagaagggcgcgcgaggtggcagtagcaaacccagaacgattcgacagtgctgaagtcgatgatcttcttgatgttgtcctcgtacgactgcgacctcgccccaggcgtccggcgcgtgtaccagagcatgagcttgcgcctgagggggtggaggccggccttcaggtcgcggttgcggcgctcggtctcctccgaatccgcctcgtcctcctcgacgacggcggcggtagcgtcttccttgcgcgcttgcggtagctgctgctcctcctgctcggcctccttcttctccaccgccggctccatggcgcgcccttctacggcgatttggtcggctgggtgtagtggtgctggtcagaactctccagcaggaagggtcgagagaggatcagga

SEQ ID NO: 35894 - DNA, 452 bp, Setaria italica
  misc_feature (6)..(6): n is a, c, g, or t
  misc_feature (77)..(77): n is a, c, g, or t
  Peptide Sequence Number=SeqID_101868
cattcntaaatcagcttagataagttcagtaatgagtcatgactgctttgcttgcacagacatggtgagagaatganccggggctgcagcttaaatgaatctagttatcacagatgacctgctgagttcttcagagaagttgggcggtaaagactaagcaaagagtgggctatgcggttgcttggggacaagcaacttttcgaggtggtggaagtgtaacacccgtggactcagtctatgaacagcagggcccatgtgtaagataatgtgagggaagtcataaaagccaacagctgctagagagaagggaacgaagaaatcaaatagaagcttattcccttgcttgttcgtcctcggtggcggtggcggcggcagcggcggcggcgatcccatctcacgtcacggcgatctcgtcggcggccacgggagaatttatccggaaccaggaggca

SEQ ID NO: 35895 - DNA, 260 bp, Setaria italica
  misc_feature (224)..(260): n is a, c, g, or t
  Peptide Sequence Number=SeqID_101869
gtgctttccatttcctctgcacatttgtgaaatgtacagcgacatgatggttgttgaattttgcttggtattaggaagtggttaggttttctatgcgccagttgatcccatagaatttgtttgtactgtgtcatgactcatgatccaccacggttgcaattttgagtagtgttgcttcatgtgtcaactgttaagattttttgctttatagttattttgggttnnnnnnnnnnnnnnnnnnnnnnnnnnnnnnnnnnnnn

SEQ ID NO: 35896 - DNA, 197 bp, Setaria italica
  Peptide Sequence Number=SeqID_101870
tatctcagcacataactttacttgttgtttaactagtttacggtgctcctctgctagtgtctgaaacgcaccctcccaaaattgaagtacctcgtcaactttgtagcgccccccttgttctttccaaagaaaattcttttttttatcacatcccacgagaagatccatgattataacgccaagactatatctgtcag

SEQ ID NO: 35897 - DNA, 263 bp, Setaria italica
  Peptide Sequence Number=SeqID_101871
cgcgggcgcagctcctcgtcctgtaccctcgtggtgggagaggctctcatccggaacggcggcggccagaccaggcgccccagcgacgggttggttccccggaccgctgcccagtagcgcgccgtgctctcggcggtgggaccacccaagcgctcggtggcgagccgctccagcgccgcgctgatccgttgcgtcgtcagccggatcgcctcctccattctctgcatccatcgccgcctcctcctcctctgcatccatgcccg

SEQ ID NO: 35898 - DNA, 323 bp, Setaria italica
  Peptide Sequence Number=SeqID_101872
ggttcaactgtcgcggtacatcagcaaaaagctcccctgggtcatctaccatgagctcccgacggccggccacctgttcccggccgccgacgggatgccggacgttatcgtcaggtcgctgctgctcggagatgagtgatcggtacttttcttttcttttcttttctttttttatgagtggtcaatattagtgatgcagctgcaggacgacgtgtactcgccttctgcaccgttgtacagctcgatcgctcgtacaaaaattatggcatgagttgatgacttcagtaataagaatgttgcagatgagattagcttaaaaaaaa

SEQ ID NO: 35899 - DNA, 701 bp, Setaria italica
  Peptide Sequence Number=SeqID_101873
aacaagctgcaatacaggcctcatttcactacagtaatgttgagatcgtggaatcaagacctaacccattggacttgccatcgcaagatgcaattcagattgcaaataacatatcagatcttggccagatatacaacagggaagatatggataccagtagtccagcaagaggccaattacttggagaagatggagtgcgtgtacacagtatggttcttccaggtcttgtttccagcacatcaatcaacttctcaggcccaggagagatgtacaccttgcgacatgatgtcacaaatgttcaatgcctaatgccaggactaattatggcaataagaaaggtggtacggttgaagaacttgatttatggcctagagaagttcttgtagccaacagccatctccgtatcaagaaaaccaaattctggctgttcctgattatgaagtggacaggaacatatctatttccgggcatgagttaaaaaaggcagtaccacaaccacaagcaaggcagatcacatccgacaaggcaaccacaacgccgaacgaaaaataaagcccacacagaagacttgtttttttctatgcacactacctagtggacgaattttgttaaaagaaataggggggaagaccatacacaataaaagtcacaaaaggtgacatgtataacaactggtagcacaaacaaaccaatgaatggag

SEQ ID NO: 35900 - DNA, 367 bp, Setaria italica
  Peptide Sequence Number=SeqID_101874
gtaccggcagctgaagggctgcagtcgagactgacgatggttcttgatcgcctgacgaagttctcggaggcatcactgaagtgctacgaggagctcaagcagaactacgagatagctcacgatgattacaagagagttggaccaaatgctcaacttgcttagccctatgtggatggtggcatgtctttttcatatctgttctggatgacaaattctagtgttttggtatatattttgtggatgatcagattatagtacaatctttggcctaatatttagtgacaatctttatgcctcaaatctttggatttatttttagcctcgcgacctgtctttgatgctggttgggctagtgactgtccttcat

SEQ ID NO: 35901 - DNA, 380 bp, Setaria italica
  Peptide Sequence Number=SeqID_101875
tcgcaagcactgtattcccttcgcagccgccactggcaccatcagcagtgatcgagcagtcctacgccacaccaccatcactggaactgaagctcttcccaggagctgaatctgtcgaagttcacgagcgatcagaagaccaggaggctcccaaccatgtggcacgaccacaggcaaggtacccaccacaatcagcctcgtggccagtaaccttgttttctgggcttccaagaatggaggatgagcaatgcagtagcagcacaaccagcagcagcaaggagactagcacaggtagagactgagtggatcagctccaactccaacaatctaaagagtttctgtttctgagcctattggatgtactgacagcacaagctgtg

SEQ ID NO: 35902 - DNA, 259 bp, Setaria italica
  Peptide Sequence Number=SeqID_101876
ccccgggcgcaggccgacggcgcggaggccgagccggcggaggccgcggcggtggcggagaagccgccgtcgccggtgaggtccaagcgggcgtcgtcccctgcgaagtcccccaaatcgccggctgatggggcggctggcgagaagaagaggtccacgtcgccggcgaagtccaagggtccagctgcggccgcgcaattggatggagcgaaggagaattccccctctccgaagaggtccaaaaccctagcggccaaat

SEQ ID NO: 35903 - DNA, 630 bp, Setaria italica
  Peptide Sequence Number=SeqID_101877
agatgtcgcaaaatctattgtatgcatgataatgtctggcccatgccttacaggatacacacagccaaacattcttgtttgtagacaattaacgactggtatgatcgagacattgatgcaatcaacgagccttatcgccctattccatcgggtgctatatcagaaaatgaggtaattactcagatctgggtgctactgttagcagggcttggattgggtgctttgttagatgtgtgggcagggcacgattttcctattgttttttatcttgctgtgggtggttccttactttcctacatatattcagcaccacctctcaagctcaagcagaatggatgggattgggaactttgctctgggtgcgagttacattagcttgccctggtgggctggccaggcgttatttggaactcttactcctgatatcgttgtcctcacaactttgtacagcatagcaggggtatttcttctccatttattgttccctttcttttgctcattataccgtcatgatgcttcactgttttcttgattacgtagctagggattgccattgtaaacgactttaagagcatttgaaggggatagaggctctgggtcttcagtcactccctgttgcttttggaatgg

SEQ ID NO: 35904 - DNA, 1575 bp, Setaria italica
  Peptide Sequence Number=SeqID_101878
ctcctacagccgctgcctcttcggctccttccccatggccgccgccctcctcctcgccgcctccacctcgtcctcctcctccgccgccttccggccccctctccgcctccgctctcccacacaccctcctcatccccgcctcatccgcactgggaggcggccgttcccggtggtccgcgcggccgagaccgacgccaccaaagacgcgaagcccaaggccccggagaaggcgccggcggcggacggctccagcttcaaccagctgctcggcatcaaaggcgccaagcaggagaccgacatttggaagatacgtcttcaacttactaagccagtgacatggcctccgcttgtctggggagttctctgtggagcagctgcctctggaaatttccattggacagttgaagatgtcgcaaaatctattgtatgcatgataatgtctggcccatgccttacaggatacacacagacaattaacgactggtatgatcgagacattgatgcaatcaacgagccttatcgccctattccatcgggtgctatatcagaaaatgaggtaattactcagatctgggtgctactgttagcagggcttggattgggtgctttgttagatgtgtgggcagggcacgattttcctattgttttttatcttgctgtgggtggttccttactttcctacatatattcagcaccacctctcaagctcaagcagaatggatggattgggaactttgctctgggtgcgagttacattagcttgccctggtgggctggccaggcgttatttggaactcttactcctgatatcgttgtcctcacaactttgtacagcatagcagggctagggattgccattgtaaacgactttaagagcattgaaggggatagagctctgggtcttcagtcactccctgttgcttttggaatggaaactgcaaaatggatatgcgttggagcaattgacatcactcaactatctgttgcaggctacctattgagcactgggaagctatattacgccctggcgctgcttggactaacaatccctcaagtggttttccagttccagtacttcctgaaggaccctgttaagtatgatgtcaaatatcaggcaagcgcgcagccgttcttcgtattgggcctgctggtgacggccctggcgaccagccactgatgaaagcatccaacgtagactggatccgcagagcttcgtgggaagaagcagattgttcaggtgtgatgaaatataaggtttcagcgtctctgtatatcacgatgtgctagctccttgtgagcaggtaggatcgtccttctggaacagaaaaaaagaaaaggaaaaatcagttttgtaaggtttatgtgatgcagcagccatgctggtgatggaaggattagcgacatcgcctgttgttgtagtaggttcagtagatacacgataagacgcttgagaatgctgtgccattgccagctgctcaaccggctgcagctctgcaaggctttgaacgaacagttttgcgatgaaatccagcatgactattgtctacactctatctgatttcgcttcagagagag

SEQ ID NO: 35905 - DNA, 1827 bp, Setaria italica
  misc_feature (1188)..(1188): n is a, c, g, or t
  misc_feature (1807)..(1827): n is a, c, g, or t
  Peptide Sequence Number=SeqID_101879
tggagtacgatacgactacagagcttacactgagtgcaaacctaaacccctgagcctgctctgtacaatggtggcatcctccgttgggcgagcaaaataactgatttcagaacagaggacgaggggaactactctccagcatttgtgctctacaacatgtcggcggcaatcgcatacagcttctcctgttgggtgaaaatcgaaggaccagcaactgcacatgtgaaggcaaagatactgaccctagaaaacgcagcatcaaaatgcattggcacagctctcgtgcgaaatgactgctggtctttcctcaaaggtggttttgctctcaactcctcgtctcaaacctcggtcctctatttccagacagcaagcccaaacgcttcgacgatctcaatcagaagcgcctccttgcaaccattctcacctgatcaatggaatcagcacagggaggaccgtattcagctgattcggaagcgtttcgtcaacgtccatgtctccaacgccaacggcagccgtgtcgttggggcgaatgtttccgtgcatcagatcgcccgagatttcccctttggctctgccatcagcaagagtatccttgggaacaagccgtatcaggactggttcaacaagcggtttaacgcggcggtgttcgagaacgagctcaagtggtacgccacggagccgtccccggggaaggaggactacacggtggcggaccagctgctgcagttcgtgcagtccaacgacgtgatggcgcgcgggcacaacatcttctgggaggaccccaagtacacgccggcgtgggtgaagaacctgaccggctcggagctccgcgccgcggtggccggccggatcgagagcctgctgtcccggtacaagggcgacttcgtgcactgggacgtcagcaacgagatgctgcacttcgacttctacgagaaccgcctcggcggcaacgccaccgccgagttcttcagcacggccaagcgcgcggacccgctggccacgctcttcctcaacgacttcaacgtcgtggaggtctgcgacgacctcagctccagcgccgactcctacgtctcccggctccggcagctcgccgatggcggcgtcaccttcgagggcatcggcctggagggccacttcggcaagcccaacataccctacgtgcgcgctgtgctggacaagctggggacnctgcggcttcccatctggctcaccgagatcgacatcagcagctcgttcgatcagaaaacgcaggccgcatacctggaggaggtgctccgcgaagggttcgcgcacccgtcggtggacggcatcatgctctggacggcgatgggcaggaacgccagctgctaccagatgtgcctgacggacgccaacttcaccaaccttcccgccggagacgttgtcgacaggctcctcgaggagtggcagaccagggaggtgctgggcgccaccaatgaccgcggctccttcaacttcagcgcgttcctgggcgagtacaagctctccgtcacctaccagaacctcacttccgagggcaccttctccctggctcgcagcgacgacaccaagcacattaacgtccgtctacaaggacctgcagcctgaggaaattaaaggaggcgaatccacgcactgctcctcgctgctgtgggcgttattattactgtggtattatatatgaactggtaattggtacttggatcgaattaaaagtgcgtgttttgagtaattctaggactgaatgatgcgaatattgaggacagcagattgatcaaggagaattaagcaatactagtcatcgataacnnnnnnnnnnnnnnnnnnnnn

SEQ ID NO: 35906 - DNA, 346 bp, Setaria italica
  misc_feature (342)..(342): n is a, c, g, or t
  Peptide Sequence Number=SeqID_101880
tttttttttttttacttttatttttatttttatttttattttggtttttcgtttatttcttagttaccctaaaattcaacttaaactaaaactagttgtctatttcggttattcttctggtttcaacctacacatagcttcggtacaatagtgcgcaccctcttactctcagcactgctttactttattgtaacgctggggaggccaaggcctccactctcctacagaatgacctacggaaacgccgcaataatatgtttttgcacaatactgaatatgcagtctattgattccaatcctcgatctccaaagattcaccatttctacttgtctgatgaactntcag

SEQ ID NO: 35907 - DNA, 461 bp, Setaria italica
  Peptide Sequence Number=SeqID_101881
ctgaccaacagcagcacaagcctttccatccagctccatctgtggcttttgcagatcagcaaagctgctattgacaagcttccggtacttgagcctctgcctccccacaccaacagcacctgaggtgaccataatcacctcgtatccaagggtgttcagttccttcacctgctcgcaaagagctccaagcctacccaaagccaatcgcccatcgtgtctggtgacaactgcagtgcccaccttgatgatgacgcgtttcacgtccttcatgaagctccggttccggtccgcggtcgccatggccggcggcagcgcttctagctcgacgccgctcctggtcctccgtctcccctccctgtcaacttctccctctcttatccagtttttttccggagggggagctctctctcgccgcctcttcgccgcaatcgcgaggagggcggaggagagagagaggagcg

SEQ ID NO: 35908 - DNA, 261 bp, Setaria italica
  Peptide Sequence Number=SeqID_101882
atcctgggcgaggtggtgaccagctcgatgacggcgacgcaggatcccgtggcgggttcgaggatgggcagcgcgagggcggcctggatgtcgtagatgagcgcgtagctgatgcgcgcgtactcgccggtgccgtagtactgcacgttgggcgtccactctggcgcgccggcgtcgaacacccgccccggcaggccgcgctccccgggcacgccggcgccgccgacggggaaggcgtgcgtcagcgagacggtccggtac

SEQ ID NO: 35909 - DNA, 317 bp, Setaria italica
  Peptide Sequence Number=SeqID_101883
atctgcctagttttgactggagtcttagaagcccacagaaagattttggttatcattttttctatgttaagcatgtgaattttccttggataacttaaactgattggaaatgaacatgcttgcttgtttagaatatgtttatttcttcaaaacattagcagggctgattgttatggctggatgtgttgagactttggaggcaatgcagttgcattcaaacaattaaacaggctttgtgtgtatccctgtttagttgttattgtccctctgctcatttcatctcatatattaaagtaatttaatggaacttttttaca

SEQ ID NO: 35910 - DNA, 192 bp, Setaria italica
  Peptide Sequence Number=SeqID_101884
agtacacgatggagcacatacctgacgcagctcaagaaggagatggccgcgccgcacaacgtgtctcagctccagccaccggaagggaccttcttcttcctcgcccatgatgaccagggaaattagcagctgtggccttcccctacatatatatatgcattctgctgtgtggtgccatccttccaaaaaaaa

SEQ ID NO: 35911 - DNA, 289 bp, Setaria italica
  Peptide Sequence Number=SeqID_101885
agttactgctccgcctgttgcaggtcgcattcacccacccaccgcccctctgcctgtgaagctacgcctgaggtgaccggcgcgcggcgcaacgcggccgccattactccctaggacgcaagatgggtgctggtaaggccgccgtattggtggagaaaggagaagcattcaagtccgacgcagcggccccaggcaaatcgaggtgcgccacatccacggcgactctgctccgctcgcccatagcactctgctccacccccagccaccacgcccctcccaagtctacgcg

SEQ ID NO: 35912 - DNA, 196 bp, Setaria italica
  Peptide Sequence Number=SeqID_101886
gctctgtagctgcagtgaaaaggatggacaaggtttcaagacctccctttccaataactgtgctgaaattatccgttgctttcattgtttctttgtagctatacctttggaacattggtgattggccttcagggtacctccaggattgattgtggtgaaatgtgttatcttgattctgaacaggaaattcagcatt

SEQ ID NO: 35913 - DNA, 216 bp, Setaria italica
  Peptide Sequence Number=SeqID_101887
ggcgcagatgttcggcagcggcacagcgtacgtgacgcagcacgccagcaaggacgacgacggcatcaccgtgcagttcgcgctggagcccgagtacctgcagtgcttcgagaaggtgttctacggggagtgagatcacctttgttgtcttgttaacgtgtgtttgggtttgtaccgactgttctgagtgcttaatatttgaatttggagttcgac

SEQ ID NO: 35914 - DNA, 1156 bp, Setaria italica
  Peptide Sequence Number=SeqID_101888
tggcatgacagcatcatagtatttcttgaagtgctcctgtgatgaatctgccactgaagctagggctgtcaatgctccctcttgcaccatttgcttgccattctgaagaaggacaagtaatttgttgacgattccatccaggtaaggtgtcaaaatttccggtgtacagttctcactgaagttcaggatcgcagatgcagcatgtgcctgaactcgtgggttctggaaatcatccatagcgttcgccaatgcaggcaacactttctggtggtaatgaacttgcaagtctgggcccaaatccgtagagagctgaccaatggcattgattgcagcccatctcacacgtgggtgaggatgttggaacccattcaatatcatcgagacaacttgttccaaatttttaagcataacctttgcacatccttccgcaatctgtgcgagtgttatgagcgcagcatggtgcttctgccactcaggagcagacaggtactgtggaagcagctcagatgcaattggcacaattgcatttccaccaatggcgatggcaaggcggtcaaggcactcctgtgccactccatagttgttcccttcacctgcatcctcatcttcggtttcagcagagtgccaagcagggtcatcctcgacatcaagcagcatctgcattagcactgcaaacagcctgccgacaaactgcgggagtcgacgcatcattcccggtgcacgctcccttgcctcagcaagagtaatgacaaactcaaccgccaagtgcctggtcccatcttccagctgtgcagcctcagcaacttgtagcattgctcccaccacgtccgcaatctgcctccgtaggaaccttggctctgcgccagccagctcaacgagcagctccagcgcctcctgcgccgaggcctcctggccagagttcaggcaatccgtgagcgccctcatcatagccgggagcaaatcctgcatcttatcccgatcggcgttggttggcaggcactggacgaggttgactgcggcacccagggccgcaatacgcacatcaggggatgtggggtgcgccagagcggcggcgagcaggttgtggatagtcatcagatggtcgaggagcgattcagcgatgtaatccgccagcctcgcgaagataagcagcgcc

SEQ ID NO: 35915 - DNA, 572 bp, Setaria italica
  Peptide Sequence Number=SeqID_101889
gccacaagaaaaaaaattctctgtttaacttattataaagtttgtcacagcatgacacacaaaagaaacgaattacactaactaattcaccacaatgctcagagtcatgcgtggattttgttgttgcattttgctgaaatacaatttctttaagggaataaaaaaatatccctgcatgtatgcacacaaatgtagctcctgtatttcaattgtgaaaagactctatggagctctatcgaatgggcgcgtgtcattgtagcatatattccatacagcttcaattgcatcttttgcagcggcctcggaacagtatgggttgttcttgagagacatcagagcccgccttctgacacaatcttgctcatgaccccttatcttcatgaaaccacgcaacaattcacgtttgtaatggcaatcaccactaaggtgattggctcgaatctcggagcaagcatggtgagcacaattcttccagtccatattcttgccaacgcagtcatcataagcatgaatcatttcatgaataataacctgatttatctcatcttgaagtgtcatgtgactttagtaaa

SEQ ID NO: 35916 - DNA, 286 bp, Setaria italica
  Peptide Sequence Number=SeqID_101890
agcaaaacgaaatttctcacggcctcctcgcggcgaggttcccctccgagatggcggcgccggcggcggacgaggcgtggtgccgggagacggtgccgcgggtgttggagctggtgagcccgcgcctcccgcagcgtgacgtctgcgcgctgctcgccgtcagcccctggtgctaccgcaccctcgtcagcaaccccaggctctgggaggtacttgatatgcgtgagatgaagaacgccggcgaccgacttatttcagcactttctctggcaaggtatcgccatct

SEQ ID NO: 35917 - DNA, 1443 bp, Setaria italica
  misc_feature (1398)..(1443): n is a, c, g, or t
  Peptide Sequence Number=SeqID_101891
tcagcaaccaatgacgcagcatcgtctggagctctacaacatatgaactctagcgccaatatgactggaatgccagagatggcaattacaacagcaaacaatgacaatgcatcttttcaatcagctgagccatctcagaggtatcaagtcaatgctcctgttgataagcctgctgatgatggctacaactggcggaaatatggtcaaaaggtggtgaagggcagtgattgcccaaggagctattacaaatgtactcatcccaattgtccagtcaagaaaaaggtagagcatgcagaagatggtcaaatatctgagatcatatacaaaggaaaacacaatcaccaacgtccaccaaataagcgggcaaaagatggcaactcttcagcagctgatcaaaatgaacaatctaatgataccacttctggattgtcaggcgccaagagagatcaggacgctatatatgggatgtctgaacaggtatctggtttaagtgatggagatgatatggatgatggtgaatcaaggccacatgaagtggacgacgctgataatgagagcaaaagaagaaatatacaaatttcttcacaaagaaccttgtcggagcctaagattattgtgcaaacaactagtgaggttgatcttttggatgatggttatagatggcgcaagtatgggcagaaggtagtcaaaggaaaccctcatccaaggagttactacaagtgcacattcgctggatgcaatgttaggaagcacatcgaaagagcatcgtcagaccctaaggctgtcataacaacctatgaaggaaaacataaccatgaaccaccggttggtaggggcagcaaccagaatgcaggagtgtcacaacagagagggcagaacagcatatctagtaatcaagcttcactttcgatagcagactacagcatcactaaccagaggccaattgggctattacaattcaagagtgaacaatagtaactgccattttgactctgttcggaaccttgctgtgttatttggatgttcttttggaaaatatcaggtgcctgcaattcgtacagtcatatggcatcaaaggttcataaagtttgataattcaatggtatcagtttgcagttttagatacccaggatagctgatacagcaccatcctttctagtttgtacatgttcttaagtggaagcatgcaaaatgtaataccaggtgcttatacatgtttatgatggtttatagatggatcaatggtatacatgtatatcttaagattttattccaacaagatcttgtatgtattgtaataagattgaaaagagaggtgaatgtacagatgtttttcagttaagctttcttgttataatttgcaaaattttatcagaagaaccaaaaaaaaaaaaaaannnnnnnnnnnnnnnnnnnnnnnnnnnnnnnnnnnnnnnnnnnnnn

SEQ ID NO: 35918 - DNA, 277 bp, Setaria italica
  Peptide Sequence Number=SeqID_101892
gtggtggtatacgcgtgctgttccattgatgcttctctctcttcttttcttttttgttttctttgaaataagcattggtgcttcattttctccccgatcttcagaacagatggtcacacacacacagtgaactgaactaactctgcggctttccatctctgtcgtccccaaaatgccccttatcttttcctaatgcgccctcgaaagatcaaaacttttttggtcttttcttcgccctgggtgggggcgctgggccccactgctcaccttgatatag

SEQ ID NO: 35919 - DNA, 324 bp, Setaria italica
  Peptide Sequence Number=SeqID_101893
tacctgggtctcgtggtccatgctcctgagctgccactccaagcccgtcggcgagaggagcgggaagtcggcgccgtcacccggcgcgggggcaccgaaccagtagggcgtcatgggctccggcccggcctgaaggccctcggtttcctgcagcgccagcggcggcgagctctgctcctgaccggcgtcggcgtgcccgggttcaggctgcagctgtagctgctgccgcagctgctccgcgccggggtgcgcggcctgggcgcaggtgtgcgcgccgtggtacacgacgtcgtagagcagcgggtcgccggcggcgcgctgcac

SEQ ID NO: 35920 - DNA, 227 bp, Setaria italica
  Peptide Sequence Number=SeqID_101894
aggcccggagcgcgccaccgcagccgccgtcgcgggcgtcgtcaaaggcgggagcccggggcggccttctgcggcaccgcgtggggcgcgtcgtcgcgagtcatggacgcggcagtgttggccggcgagagggaatcgtctgcttctccggctataatcagttggacggcggtgtccgtgcgggtggctgtgggctgtgccgaggagacggcaggagcagtctgcgg

SEQ ID NO: 35921 - DNA, 337 bp, Setaria italica
  Peptide Sequence Number=SeqID_101895
ctagctgcctgtttgttggatccatcacctgccaaaaggccaaatataaaaccagccatggctcatcccaacaacgagggaagctcagccgagagccacattgatgatcttgtgtccaaacttccaccaaaagaaggcttggtgctctacaagaactattggctgtggccacagaccgccaaaaacatcatgctcctccaagacatcttcaagcctcgccacgacgatatcatcctcgccacaaaccccaagtgtggcaccacatggctcaaggcacttgccttcactatcaccacccgccaccgttacaacttccatgaccacccgctcctcaccc

SEQ ID NO: 35922 - DNA, 262 bp, Setaria italica
  Peptide Sequence Number=SeqID_101896
gcggcggcgtcgggggatgcggaggcgaggatggagaggaatcgccgggactatgaggaggcggagtagtggtaggaacagccggaggagaaggtggagctggtgctgggtgctctggcgagagggatccatcacgggagggttgctgcgaagggggagaagaaggcgcgacgggatcggccgccggcgggggcgggggcggtcggattggtgaggccatcggaggagtgggtgcggcatggagtcttcgggtttgggtcag

SEQ ID NO: 35923 - DNA, 1025 bp, Setaria italica
  Peptide Sequence Number=SeqID_101897
cggagtacggcagcgaaagcccagagtcggaaggtggggagaagtgtgatcaaggaaatgggacacatatcatctgacagtgaagtgcccttgaaatattcttccggcaaagctttccctctaggagtgtcgcaagttgaagttgggctgaattttgcgatattctcacagcatgcttcttctgtcaccctttgtctgaaacttcctgagagaggcacccaagatgatgtgcaagttgtcgagtttgctttagatctccaaaagaacaaaactggagatatatggcatgtgtcggtggagggtttgcctgcttctggtgttctttatgggtatcgcattaatggtcctcaaggctggcaacaaggtcataggtttgatgacagagttattcttctggacccttatgcaaaattagtttctggtcgaaagtactttggggttgaagaagagaagccaagtcagctgttcggaacatatgattttgatagctctccttttgactggggtgacgattataagcttcctaatttacctgagacagatcttgttatatatgaaatgaatgtccgcgctttcaccgcggacgagtcaagcaggattggtccagctgttcgtggaagttacctaggtgtcattgacaaaattcctcatttgctggaacttggcgttaatgcagtggaactactccctgtttttgagtttgatgagctcgagttcaagaggtacgctaacccaagggaccacatggtaaatacatggggctactctacaattaactttttcgcacccatgagtcgttatgctagtgctggtggtggacctgtggctgcttgcaaagagctcaagcagatggtcaaagcattacacaatgctggaattgaggttattctggacgttgtttacaaccatacaaatgaagctgatgatgctaacccttacatgacttctttccgtggcattgataacaaggtgtattacatgttagatctaaacaacaatgctgagctgctgaacttctcgggttt

SEQ ID NO: 35924 - DNA, 592 bp, Setaria italica
  Peptide Sequence Number=SeqID_101898
acatggacgacgtcatctccctcgtcctcggcagcttcatcctcgcgctcgccatcgagcactacagcatccaccgacgcctcgccctcaacgtacgcccgcgcgctctcgcctttgccgattaaacgactgagagcatgtctgcaactctgcatccggaccaagaaaaaaagaactaactctgttgtgaattgtgatgtcgctcgttccgacgcgcagatcacggcgctgttctgcggggacccggtgaagccgcacctgctgctgctgggcatctgcggcaccaccatgttcatcagcatgtggatccacaacacggcatgcaccgtgatgatgatgccggtgtccacggggatcctgcagcggctcccccgcgacgaactggagggaggctcggatgcacgcgaggtccagcggttttccaaggcggtggtgctcggcgtcgtgtacgcctctgcgatcggcgggatcgccacgctgacgggcacgggcgtgaacatcatcctggtggggatgtggtccacctacttcccggagcagcgccccaatacaaccttacaagactacctaggaatagtaccttacgggacta

SEQ ID NO: 35925 - DNA, 323 bp, Setaria italica
  Peptide Sequence Number=SeqID_101899
cattgggtaatcaaccgaactctcgcccctacatgattaatgatttcagaccgagcggtgtaacagattatgaactcactcctttgtttttcttggtgtgatgcaggctctctggtttttggcatggcttagaagttgtaggaacttgcacaggatacagtcggatgttttggaacatttcaatcgtagactggaggttttcaaaacgcggacagtctagtcatagtagtatgtctaagctgtacagttcgtttacggccattaccccatgaaggatacgggatcgtattcattgttcatctatgagttattaggaactgatt

SEQ ID NO: 35926 - DNA, 310 bp, Setaria italica
  misc_feature (298)..(298): n is a, c, g, or t
  Peptide Sequence Number=SeqID_101900
ttaagaacaaagaaagaaaagaaataaggttttaaggaccgtactttaggggtactacaattagttactaataggaatgaacaccaggagtctgacagacgacatccctgggtgggcagtcctattcgatggcaaagttggggatggaaccgtcaccatcatgatggctacgctactgttcatcatcccgagcggcaagaacgacgtcgagaagctaatggactggggcaagtgccggaagctgcagtggcacatcatcctgctccctcctcggcgatggcgaagcccgcgccgaggngcaggatgatgt

SEQ ID NO: 35927 - DNA, 532 bp, Setaria italica
  misc_feature (513)..(532): n is a, c, g, or t
  Peptide Sequence Number=SeqID_101901
gcctactggatcaccgtcaaacgtctttgggttcagtactggccacattaccatcaaggatcttgtaactaccgggctacccctgaagattgtcggaatcgcatctctgacaatcttgctgccaagtttaggatcacagatttttggcacaaacagcaggtcctaggagcacgaatgcaaattttgggttgttcatctctcctggtccagtagtctatttgtacagtagtttccttatgtcacatttgtctcctagttgaggctatggggtaatattctctgatttgtataagagtaagttatactccctccatttcaaattgtaggtcgttttggcttttgtaggttcgtagatgtcgctatgcacttagatatatactaggtttagattcgtaacaaaatttatgaacctaataatgtcaaaacgacctgcattttggaggggagggagtaagtattaagatttgtatgcagccactgtgtgaatatagttgaaatgcgccgatttgatcnnnnnnnnnnnnnnnnnnnn

SEQ ID NO: 35928 - DNA, 269 bp, Setaria italica
  Peptide Sequence Number=SeqID_101902
taaacctaacgaaacaaaggaaagaaccaaacctaacagcactgggaagactacgcggcttgctgggtccgatggcatttgcagagaagatggttttggccgtctttgggggtctcattgttctatggatgaccaggagtctgacagacgacatccctgggtgggcagtcctattcgatggcaaagttggggatggaaccgtcaccatggcaacttgcacgctaatgcatgtgtgcagatcatgatggctacgctactgttcatcatcc

SEQ ID NO: 35929 - DNA, 641 bp, Setaria italica
  misc_feature (541)..(541): n is a, c, g, or t
  Peptide Sequence Number=SeqID_101903
gacgcctcgccctcaacatcacggcgctgttctgcggggacccgggtgaagccgcacctgctgctgctgggcatctgcggcaccaccatgttcatcagcatgtggatccacaacacggcatgcaccgtgatgatgatgccggtggccacggggatcctgcagcggctcccccgcgacgaactggagggaggctcggatgcacgcgaggtccagcggttttccaaggcggtggtgctcggcgtcgtgtacgcctcggcgatcggcgggatcgccacgctgacgggcacgggcgtgaacatcatcctggtggggatgtggtccacctacttcccggagcagcgccccatcaccttcagctcctggatgtccttcgggctccccatttcactggtcctgttcgtggcgctctgggccacgctctgcctgatgtactgctccaagaacaccggcaaggcactctctgcttacctggacagaagccatctgagaagagagctcagcttgttaggtaactacttctgttcctaaacttttttttggngtttgtataaagttttcctttattttactcgatagagaggcagcatatttactagaacattgactgtcactgtaaaaaaatagtaattgctagttgaacg

SEQ ID NO: 35930 - DNA, 2171 bp, Setaria italica
  misc_feature (2129)..(2171): n is a, c, g, or t
  Peptide Sequence Number=SeqID_101904
gtgcagtgcggttagtattgtaagcgttacctgacgtggctcaacgtggagcaccttcttcttcttggaccttctccctcaccctgtcacccaacgactcaaatcattgttcttttttgggggggggggggtaaagattgtgaccatttcgcctacgtgcaaatggccagatgatgatctctcgcagccccaacagtttttatgtttcttttgtgttccccagcctataaaaccaggcaagcttttcggacgccacacttcatcaacaagcacacgcacggttttgttcagctgccgattccttggaccatggatccgcggcgcgcctgctgggagagctcgtccgaggacgtcacgagggcgctgctgccggtgcacgacgacaggcccacgaggggacggtcctgcgcgggtctcagggcgatgctcgccaacaagtacctggccgtggcgtcggggccggcggcgtgcgcgctcatctgtgctctcggggacctcggcgggcaccccgcggcgcgcaacatgctcggcgtgctggcctgggtgttcctgtggtggatcacggacgccgtgccgctcgccgtcgcgtccatggcgccgctgttcctgttcccggcgttcggcatctcctcctccgacgccgtcgccaaggcctacatggacgacgtcatctccctcgtcctcggcagcttcatcctcgcgctcgccatcgagcactacagcatccaccgacgcctcgccctcaacatcacggcgctgttctgcggggacccggtgaagccgcacctgctgctgctgggcatctgcggcaccaccatgttcatcagcatgtggatccacaacacggcgtgcacggtcatgatgatgccggtggcgacggggatcctgcagaggctgccgcggggcggcgccggggcgcccgggtgccaggaggaggaggaggaggaggtgcggcggttctccaaggcggtggtgctcggcgtggtgtacgcgtcggcgatcggggggatggcgacgctgacgggcaccggcgtcaacatcatcctggtcgggatgtggtccacatacttcccggaccaggagcccatcaccttcagttcatggatgtccttcgggctgcccatggcgctcatcatgttcgtggcgctctgggccacgctctgcctgatgtactgctccaagaacaccggcagggcgctctccgcatacctcgacaggagccacctcagaagggagctcggcttgctgggtccgatggcatttgcagagaagatggttttggccgtctttgggggtctcattgttctatggatgaccaggagtctgacagacgacatccctgggtgggcagtcctattcgatggcaaagttggggatggaaccgtcaccatcatgatggctacgctactgttcatcatcccgagcggcaagaacgacgtcgagaagctaatggactggggcaagtgccggaagctgcagtggcacatcatcctgctcctcggcgcaggcttcgccattgctgacggcttcagctcaagtggcctgactgatatcctctctgacgggctcaggttcctgaaggacgcgcagacggtggtcatcgttcctgtggcctgcgttgttgctgctgtcatcacagagttcacgtctgatgatgcaaccacgacgctggtgttgcctctgttcgcggagttggcgaagtctatcaatgtgcacccggtgttgcttatgatttctggagcagttggggctcagctatcatacttgttgcctactggatcaccgtcaaacgtcgttgggttcagtactggccacattaccatcaaggatcttgtaactaccgggctacccctgaagattgtcggaatcgcatctctgacaatcttgctgccaagtttaggatcacagatttttggcacaaacagcaggtcctaggagcacgaatgcaaattttgggttgttcatctctcctggtccagtagtctatttgtacagtagtttccttatgtcacatttgtctcctagttgaggctatggggtaatattctctgatttgtataagagtaagtattaagatttgtatgcagccactgtgtgaatatagttgaaatgcgccgatttgataaccnnnnnnnnnnnnnnnnnnnnnnnnnnnnnnnnnnnnnnnnnnn

SEQ ID NO: 35931 - DNA, 312 bp, Setaria italica
  Peptide Sequence Number=SeqID_101905
gtggaccgcaaggacggcagcacaagagggcaggatcaagcttcaccggagaacgaggaggaggaaaaggctaagcagttggagaagaggcgcaagcggctgctcctcttcgcgatcttggcggccaccatcacctaccaagccggcctgaccccgccgagcggcttcctgctcaaggacgatcaagcaaccgggcacctcgccggcgaccccgtgctgctcaacaactacccgcgccgttacacggcattcttctactgcaactcggtgagcttcatgctgtccatcgcgctcattatcgtcctcgtaaac

SEQ ID NO: 35932 - DNA, 445 bp, Setaria italica
  Peptide Sequence Number=SeqID_101906
gctttgggctgctcgatatacttcatagtgcttaaatatggaacaatgatattatgaagattaaaaatgtaacataattattttaacatctattctttatcttgaaacaacgtcactattgtaaaacttacatcataatcctcggggagcacctcttgtcctgtcaatatctcttttattataacaccgagactatatatatccgacttgaacgtgattattccactgtgaatttccggtggtaaataacctctggttggaaatttatatagtcaaataattgaaaggaaataagagaatgtgatatactccttccataccaaattgtaggtcgttttgacttttctaaatttataaatattattatgcatctagatacaatgtatgtctagatgcataataatatctataaactagaaaaactaaaatgacctacaatttgaaa

SEQ ID NO: 35933 - DNA, 428 bp, Setaria italica
  Peptide Sequence Number=SeqID_101907
cctgggatgcttgaaagaaataatctttgataaaagaaaaaagagatgaaaagaaaccaatactccttctgtttcaaattgtaggtcgttttagcttttctaagtttatagatattattatgcatctagacatacactgtatctagatgcatgataatatctatgcacctagaaaagccaaaacgatctataatttgaaatggagggagtacaatcgtaccggtaatttgatcacggagactccctttagctacatattcaaagcaaagcaatctttgttgtacatctgccatgacaagctttccgttgaagctttccattttcccttgtgtattagcacaatatccaagaaacgtactatatttttgtgctttcactttcatcatacattcaatctcttgatggaatttcttctcatgcatatacgt

SEQ ID NO: 35934 - DNA, 682 bp, Setaria italica
  Peptide Sequence Number=SeqID_101908
atactccttcctgtcaatatctcttttattataacaccgagactatatatatccgacttgaacgtgattattccactgtgaatttccggtggtaaataacctagtgatccccaaatatttgaagtaatagcccagctttgcttttcatcaaagcaccttgagagaccaaagtcagcaattttcggcaccatatcataatctagcagtatattagcaggtttcagatctgagtgtacaatacgattccgatgaagataattcaaacctatgcagattcctttgattatttcatagcgttgcctccattcaagtccactggatgcatcggtaatttgatcacggagactccctttagctacatattcaaagcaaagcaatctttgttgtacatctgccatgacaagctttccgttgaagctttccattttcccttgtgtatttgcacaatatccaagaaaacgtactatattttttgtgcttcactttcatcatacattcaatctcttgatggaatttcttctcatgcatatacgtatgggacaatttcttaacagcaatcgttccgctccgaatcattcccttgtataccaccgcaaacccacccctgccaatttccttatcagctgaagaaaattaatttagtaaatagtacttaccaaaaagtagaacaaataggacaaga

SEQ ID NO: 35935 - DNA, 300 bp, Setaria italica
  Peptide Sequence Number=SeqID_101909
cagcggcggccgggcagcagcaggacgatgagctggaggcgatcgtggagctcccgcggctcgacgaggacgccgcggagctcgtgacgacggtgacggcgttcggcgccgcgccgttctctttccacgacgtggcgacgccggcgtcgtggtgcgacccggtgtgggtcgacgacgcctccggctacgtggcggcggcgcacgacgacctcttcgggttcgtcgacggcgatcacggctgggcccagtcggtcggtgccctcctgtggaacatgtgattgctggccggtctgctaatca

SEQ ID NO: 35936 - DNA, 268 bp, Setaria italica
  Peptide Sequence Number=SeqID_101910
taattctttggggtaaaaacgtgggaaggcgccgggaaatccttcatgcgccagaaggtgacgtcactgtggcagaccgacgtgcagacgacccgtatccggacctcgtacgccttgggcgggtcgacgacgatctcctcgatggccagcggctccccggcggccctgcacacggccgctttgcatcggatgggcttggggccatggttctccatggaagaagactcgctggtgtggcgaccctgttgatgcgttccaaaggcgcgcg

SEQ ID NO: 35937 - DNA, 177 bp, Setaria italica
  Peptide Sequence Number=SeqID_101911
agtcgagtggcaatttcaggtgtagtttctgctaacttgaggggtaattttgtacgagcacatgcataggcagggagggagccgcggggagctggtttttcgggctccggctccgtctccagatttgtgaacggattttgcgggggcttcttccggcttccccacagaagccatttc

SEQ ID NO: 35938 - DNA, 686 bp, Setaria italica
  Peptide Sequence Number=SeqID_101912
ggaaaaataattagaattggaagacggtgttgtatgcgaggaagggacactggagagaactggtcgctgtgagagtgtcttgtccaatgctggatccgtagatgttaaacttgccgacataaagaaggaacttatggatgattcagctgcaagcaaggttaaaaagacgaagaaaaacagatttgaatgtaatattgattattgccagatgacattcaagacaaaaactgagctttctgttcacaagaagaacatgtgcactgtcaagtcatgcagcagacagttcagatcccacaggtacctgagacgccaccagagtgttcacaatgatgatatgccttacaagtgcccatgggatggttgtggtatggctttcaagtggtcatgggatcggactgagcatttcaaggtccatgctggggtgaagccttataaatgcacgactcctgggtgcaacaaaatatataagtttgtttcagacttcacccggcacaggaggaggtgcaaacctcagaggtaaaagcttgcttgatactacagaattaggatagtagtgaagtttgtgcttgctactgtagatgtctttattcatttgctaggagatcttcgcgcaactgttctgacaacttacagtgcgaatattatcaactagcctccacaaatgtacacagatagtttgagatact

SEQ ID NO: 35939 - DNA, 845 bp, Setaria italica
  Peptide Sequence Number=SeqID_101913
tgaacagcatgtagttcatatttcacagcagccactaagcaattgctaacaaagacagtatgtccgaactctaaacatgattccagtactaactgctcagctcttgttacatcctccgaatttattcatctactaggtgaagacgcttaagtgggcataataatgtcctacggtgaagccgttgaaactgggagttttgttcccaacctgtggagcaaccatggattctggacatctggatcgatgaaagtttttactaggaacggtatagcttcatcaccaatcaattttgcaccaagctacccgttctgacatgctggatcctggaccggagcacctgtactcacagaagcaagcagttcgttcattctcaggtttgtccccattatgccacccagcaggctctatgcagtgatccataaaagtctctgccaaaaacaacccttccgaagggctcccagggccgacctaggtacatgtacgcagcttccccattaccagtaataacacacctagatgatataaatcccatttggtaagctcgttagaagaagtaaaaggaaatggtaaactcacatgctcaaggaaatatcattatcccctgttagtgttatgcaaggtgattcaatttcgaaattggccgataggctcactctagtctctagataatcacgtagcaggtttcctttataaaagttaaaagtgagaatactggtgggtaataaactcacttgaagaatacaaatccagttgattctgaagaggatttccggccatgagcagtaatatatcctgttgatttgcagtggatatggcaatcaaatagactaccaagaaagggacaa

SEQ ID NO: 35940 - DNA, 1673 bp, Setaria italica
  Peptide Sequence Number=SeqID_101914
gaattgtgattgatctttggaagtggaattgagttttcatgcgtctctagcgcgggtaccagcactgatttctctcggtgaacctgtaggatcgcacccaggaggttggtggcgtgaaggctgcacctgatgtgctcgacgttgctatcgtcggtggaggcatggtgggcttggccgttgcttgtgcattgtgtagccaatatgccattgacaaaacatctcagagtcgccattattgatagcaaccctgcattccgaagtcaagaaatcacctgactaaaaacagtatacctgattctagggtcagtactgttactcctgcaaccatttccttcttcaaagatattggtgcatgggagcatgttcaacagcaacggcatgctttctttggtaaaatgcaggtgtgggattacactggacttggatacacaaggtataatgcaagagatgtgggcaaagaataccttggatgtgtggtggagaacaaggtgctttgcaactcactgctcttacgttttcaggaagaattggatgacatcgaaagtgtgatataccctaccagattggtgtcccttactttcccatcgattagcaaacaagcgggaatgaagccaacatcaagtgaaccattatccgcaggtcatgctacagaagagttacatcgcagtaatttagttaaactcgacctcagtgatggaaggactttatattccaaattggtgataggagctgatggttccaagtccaatgttagacagattgcaggcataaaaacaactgggtggaattatccgcaaagtgcaattatctgtacagtggagcatgttgtggaaaatgattgtgcatggcagagatttctcccttctggtccaatcgcactgcttccgataggcaacaacttcagcaacattgtatggacaatgagcccagaggaatcacttcgacataagtcaatgagccctgaagagtttgtgaagtcagtgaaccacgcattggattttggctatggtccgcatcctcgctctagtgctcttgaccattacatggaaaagttcttttctggcattgggaatactgcagcatctacaaaagaatgttttgaagtaccaccaaaagcaactggtgtagtgtctgagagaatggcatttccattgtcattgatgcattcccatgattatgtttcaaaaagactggcattagttggagatgctgctcatacagtccaccccttagccggccaaggcgtcaacttgggctttggtgatgctgctgctttagcaaaagttattgctgaaggagtttctgtgggatcagatgtcggggatctgactttgctacagcggtacgagaaggaccggaaggctgccaatgtggcgatgacagcagtgcttgatggtttccagaagatgtactccgtcgattttggacccctgaatgtagtgagagctgccgcgttccacggtgcccagtacatatcaccgctgaagaggaacatcatctcttatgcaatgggcgacacgaaatggccgatattctcatgaacaatagtacttagaaactctacttctaaacttgtatgatgcacctggtttatagttttggcttgtactggatcactaagaaacattgtactagcggatgcaaagcaacaggcagtcaataattgttttagg

SEQ ID NO: 35941 - DNA, 327 bp, Setaria italica
  Peptide Sequence Number=SeqID_101915
cgcgaaacacacatcagagtatgctgtgaagtcatctacaattctggggctcagccatccgccatactcgtcttcgaggatttgtgggaggtctaggtggtaaatgacagcatgtacctgaataccctctttaactaattcatttatcaaatcgttgtagaactgcagcccttttgggttaatcgctcctctcccattaggaataagtcttgaccaagatatgctgaacctgtaagccttcaggcctatgtctttaattagctttacatcttccttatacttgtgatagccatcacaagcaatatcgccactgcgctcatttggatt

SEQ ID NO: 35942 - DNA, 1784 bp, Setaria italica
  Peptide Sequence Number=SeqID_101916
atgttggggtcggtcccgggcgtcctggggggtccgaggaggaggaggataagggcggcggccgcggaggaggcgcgggagatcgtccgggatatcctcggcgaatttcccgccgtcgccggagagctccgtcagcttctccaaatgatagacagtggtgaaggcattgatatttctggaatctctgacaagccattggtgaagcgcttgaagaaacttttcagatctctgagactgaaagaaagtgcaagtggggcttacctgctgcctccaaaacatgttcctacactcgatattgttggaccattactgttagcaagttctaaacttgcagacaacgaaaatggaaagtcagtatcacctattagagaagaattaccgccgtctaactttgacgtgcaaactaaagataaagatgatactacttctgaagggccgaaaattgttggagtggaggaacctcctaaaagaaggataattggccctgcaatgccatctcgtgaattactggcagcagcagctgaaatgacagaggctcttaggtgccgggatgctgaactggaagctgatgatgatttgctcatagggcccccaccacctgctgtagttgctgaagctgcatctgcaaatgaagctgagcgatttgaagaggttactcgaatattggcagctgatacaaattcgccatatgatattctgggggtaaattggaagatgtcgactgataacatgaagaaaaggtattggaagttgtctctattagtgcacccagacaaatgtcctcatccttcagcacaagaggcatttgtgagattgaacaatgcattcaaagacttacaagacccggataagagaggtgcaatagatgagaagataaaaaagaaagaggagatggaacaatttgagattgagcttaaagcaatgcgtgaggctgcggaatggagacgattacaaggtatatcacttgcgggtgatgaggaacttctagctggtccaaaagaggcacaggcacctaagagagatgaatggatgaccacactgccacctgagagaaaagcaggagtgcctatgcattctactaaatcatttagtatgaatggtaaagaaggacgaggagacacaagtgtctggactgatactcctcttgatagagcgcaaaaagcacaacaaagctatttagaagcctacaataaaacaaaggcgattgcagaaggagatgatgtaaagaacaaaaatccagatgcttcaatcgtagacaaatacaacacctccaaaagatcagtgtctcttgtgcagaaacaccgagagagcaaaaaggagaaaaagaagcaaaagcagcacgagaaagaagaatgggagggaaaccacccttggaagccatgggaccgtgagaatgatctctctgctgggcggcaaaaggttgccttagatccggagaacatgtcacaaggactatcttcccgtttcgcatctggggcggtgcagaggaacttcctgtgagcatggccagataggttacttgcgtccttgtcgtgagctgctaaaaatgccagaggtaaaacacaagtgccaggacagatcatgttgttaagggcagtcatgcggaaaagttggtttttggtatgtatggttgacacgtgcaattcccgttgagaaaatcagttttttagaactgtatatcaacacttacggagctcttatattattatagctgatctttattgaaagatgctaaaatctatatctcatactaacaagcaatctatatatcacattgtttttct

SEQ ID NO: 35943 - DNA, 369 bp, Setaria italica
  Peptide Sequence Number=SeqID_101917
ccgcagcgccgtgacgggggaccgcagcggcgacggcgtcgaccacagcaccgtcccattggggtccgacacggtgatcccctgcgcggtgagattgacggagcccgacgacgtcgtcggcgcggcgcggtttgccgaccagaccaccgtggcggacggggtgtgcaggacggcgaggtagaacctgtcctgctgcttcccggggttggtcacggcggccctgaacgcgcggttcctggactcgaggaacgcgccgccggtgtcgacgtacaggatgctagaggcgacgaggtcggggtacgcgaactccgtcgccagcggccccgcgtccgcggtgcgggcggagaggaggaggaggatcgagggtcg

SEQ ID NO: 35944 - DNA, 316 bp, Setaria italica
  Peptide Sequence Number=SeqID_101918
catcagcggagtgatcccgtcggacatcggcaggctcggttcgctcacgaagctcgttctcggcgggaacaggctcacgggtcagataccgccggagatcggctcgtgctcgcggctccagctcctggacctcggcggcaacgcgctctccggcgcgattcctgcgagcatcggcaagattccggggctggagattgccctcaatctgagctgcaacggcctgtctggcgcaataacccgggagttcgccgggctcgtgcggctcggtgtcctcgacgtgtcgcacaaccagctctccggcgatctccagccgctg

SEQ ID NO: 35945 - DNA, 395 bp, Setaria italica
  Peptide Sequence Number=SeqID_101919
gcaaatacgccagctccgacggtacccggtagtttgccttagcccaactacccccggccgaggtggcgcggcgcatcagctccggcaagctatcgattcttttcgtccctccctgccaccgcccggatccccaatcggcctcgtccatcgggccatgtgcatcgcggcgtgggcgtgggagtgccacccggcgcatcgcctactcctgctcttcaaccgcgacgagtaccactccaggccgacgcagccggcgcagtggtgggcgccgggggaggacggcaaggagatcctcgggggcagggacgagctcggcgggggcacgtggatggggtgcacgagggacgggaagctcgccttccttaccaacgtgcgggagtccggctcgctgatcggcg

SEQ ID NO: 35946 - DNA, 514 bp, Setaria italica
  Peptide Sequence Number=SeqID_101920
cgctgttgtcctacgtgatcttatcatgccataccttcttaggcgcatgaaagctgatgtcaatgcacagctccccaagaaaacagagcatgttcttttctgtagtctaactcctgagcagcgtgctacttatcgtgctttccttgctagttcagaggtggaacaaatatttgatggcaatagaaattcactgtatgggatagatgtcctaaggaagatatgcaatcatcctgatctacttgagcgagagcatgctgctcagaatcctgactatgggaatcctgagagaagtggaaagatgaaagtggttgagcaagttcttagagtctggaaggaccaaggccaccgtgttcttcttttcactcagactcaacaaatgcttgacattttggagaacttcttgacggcctgtgactaccaataccgaagaatggatggactaacgcctgcaaaacaaggatggcacgtaatgatgagttcaataacactgatgaaattttgtttacattctgac

SEQ ID NO: 35947 - DNA, 402 bp, Setaria italica
  Peptide Sequence Number=SeqID_101921
agggtgaataaaagaaaagcacggtaaaattcaagccacaatgaactggccatttcccaatcaaacttgaagatcagatgccttctaataaactcgtatgccatgagacagacaaaatgaacaaaaacaaagcaggaaacagatgttgaacagcccaacagggtaagaaacacatagttttcatgcatcaagcgcatctgtgcacatggatcatctatgtttgtagcagcaaaatgactaaccccaccatctaaaacattaaatgaaaaaaagtgatattactcacattaatgctacatacattatttgccttcatgaaaaaaagtgatattactcatctcgccagagtgccagacttagggtcacagactacatgtacatggaaaaaattgagaccacagc

SEQ ID NO: 35948 - DNA, 938 bp, Setaria italica
  Peptide Sequence Number=SeqID_101922
aggttcatttgcgaaatcatccgccccttccagcaagtaactctgcatccttgtcttcatcactcgagaagtccctcctctcaagctttgaatttgcagcaacaaaaaccaaaccggtgtgcccgattagtgctacttgccaagctccctggggaagagagccagcgcaccatcgatggtgtgcacctgaatcccctggaggttgcatggaggaagatgagccgcacagctaccttaccgagtgacttgaactcgctcaagcacgtctcccaaacaagtctgctgctctgcttattcgcgaccttcatcttccctgtggacgggtcaggctgcctcacctgcacagcctgcgcatacaacgggtccaatccatctgaccgccatttcatcagctccatcagagcaaggtgcgcctcttcctgtgacaccattctggtgatcagcctgtcgacatccttctcctgatcaggagccaagcatttgaacggaggaaggtaacgcccactggcatccttgacaaggtagagaggatccaaaatgaatgctgcggaccaggctgggtggtagttctttctgaaccttttctcaacaacattcagagcaatgccttcatcaacgttaaatttctcacaccaatctctaaccttgctgcgtaattcctcccagagtggtaggcattgcccaacaagaggccggtcaccctccatctccttcaccatgtccatgatcaacttcacaagcgaatgcacagcatcaacctctatccagaaggcctcattgtgcaccatctcccccatctcccttgcaactgagtcgtcgatgcacaccagcttgtaggagtcctcctgcacagcacgatggagagggtgtgcagagttcaaaatgtcctccagcatctcaaaggccgcccggaagtcactgccattgccgttaaacgg

SEQ ID NO: 35949 - DNA, 288 bp, Setaria italica
  Peptide Sequence Number=SeqID_101923
tactgttaaagaatagcacaacaacaacgcctcaagatcagcagtgatctgccattcagatcaaacaagaaatatttgattctcaaatggcagctatatcgcaggaaagccaagcgatagctccaactcctctatagtagaatcatatgcaagcagactgcgttctcctagtgaagatgtaacagcaaaatcatcaggatcccaacaaaacccgttgttcaaatgggtcaaggaatcagctgggccaactcaaagctcagagcaaaagcattttgagttaccagggca

SEQ ID NO: 35950 - DNA, 449 bp, Setaria italica
  Peptide Sequence Number=SeqID_101924
tttgttttaacttttagttttcttttaaaattttctaacagcacaataggcaagatcccaactaaacccgttgttcaaatgggtcaaggaatcagctgggccaactcaaagctcagagcaaaagcattttgagttaccagggcaaatgaaaagcactgctcaatcttcaaaattggcaccatcttcaccggcattcagttacacacataagggtgcacaagatagtatcagtccatcttcaccggcattttggaacgacacatattgtgcctaagtcaatacttaaccttcaaaaccactactaaacccctaaaagtaatgccaacacggagccaaatataccttccatggcaacagacaaaactcctcagagtccactgtctgtagaaaactctaactggggagtctggagatttgtctacattagctatgaagaacagacaggataa

SEQ ID NO: 35951 - DNA, 430 bp, Setaria italica
  Peptide Sequence Number=SeqID_101925
tcgtccccgcccgcctacccagggccgatcgagcgaggagaaccgccggccggccggtcatggagacgtcgcgcgtgaagcccgggttcaacggcgtggcggccgggggctttgacggcagcagccgccgggccggcggctacatgggcggcgtggcgctgcgcgcgttcgtgctggcggcgacgctggtggccgcggtggtgatgggcgtggaccggcagacgaggaccatccagatcacgctcgccgacacgctgccgccgctggaggtgcccgtcaccgccaagtggtcctactcctccgctttcgtgtaagtctcggagctccccgcctcgctcgctctctatctccaccgctagctgcttgctcatctctttgtcctcgtagcgctatcttgctggctttgggccacactcctcaatttcataaa

SEQ ID NO: 35952 - DNA, 766 bp, Setaria italica
  Peptide Sequence Number=SeqID_101926
catgggcggcgtggtgagcgcccccgccggctggcggcaggggagcgccggtggacgcgtgcggcgtggcgctgcgcgcgttcgtgctggcggcgacgctggtggccgcggtggtgatgggcgtggaccggcagacgaggaccatccagatcacgctcgccgacacgctgccgccgctggaggtgcccgtcaccgccaagtggtcctactcctccgctttcgtgtacttcgtggtggcgaacgcgatggtgtgcgtcttctcggcgttggcgctggcgacgtgccggcggcgcggcgcggtggtgccggtgatggtgggggacctgctggcgctggcgctgctcttctcggcggtgggggcggccgcggagttcggcatcctcggggagcgcggcaactcgcacgtgcgctgggccaaggtctgcaacgtctacggcgccttctgcgagcgcgccatggccgccgtcatcgtctccctgctcgccgccttcgccaaccttgtcatgctcatgctcaccattctcaccatccacaagagctcctcctactattaggagaaagggatcatatcatatatatgttgacgtggagcttgctgatgcagctggtgatcgactcaagatatactagctgccaattatattggaggcggtaattagatggacacagattatatcagcttggaactttcgaggcaagtcatcgatcagtagtagtaataactagatagcaagatgtatgcgaatcataaccgttttgtcactgg

SEQ ID NO: 35953 - DNA, 470 bp, Setaria italica
  Peptide Sequence Number=SeqID_101927
catgatcagtcatgatgttgcagaacataagaagcaacagctgaagcttcttcacattggattgtatcttcttatctggggtgaggcttcaaatgttcggttatgcctgagtgcctgtgctacatattccaccatatggcaaaacagttgcatgacatggttgatggaaattattttcaaccaccaccagggtttgaggaagagggatcatttctggaaaatgtcattgaacctatctttaaggtcctgcagaaagaagcacaaaaaagtagaggaggtacagcgggccactcagcttggagaaattatgacgacctgaatgaactgttttggtcggagaaatgttttactaagctgaagtggccatgggatctcacatcagatttctttttatcaagggcgtggtacagcaagaaagcccaaaacaaatttttgtcgaagtacgcacatttctgcacatatttagaagt

SEQ ID NO: 35954 - DNA, 231 bp, Setaria italica
  Peptide Sequence Number=SeqID_101928
ccttacaccagtacacatcctgcaatcagccatggctacagctgagcagagcaagaagctgcgcatccttctgatacccttcttcgccaccagccacatcggtccgtacaccgacctcgccgtccgcctcgcagcggccaggccgggcttcgtcgagcccgccgtcgccgtcaccccggcgaacgtccctgtggttcggtcgctcctcgagcggcacggccccgcggcgtg

SEQ ID NO: 35955 - DNA, 426 bp, Setaria italica
  Peptide Sequence Number=SeqID_101929
gctctttcgagggcactgatgcctagtcttgggattgaactggattagtgcccttatcatcggaaccattttttggtgttcttcacttgggcaatggcaggaatattcattgcaatctgggcaactatttgttggatttgcctatggtataggaaccatagcttcctcaagcgttatagttccaatggtttctcactccataaacaatattatcggaggtttactttggcgctttaccaagaactcacaaaaataagtatatataatacccttaacagtcatccctgtaagatctttcactagtttaggctttttaatccttactagttctgttgtaagtatgttttttttgaaattgattctgttgtgtgtaaaaaaaaaaattcatgtagtttcagtaggtgtaggtatagtaacttttcatta

SEQ ID NO: 35956 - DNA, 356 bp, Setaria italica
  Peptide Sequence Number=SeqID_101930
gacggtagggacaagcaagggagggacggacgtcagcaggcagagcaggagggagggagggacggcaggaggcagagcaggagggagagcaggctcggcagcaggcagagctcgcaaattttggcttgtcctctatgtgcatacaggaattgcagatttctttcagaggagagatgcaggacatggacctggttaccgtctgccctctgcgatatgttatttacccagctgtgcatgtttagccgtttagctaccttttctatgtctgaatgttgaagctttgaaagttgtattttttttaactaatgggtattgttagaagtagcctaaaacactaccactgattgatagttcaa

SEQ ID NO: 35957 - DNA, 908 bp, Setaria italica
  Peptide Sequence Number=SeqID_101931
cggtgtcaccctcatcactggtctcatcagcctcttcatcactctcctcagtggagtaaatttcctcagaggactcagcatcatctgaagcccattcctcatcttctccaatggcctcgacatctgtcagttcagcctgccgcatctcatcaacagctcctttcagttcagcgaggccatcttcctcatcttcttcacttgttttatcgtctgccaattcagcatgccgcatctcatcaacagctcctttcagttcagcgaggtcatcatcctcatcttcttcacttgtttcatcacctgccagttcagcctgcgtcatctcatcagcagccccttcttttacttcagtgaggcagtcttcctcgctagtctcatcttctgcggcagtgggaagaatctcctcaggggaatgatcagtctcaccagtggtagtgcaagcatcttccttgatggcctcctcattgatctcatcagccatctccatcacaggtgaccattcagcacagccctcatcatcttcaagtgaggcatcttgtgtcttctcaatgactggttctgaggcttcatccttggacagaacacctaggattggtgaatcctccatggttgctaaggaagcaggcttctgaacactggccggttccttttcttctacaattccttcctggggctttgtggccttatcctccatcttagtatcatcgcagctcttatctgaagctactgcagacccaatggtcacatcagaagaatcagcttcctcgccctcctctggttcctcctctttgttgtctccttccaggagcttggtaacttcatcctcatcggggtcctcacatttcacatcagaggcgacagctttcggttcctcttgctgcacctcctcttcttggtccaaagccatcgtc

SEQ ID NO: 35958 - DNA, 899 bp, Setaria italica
  misc_feature (869)..(869): n is a, c, g, or t
  misc_feature (876)..(899): n is a, c, g, or t
  Peptide Sequence Number=SeqID_101932
gctaccaggtccgcggccggctcgggtggggtgtgcgcgcggagcgggaggtcggccggggcgcgtcgcgccgtcccgcgcggcatcgtcgcgtccgcggaggttgagcaaagctacattatgataaaacctgatggtgttcagcgtggcctggttggggagatcatttctcgctttgagaagaaaggctttttgttgaagggcttaaagcttttccagtgctccactgacttggcgcaggaacattaccaggatttgaaggataaacctttctttcccactttgatcgattacataacttctggccctgttgtttgcatggcctgggagggtgttggtgttgttgcatcagctcgcaaattaattggagctactaatccccttcaagctgaaccaggaaccataagaggtgatcttgcagttcaaacaggaaggaatgttgtccatggaagtgatagtcctgataatggcaagcgtgaaatcgctctgtggttcaaagaaggcgagctctgccaatgggaatcagttcaaacaccttggcttatagagtaatctctgctgatggctgtgagaactgtattaaatgtgtgttttgttcaactttattcatgggtccatgtatgagtttagtccggcttagtggttttgcgttatcaagtccgcatgtattaattgagtagctcatcaggtccgcattctcagtatctagtacccttttaccgggatgttctttttgtaatatcgagcttctgaaacctttcatcagttgttctagagaaacttctcacattcgcatgtaacatcttgcactaaatacaggcaacaaagttccaagccttttgttggacaaaaaaaaaaaaaaaaaaaanaaaaaannnnnnnnnnnnnnnnnnnnnnnn

SEQ ID NO: 35959 - DNA, 1338 bp, Setaria italica
  Peptide Sequence Number=SeqID_101933
attgaatggcttctaagattgcagtttcagcattgtttgataagtttgcctttagtgctgttactctccaggactgaaagcctatccaaggatttttatgtattcggtcaattctgttggcgagagcaaagaaagctccaaattcaccaagaatatctctatagtaaacattgttgagaagtggaaggcgagaagaggcatcaatatcatccgctccaggtcttcgaccttttgaagacaggccaactccacgataaagagagctttggtgcagaaagggccaggtcccctccccaaagaaaggctcatatatacaaaagcggctgacctgtccgctgagtagtcttgtcatctctttcatgcaattcattctttaacctctctacccttttgacatttctgtacacctcctcccatgttccatgaagttggtcattcctgtccttcaactcatcttcttccatttttcttttgatgtccataacctcatttgctctctgttcctcccaggcaattgcagagaatgcttcactaatctttgatgtactgacaggagggcgttccattaggttgctatgccactcctgctctagtttctggagtatcttgtagccagacaaactctcattcatatgatgtaaatgcttcacgtcctcaaataggtgccatttccactcttgtttcagagctaaaggtatctcaccagcggttaaagggcttagtacatcagtggggaacttgataacattttccaatagcatagcatagccctcaatggtctcagaagccataaggttcttggcataggcctttccaactgatgcaatcttttgccctgaaacagagactttaccatttgacaatgctcgaagtaggacttgagttaacatgccgatattctttcttggaaaaagaagcccatttaccccatcatcaatatgttttttaataattgcaaggtctggagctataaccagcttctcaagactcatagcttggactagcacactggggaatgattgctcctcgagacaggaaccatatataacaaggtcagctgtaccaaggaggctgtccttgtcaccatcagctacatgctccactgcacctcttgggaagccaacactcagagcaatagactcaaggatcatcctatgcttctcggttatgttcctagtgaagaacttcactttcagttcagactctgtgctattatcagagtgatattgctgtaatagaggacctactgcttgcaagataagcgtctcttccatcaaattctcacgatatgaaaatggagtaccaacaatagcgattacaaagtctttggggtctcaa

SEQ ID NO: 35960 - DNA, 1684 bp, Setaria italica
  Peptide Sequence Number=SeqID_101934
agacctaactagaagaaaagagaaagggatcagcctgtggtccattattaaagatagtgttggaaaggatttgacacgagtttgccttccagtctacttcaacgaacctctctcatcccttcaaaagtgctttgaagatttggaatattcatacctcttggatcaggcctatcaatacggaaaaatggggaacagcctcatgagaattctcaaagtagctgcttttgcggtctctggctatgcttcatctgttgcaagaccttgcaaaccattcaatccattgttaggagagacgtacgaagctgattaccctgatagaggagttcggtttttgcagaaaaggttagtcatcatccaatgctgattgcctgccactgtgaaggcaagggttggaaattctggggcgacagcaatctcaaatccaagtttttgggggcagtcaattcaagttgaaccagttggcattttgactgtagaatttgacgatggtgaaatcttccaatggaacaaggttacaacaactattcacaacctcattctagggaagttgtactgcagccaccatggaaccatgcacataaaagggaatcgtcagtattcatgtaaacttaaattcaaagagccatcacttcttgaccggaatcctcacctagtacaaggctttgtagaggataatggtgggaacagagcttcgtatttaatcgggaagtgggatgaaagcatgtattatagtaattctgatactttcaaggtgagaagcgctgatcaactgaaaggtgcctcactattgtgggaaaagaacaaacctgctcctaatccaacgcgatacaatctatcttcattcgcgatcacattgaatgagttaactccagggctgcaggaaaaacttccacctactgattcacggttgagaccagatcagcgccacctagagaatggcgaatatgagaaggcgaatgctgagaagttgaggttggaacggcgtcaaagaatgtccacgaaacttcaagacaatggatggaagccccagtggttcgagcaagacagcgaggatgggacgtaccgctacaaaggcggatactgggaaacaagagagaagggacgctgggacggttgccctgacatattcggggaatttactgaaacatgagcagcctgttcttgcagtagcagaggttcaagcagccagcacccatctggacacgccatttataaacgatggggcactgccatcttcgctgtggagcacatcctcttgttaaagaagaaaaggggagcactgcacgaggaatagagcatcggagaaggtggcattgtcatcatgaactgaatggtatcagatatggatggccatggaggcattgccagcctgttagtatagtatagtcccgatgcaaataaggatgttgatcttcattctttggtaacttgtgttgaacatggatctgttgttgttgagcaggctacccggccttcatttcctcatggaagagatttgcttgctcggataggcaaaattctgcctgcccatgtaatgtttttgctaattgcagccgggactggaaaaaaggaaccttctgtagagagagagaaaaaaaggcagaaaacttacaggaacctgacatagcttagcaaataaattcctttcatcccgatctggtgaattttcctttgcaaaaaaaaa

SEQ ID NO: 35961 - DNA, 320 bp, Setaria italica
  misc_feature (319)..(319): n is a, c, g, or t
  Peptide Sequence Number=SeqID_101935
ttacggttaattaaattgtcctattgaaaatgtcccaaatttgtgtctcttatatatagagattgtcaagtttgtgaaaagtatggttatcctgatagttggtacacaaggcttacctccttagaagttcaagcaatcctgttgctctaaggttgtttgttgcttgaatataaaagggaatttatagtggagtatgaggggactcagggtactgtgatttatacctgtacttttgtagttgcgggtatgaatttgggaccttctcgatgttaggcactggcggacccaaggcccggccaccctgggcatctgcccgggnt

SEQ ID NO: 35962 - DNA, 541 bp, Setaria italica
  Peptide Sequence Number=SeqID_101936
cctcgacgatcacgccaaaacgaaccgtcaaggcgctaccccgacagtgataggccgaaacgttcagttgcgctgtcaattgagctccctggtcacggatggctgaaattttctagatatttctagaagggcgccggggatcttgctcttaatagacctgtcctgatcggcctgctgctactgtgacgtccaacgcgtgaaaagtatgttcaggttaggatggtggactatgtcttcacgcagttcgcctgaagattctaagaaggtagttgggatttgactgcgaggattacgggtagtagaggtaatagtgaaaggcaaatgcaacgatggcctgttaagctatgtgaacaatctgaacgcgtctataggataattcttgcccgtcctggaaactgcgcagactgtattgacagttgggacggcctgacgtggccggcaaaagcagattccatggcggaatgaactcggattgtgctacaggctttttggccgaaagctgttggccatactcgtaacccactgcaagttcctggaacgg

SEQ ID NO: 35963 - DNA, 488 bp, Setaria italica
  Peptide Sequence Number=SeqID_101937
actacttaaacctggtaaaatagcctagaatttttgcaatgcaagtaggactaccagtgtaaatcgactctgatacatattggaagtagtctggagcaaatttcatgaaagactctaattcagttttggtaacctgcttaattataaaccggtcatccattgattttgcaaagaatacattgctcttgcctccttgagcaccccatttcttgcaacgactaagggacttgataaaatcacgctctgatggacagcacattctcctcagagcatcaaattgtttcgcatagtaacaaatcacagtgtacttcacctgtcccaaaggaccttcatccccaaaattcaccttgatgtgacttacttttctaggtacaagtggatctgaagcaagtgggttcttgcttcctgactacagagaggatgttgtcctctgtcgagataacacttctcagaagttcagaagtacagtcatccaattcagttaatga

SEQ ID NO: 35964 - DNA, 701 bp, Setaria italica
  misc_feature (518)..(518): n is a, c, g, or t
  Peptide Sequence Number=SeqID_101938
tgtaggtcttctacagtgatgacaacaacagcaacattaaacgtacctgatctcctgcatgtggaccgtctttgtggaaaagcataggacgacaccatttttcttcattcatcaggctagaattctgaaaatgggcaatcaaagcattccttccctggatcctggcgtatgcaagtgatgccactttctcactattgaacttttcccatttcttgccattgaatgtctgcacaaaattatcaagctccaattacttcctcccaacatatgttcaatccaaaaggtgagttagactgtaaatacttcctattactattgagttatctagtaaggcatgaacacatagccatataccttgtaaaatggaattatgtgctgtggatcagtcatattgatgaaagcatagcccacattacacttgttcttaaaatcaattggaagatagatgaaatcatatgttccacggtgatctcgtcaatgacagctaaaagtagcttacagttgtacttgttaggaangtttttgatcatcagtgtagtgcgtgagtcttcaccatttgcgatgtggtcaaggtcaagatcaaattgcttcttgttttcggactgggcagcatttccatcatgcctgcggctcctgatccgatcattagtggcatcatattgtaagtctagtaaactacgttcttattcttattttggtta

SEQ ID NO: 35965 - DNA, 3207 bp, Setaria italica
  Peptide Sequence Number=SeqID_101939
tttttttttaaaactaaaacaaattacaaaatacgaataagtaatttcacaatcttgatgaatcctactgtcaaattcgttttcacccgccttgactgccggaaacacagcacctctaccatttctgctcttcacctacttgctcttctccgtgcctgtagccctcggcatataggttgctcgatgataaggcaaaactgagacatactttagggtgaatctccagcaggctcatgcagagcagagttcttgctaatcgtcgaactcacaagtcacagccttgttgatgaggacaaaaagaaagagaaagaaagcaagacagggaatttattacaggttcttcagcctccagttagtgagcaacattgcttatcctcagttgagagccaacttgaaactgggctctcttgctacggttttcttagttaggcgaggtcgatggacttccctctttagtgtctgaactggcgattggtctgtttctcccagaccgagtccggacattgttccccacagggaaaggctcctgatctcctgcatgtggaccgtctttgtggaaaagcataggacgacaccatttttcttcattcatcaggctagaattctgaaaatgggcaatcaaagcattccttccctggatcctggcgtatgcaagtgatgccactttctcactattgaacttttcccatttcttgccattgaatgtcttgtaaaatggaattatgtgctgtggatcagtcatattgatgaaagcatagcccacattacacttgttcttaaaatcaattggaagatagatgaaatcatatgttccacggtgattctcgtcaatgacagctaaaagtagcttacagttgtacttgttaggaatgtttttgatcatcagtgtagtgcgtgagtcttcaccatttgcgatgtggtcaaggtcaagatcaaattgcttcttgttttcggactgggcagcatttccatcatgcctgcggctcctgatccgatcattagtggcatcatatgaagcagaaacacgcatcattggactccttccgttggttgcatgaaacatttgctgaagtgatggaaacccagcatttacaggggagaacatggtctccctgtaatgtcctctggcaggtgcaaatacagagagatctgatggatacagttgtgggctaccaggaaaccctacattttcaagagatcctggatggaaggaatgtgcatttgtaaaaccaccaacattgcttggagctgaacccaagtgatgctggtccataggatgagcaccagtgttccgcatgtgaggtggcatagcagggtaaccatgaatatgcattggttgatgaaagttggaccacaacattggagcacaggggctttgaggaaaaccatttgagttattccaggtgtggtgatgtccatgaaggggacaacttccaattccggtgactccaagtgcttcactttgatcagaggaatgaccatgatgatcactggagcacactttatggttattataatccgctccttcagttagcctgacgcctgaattcctggtacctaatgtcatggacttggagccattgcaaatgccattatgacattctggcagtgagtgtgggtggaaggcttgcagtccacgtccaaagtttccatgaccaagtgacccattaggttcacaaaggttagcttgattattgtgctgacgtgtaggtccaattctgataggcgacgacaacttctgagcactattcacagagaagccatggagctgcggtctaactggagaatataaatcatggacgctgccgttctcccaacttttagggtctgtccttccaatagtcccaggtggagagttcttaagttggtgagtcacagtattctgcttccattctccagaacattgctccgtgaagcataatcctgcaactccagaacagctatgctcaactttgatttttgagcatgacacatcacccttgttaaggttattcactgctacctctgctgctctgacatcatagaattgtacaaatttcttattgcagcttgtaggagccttgcgaatctccttgacatcaccataaacactaaatatttggagaagatcatggttggagatggacgagtcaatgatagatacaaccagccttccgttgttgggatctttgttttgaccattttccttaggaatggaaaattgaacatcaaggttcatcagccccaagggtttgttatggagtgctctcattgcattctgtgcagctcttatgtcatagtaagatactgtaacaaatccatggttcttgcaggacgtatgaagtgtctgtatctccccatattgctgaaactgaacccttagctcagcatcctcaatgcttgggttaatattttttacaattaagagttctggaagggtgttcattgatagagtgcttcccagaaagttgactcttgaaggaaccttcgtgaattttgccaccattgctgaaatcatcattctctagctccatacctcctccagtgtagaatatatcttcatcggcatcatcctggttagacaagccagtgcattcgaagccatcagtgattccagatatcaaatcatcatcatcaggaaggaggtctccaatggtttgagcttccatttctttcatggaccctagaggttcatctccctcgcaaccggagttaattgcgtcaacagattggccaggaaaaccacttgccatcattcttgatttgatactgaacacttcggataaggagctggatgaagggtagtttccataatcatgcacgagttgatcagcactacttggttcaacaaaagctgtgcctcttgtagacgagccaagactggatctggagctaccaagtatatctccccaagatattgatgataggcttgaagtattttcttcttgccccatcaacttactgaggctaagcatgtccagttggcccttgaaggcttgccctcgtggatgttccagaccacctgcaggatttgcacctgtgggatggaccttgtcaagtggagaagcgaaagctgacttgctccctttgtggtcgaccattgactctgatttccaaaatccgacctgcctctcagcagggacgagatcctctgagaagaacgacgaagatgatgactctggcagcgtagcaaagggcgacaggtgcctcccgtcgacagctccagat

SEQ ID NO: 35966 - DNA, 750 bp, Setaria italica
  Peptide Sequence Number=SeqID_101940
tttttttttttttatctcgctgttatagttactaatgatgaattaattatgcttaataaatttgtctcgctgtttaccttccatccatacaattagttttataattaagccaatctaatttacttctaaatatatatttgatgtgacacgaattaaactttacatcgaggaacaagacaccccaatttttcggtgggggggcgaaccttcgtttcttccgcacgcactttccccttcctcccgatctgctgcgcccgtcctcaaatcgaccacctgtgctccaatcggcggcggccttcctgccgtcggtggtgccacatggcctggtggtgcttcccctccaggcgtccatcctccagttcttggtgtcaatgcacggtggccggcgcccccagttgattcgtctcctggacgcacaaatcgaccatcctgcaatccaaaatttaagctctacttctaggatagaagtccttgcttaccaaatctccacactactatcaggatggacctcctaatcgctgcagatagaggcctaaaaaggatgggatcttagctccatgggggatcgagcttctccctgtccgaatcgatctcctttcgtccaggattgagcttctcccatcctggattgagctagtcaatggagagcaggtggaggagaagaggaaaaataatgtttgctggaggaggaagaggaggtcagaggaggcattggtgggactggtgtaagacttagtacttttactttta

SEQ ID NO: 35967 - DNA, 1397 bp, Setaria italica
  misc_feature (1)..(31): n is a, c, g, or t
  Peptide Sequence Number=SeqID_101941
nnnnnnnnnnnnnnnnnnnnnnnnnnnnnnntttgttttttttttttttttttttaactttgaattaaaaaagtccaaactatattaggattagcttaatattaaacacttgtctcgggacaaaatcacaacagaaaattgacaccactagctcagacgtacggccacatcagagtccaaaaatctcaacctaatgaactagggagctttggcaacccttctccaggaacagaaatttgcatcaacaccctccatcaagttgggaactttatactccacttttgccctaaaatatttagagtgaaatatcctcacaccaactgcttttgtggtttctaaggaggcaaatgaaactaggaaattgcaggccacaaccccatccacaatctttcagatgcactcatttcatagcagaagttttcatgcatatcaacccttcaagtttgagggtcttctgtgaatttatatagcattattatcaattaaggttgaccatagaaattaaatatcttctcatgctgggtggggtagatgcagttagagcttaaatttggagggcaccaatgcaaattccgaacccaggaaaaggtgagattcaaaggctccgattatcattttaacccttcgaactactcttatttaccaccattatcatagagtcttaccagaaggagacgaatgaaatgaaaattaacagataagtactgctaacgattaaacggcattacttagctccctgcccgaatcctagcgcgcccgcgctcagaacgcgcagatctcgtcgccggtcgccgccttgcgcgggcacaccgaaacggcgccacccatcgtgttcttgcagtgcgcgatggcgccctcgatggcgctctggagctcctccatcgacgacgccgtggacagtgaaaccggtccgacgccaatgccgcccgccacggccgcggccgcggcggccggcacgtcggggaagccagcgccgccggccccgccgaaggtgagcaggcccgagtggctcggcgacgaccgcatcgacgacgggcagctcgccgcgcaccgcttctgtcgcgggaaccggaggttcccggagaaggagttggagtgcgcgtacttgccgctaacgacgtcggcgtccaccgctgccgcggccgcgacgacggcgtggtcgtcgtcggcccgcttcttgcggatggagaaggtgaacggcttcttgaacccctgctgcggctggttgttggcgccggcgctggcgccgttaacgttgacgttgacgttgttctggttcttggggatctgggagagcttctcgtacagcggcttcaccttcttggcgtacttctcgttcacctctaccttccgcgacttggacggctgcttcttggcggccggagcgccgccgcggt

SEQ ID NO: 35968 - DNA, 358 bp, Setaria italica
  Peptide Sequence Number=SeqID_101942
tgaaaggactcgattctcatctgggtgccagcactccacaccggtaaatcggcatataaaacccacagtgttattttcaaaaatccatgaggatttgagtataccattaggatcaatcactgatttcattatgtctctcaagcattggacatccaggtctgagctgaaacaagtagtacttaacagcaacaaaagaagagcgcttagaggaaaatgatctgtcatcgagcacttgtgcagactaatccaacttctccttgactcaaacttcaccgggagctgcttcctgccgcggcgggaattgggcaaccgggcgggacggaccaggggaggggagcgcaggcgaagaggagacgac

SEQ ID NO: 35969 - DNA, 318 bp, Setaria italica
  Peptide Sequence Number=SeqID_101943
gaccagaatgtgggcgaggaacaggatgacggcgaggcccttgcacagcttggtgaaccccgtgaaggatgatttccctcccgctgccgggatcagggtggcggaggcgctcatcgagtcggcagcgacctccccttcccgcggaacccgaggtcaccgacactcgtcaaaaagggtggcggcgggcgggcgggcgggcgtagcggccgtcgacgcgcgggttcaggcggccgcggcgcggcgcttctgcggctgcgaggtgatgatctcgcggcaatggagtcgggagcggattgagcctcctcggcgtccctccct

SEQ ID NO: 35970 - DNA, 1034 bp, Setaria italica
  Peptide Sequence Number=SeqID_101944
tacaagtatcgagagggcaagctaacctctatagagaaaagaattggtctccaacacagctctattgcctagctggcttgcaacagtgcctggcagggatacattcatggtgaaaggtttaatctcaataagtggattgttccagggcttggttatgacaattgtggtagcaccaaatctttcttactaccaacaaacaatatgtacagtctgaaggcaatatccatgaaaagcaagagaattgcagatactgttgaagctttgattggggcctatctcagtgcttctggtgaacaggcagcatttcatttcataaaatcattaggaatgggtgtagaactgcatagtgaaatgcaagaggaaaggaaaattataacaaaatctgaagaaatcattgatgtgagaagcttagagacaatgcttgattatgttttcaatgatcgttcactgttaatagaagcattgacacatagctcctacaatattgctggcccttgctatgaggttaaaggcttgagtttcttggagatgctgtattggaccacatcataactgattacttctacaaactatactaccctggatgtacaccagcattgttgacaaatctacgaaaagcttccgtgaacaactgttgctatgcacacgcagctgttaaagcaggattacacaagcatattcttcattcgtcatcaaaacagatgattaacgaccttgagaattctgggtggtcattttcaggcccatcgcatggttgggaacctggcattggtctaccggaggatcttgcagatttgattgaatcaatagctggtgcgatttacctcgacagcaagcataagaaggaggttgtctggagagccatgaggcggctactagaacctcttgccacccccaagaccgtggaggtgtacccggtgtcggagctgaaagaaatatgcgagcgcagaaaatacccgaagccatcatactctccaactcgtgatgatggagttggagtgacaagggtggttgcaaaggtgaaggctgctcta

SEQ ID NO: 35971 - DNA, 298 bp, Setaria italica
  Peptide Sequence Number=SeqID_101945
tgttgttggccgaagtctctgtttggttgtggttgatctctgatcggtgagcgtgtaacgcaccagtgtagaaggagaaaatgtatcttgtctcgttgtctgggtgctagtttttttggtgatattatgttgaggtttccatttactcttcctagggaggaaaggaacgatctatgcttagtgctttgtacttacaaacagtttcattccgttgtgctgaacctgatgtatataatttggtttggacaaaactggaatactttgcagttgatggctttctttcaaataaaaaaaaaaa

SEQ ID NO: 35972 - DNA, 488 bp, Setaria italica
  Peptide Sequence Number=SeqID_101946
tcctttcttcccaggttcatctgactccattctccgctggaattggaccgcctgcttcttggctaccctggatttccagggatctcagcagccgatcctgctgccacctgccatgggcgccggccatgtatacgtgcaagttgctgcccaacagtccaaccagaaatagccacacaacccgtaccaaaccacgcgccttctgcacgtacatgactgctgcatcaggccaagactggtgaaagtaactttgtttgtttcagaactagcagtatactataccaagcttctagcatgtgcaaggaaaatgggcagtggttgttgtggttgtgcacctaataacttaccactgatgatcactttgattaattgactccttcatccagttcagaaatcagaatggaaagaattatgatacaggcataactggtaggactagtatattgtaagtgtgtgtgattgaaaatgctcacagctactattcacttaaa

SEQ ID NO: 35973 - DNA, 412 bp, Setaria italica
  Peptide Sequence Number=SeqID_101947
tttcaatgataatataaatatatatgtaaaaattctttgacgcagttcttagctgaaaggaacagtgccttaaagcgccattacaggattattaatacaaagtagtctacaagtgcatgagtaagttagttcaatatggttaaggataaaggcacaagggctaacatggtggatgaataagagttgccaaatgattgagctactacctccaaaaggatattggcatattgccctagaactagaacgcgtgttgtcaactgtcaacactaaaactttgcttactaatacatgtcaagtatctatatgttgcatggacagatactagtagattcatcatcgaaatcagttgtacctcttctgactatagctaattatgtattttgttaaaccatttgattagagaatgcaaaag

SEQ ID NO: 35974 - DNA, 218 bp, Setaria italica
  Peptide Sequence Number=SeqID_101948
aatgcctggtgccggagccggccttcccatgggtggcctgcaccagcagcagcagcagcagcagcgaggagggatcgatggtgttgctgatctggttggcgctggagggccggattccatggcgttcccgtcatcctcccagggcagtttgggctcgaatcagcttggcggcgagaacttacagcagcagcagcaccaacagcagatggatgcaccgc

SEQ ID NO: 35975 - DNA, 732 bp, Setaria italica
  misc_feature (145)..(145): n is a, c, g, or t
  Peptide Sequence Number=SeqID_101949
ccaagctcgtctggtggaagaggcctgcaggctatttgaccagatgaaacaattaggaatggcatccaacacttgtacatacaacgtaatgcttcgtggactttgtaggaccagggatatttgtgctgtcaaacagttgctaacngaaatggaacttgctgatgttgagatggacagcatatcattcaacacagtagttgtgttcttaattaaatcaaggcttattgactcagctgctgcaatgatcagagaaatgctgaatctaggcatgaaacctagtgccaaaaacttcctcattactttctcagtctgttggctataaattcgttctggaggataataccacaaccacagttgaaagtgatggttctgattcatccagtgatctccttgtatgctcagcttcataggaaaaattatttcagctgaacaagcatactgttacatagtactatctgccagaatccatctatcatttgcggtgttcttttcggaggaaaatctactagggtgaagtgcttgtggcaatcaatcaactttctggcaaggagcatggcagcgctcgacgacaggcttttccagtttccacggcagcggccctacacacgcgagcatctcttccttacggatgtctgccgctggctcatggctgtctaggagctcagccaggacagccaccatgacaactgcgtcatggaagccagcacaggtgctggcgacaaggcagaccct

SEQ ID NO: 35976 - DNA, 799 bp, Setaria italica
  Peptide Sequence Number=SeqID_101950
gagctattcgaaaggatctgcaacgctgggagatttagcgaggatgaggcaaggttcttctttcaacaattgatttcaggagttagctattgtcactccatggtatattactaacttttcaagagcaactattaagtggaacatttgtgagttgtgacaagacaatatcttgttttgttgctgcagcaaatatgtcacagagatttgaaactagaaaatactctgctggatggtagtatagcacctcggttaaagatatgtgattttggttattccaagtcctctgtgttgcactcacagcccaaatccactgttggcacaccagcttacattgctcccgaggtgcttgctagaaaggatatgatggaaaggtcgccgatgttggtcatgtggagtaactttgtatgtgatgcttgtcggggcttatccctttgaggaccctgatgaaccaaagaattccgcaagactcttactcggattctcagcgtacaatatgccattcctgatttgtccgagtttcgatgagtgcaggcatcttttgtcccggattttcgttagcaaaccctgaacaagtaattttttttttctaaaacatttagatgaaaaaggaaacacagaatttctgcattctcatcatccattgggtgcagcggataaccatcccggagatcaagaaccacccgtggttcctgaagaacctgcccatcgagatgactgacgagtaccagatgagcgtgctaacggccgacatgaacttcccctcacaaagcctggaggagatcatggccatcatacagga

SEQ ID NO: 35977 - DNA, 1602 bp, Setaria italica
  misc_feature (1573)..(1602): n is a, c, g, or t
  Peptide Sequence Number=SeqID_101951
cctatccccctgtgtgccttgcctatcccctcccctgctcccttccattcctcgctcgctcctccgttgcttcctcccttcccccgtccacagtccactccactcatcggccccgcacctcggtatttgaccgattggtgccttggtggaggtagcttgcaagcctgttagctgcttcttgcttccggttctcgcgttcataccagtgccgattacggggtgtcagaggccgagaagctcgtgcgcgccagggaggtggcgatggagaggtacgaggtgatcaaggacataggatcgggcaacttcggggtggccaagctggtccgggacgtcaggactaaggatctctttgccgtcaagttcatcgagaggggaatgaagattgatgagaatgtccaaagggaaatcatgaaccacagatcgctgaggcatccaaatatagttaaattcaaggaggttgtgctaactcccacacatttggccatagttatggaatatgcttctggtggtgagctattcgaaaggatctgcaacgctgggagatttagcgaggatgaggcaaggttcttctttcaacaattgatttcaggagttagctattgtcactccatgcaaatatgtcacagagatttgaaactagaaaatactctgctggatggtagtatagcacctcggttaaagatatgtgattttggttattccaagtcctctgtgttgcactcacagcccaaatccactgttggcacaccagcttacattgctcccgaggtgcttgctagaaaggaatatgatggaaaggtcgccgatgtttggtcatgtggagtaactttgtatgtgatgcttgtcggggcttatccctttgaggaccctgatgaaccaaagaatttccgcaagactcttactcggattctcagcgtacaatatgccattcctgattttgtccgagtttcgatggagtgcaggcatcttttgtcccggattttcgttgcaaaccctgaacaacggataaccatcccggagatcaagaaccacccgtggttcctgaagaacctgcccatcgagatgactgacgagtaccagatgagcgtgctaacggccgacatgaacttcccctcacaaagcctggaggagatcatggccatcatacaggaggcgcggaagcctggcgacgggatgaagctcactgggcagctccctggcctgggaagcatggagctggatgacattgacgtcgacgacatcgacgtcgacgacagcggtgatttcgtctgcgccttgtgacgagcaagctgttggttcaggccgtccgacgccgaagccgccttgaaattcctttctcttctggtcatgtgttctgctgttgatccacgacgtttgtttcagcgtgctccgagctcccattttgttgttgtgatatcactgtcacttcacttgttttctgtaaccgaggtagtgacgctgtggataaataagactttttaaggctgtattcttgctgaattcttagtgttcggatcctctgtttgccctgtatgaaggggctgtttcatgaatgtcgcaatgtgtatgttcnnnnnnnnnnnnnnnnnnnnnnnnnnnnnn

SEQ ID NO: 35978 - DNA, 333 bp, Setaria italica
  Peptide Sequence Number=SeqID_101952
cttaggtgcttctactgctttacctgatgcaacaaagctcgcgttgctccacaggcttgatgcagtaagacatgaccgggcagaagtgattcctgaaagacttgcagtggtcacaggtggaaacaaaggagttggcctggaagtatgccgccaacttgctccccaaggtgtgacggttatccttacacgccgagggatgagaaacgaggaacatatgctgctgagtccctttgccgtgaatacgaactccccaacataatcttccatcagcttgatgtcagagatgataatagtgtcacctcattggcccatatctgctttcaatatactggg

SEQ ID NO: 35979 - DNA, 698 bp, Setaria italica
  Peptide Sequence Number=SeqID_101953
agtcgggccgctggcccgccacgccgccagcgtccataaccaaagcaaaccgtccggcggcgccgacgctggccacggcggagcaatggcgcggcactaaccagtactgaaaaaggtgaagtgcccggctccggccccgctgaactctactcctttccccacaacaactgcgtgtccgatcggatcccacctcatggagaaagcagcgcaagctgccaccggcgggacgcagggctcacctcagcacaggctttgcgcagtaagacatgaccgggctgaagtgattcctgaaagacttgcggtggtcacaggtggaaacaaaggagttggcctcgaagtatgccgccagcttgctctccagggtgtggcggttatccttacagcgagggatgagaaacgaggaacatatgctgctgagtccctttgctgtgaatacgaactcaccaacataatcttccatcagcttgatgtcagagatgataatagtgtcacctcattggcccagtatattgaaagcagatatgggaagcttgatatcttggtgaacaatgcagccattacaggaattgtagcagatgaggaaggcctgaaagctctcaacattgatttagagacatggacatctggcagggccgccaatcttcttaaagaagtattccagaatacctatgatgaggcatttaactgtctcaatacca

SEQ ID NO: 35980 - DNA, 1362 bp, Setaria italica
  Peptide Sequence Number=SeqID_101954
gtcgggccgctgggccccgccacgccgccagcgtccataccaagcaaaccgtccggcggcgccgacgctggccacggcggagcaatggcgcggcactaaccagtacggaaaaaggtgaagcgcatcttcttgcagtgcccggctccggccccgctgaactctactcctttccccacaacaactgcgtgtccgatcggatcccacctcatggagaaagcagcgcaagctgccaccggcgggacgcagggctcacctcagcacaggctttgcgcagtaagacatgaccgggcagaagtgattcctgaaagcctgaagtgattcctggacttgcggtggtcacaggtggaaacaaaggagttggcctcgaagtatgccgccagcttgctctccagggtgtggcggttatccttacagcgagggatgagaaacgaggaaaagatgctgctgagtcccttcgctgtgaatccgaactcaccaacataatcttccatcagcttgatgtcagagatgataatagtgtcacctcattggcatggtatattgaaagcagatatgggaagcttgatatcttggtgaacaatgcagctgtttcaggaattgtagcagatgaggaaggcctcaaagctctcaacattgatgcagagacctggacatctggcagggccgctaatcttcttaaagaagtattccagaatacctatgacgaggcgttaaactgtctcaataccaattactatggatgcaagagggtaaccgaggctcttcttccacttttgaagctgtctacatcaggtgcaaggattgttaatgcctcctcccttgcgtcggagctgaagagaatgccaaatgagaagcttcgaaatgatttgtgcgacatcaacatctgggatgaggaccgaatagaagcagtgctgaacacattcttggaggacctgaagaacgggcggcttgaagaggccgggtggcccatgatgctgccaacatacagtgtatcgaaaatggtcatcaatctgtacaccaggattatggcaaggaggtatccagagatgcgcatcaattgtgtgagacctggctttgttaagactgacatttgctggaatctagggctcttgacgcctgaacaaggtgcaagagggccagtcatgctagctctgctccctgacgatggaccaactgggtgctattttgatcagacagaaatggtgaaaatttggtgatcaacggttgaatggatcgttcgttggccagtttgtgtgatattatttacccttattgtctcagacaataacggcatcttcatatctttacataaacacaaaacagacagtaaaatcttctcatgaccgagggtaatgccatgat

SEQ ID NO: 35981 - DNA, 683 bp, Setaria italica
  Peptide Sequence Number=SeqID_101955
cgatctcgttggggaggcttcttgagctcgagcccctggatgtcaatgacgcggaggaactgggaggcatggaggaaacccaggtcgctgccctggatgcacttgccgccggacctgttgcggccctccacgaagtcgcagatgatggagcgcagcttgggtagcgcgttgctgagctggacgtaccggttggtggtggagccgaggactgcgaggcggcgcacggtggccggcgcgagcacgtcggtgctgtcgtggctctcgacgaagctagcctcctgcgcctcgtcctgcgcgaaggcgtgcagccggtcgtgcaccaccaccgtctgcacggcgccgaaatcgtccttgtccaccagctgcaccatgcaccgggagatgagctgcttgaggtactcctgccccacctcctccatggtgctcccgcgccgcggccgcacgaacccctcggcgacccacagccggaccagccgcgccgcctccaccggggtgctctcccgcatcgccgccaggtagaggaagcacgacttgaggtggtgcggcagatcgtcgaaggccagcgacatgatccgccggccgttgtggctgccggcgccgccgcccttgtgctgctgctcccgcgccggggcaagctgcgccatcacctcgtcccactccgccggcagctccttcgaccgcag

SEQ ID NO: 35982 - DNA, 467 bp, Setaria italica
  Peptide Sequence Number=SeqID_101956
tctattttgatagttaagtagaaaaataactgcttaaatataaagtttgcttttgtatgatccagaaatagagatgttctattcaggtttggaacgctgatttgcaatacataagagtggagaaagtagtgaagataagctcgcagtgtgccattaagctaacattcattggctattaccagtgataaccacttgacaggacaaaaggagtacctagcagattccaacacaaattgatctccagttgtctggactgatgtcattaaatgtcagcatcttttgacctcaaacaatgattggtgtggttgaaatatttcaccaagaatgagtcaagactcacaataattgcttctcataagcaagatttagtcatattgcccttatcgttgaaacatgctggctctataatgttaagtttcccactaagaattacaagtaggaggtactccattttctctgtacaactt

SEQ ID NO: 35983 - DNA, 264 bp, Setaria italica
  Peptide Sequence Number=SeqID_101957
ccaactgaaaaagctgttcagtctagttataatcaaaaacaagatatttattttgaatgggttttgtgctacagcatcaagttatactcttctgcatcggagaaactttcacagaccagcctcctatttaccctccaatcgatttgcctgtaaatactagagcaaatgctgcagatttcgatggtccggtgcctaaacctggggttgaagtcaacttagttgacgcagttccttgtcgaatagcatttgagaggggcaaagagc

SEQ ID NO: 35984 - DNA, 430 bp, Setaria italica
  Peptide Sequence Number=SeqID_101958
gtgattcttctgttgctgttgcagagagagtccatgagatggttaagggttttgtgctacagcatcaagttatactcttctgcatcggagaaactttcacagaccagcctcctatttaccctccaatcgatttgcctgtaaatactagagcaaatgctgcagatttcgatggtccggtgcctaaacctggggttgaagtcaacttagttgacgcagttccttgtcgaatagcatttgagaggggcaaagagcgtcacttctgctttttagccttatctaacggaacttctgggtggattcttcttctagaagaattacctctcaagcaacaacgtggaattgtccgtgtcatggctcctttggcaggatctgatccaagaatagacgaaaaacatgagaagtggttacattcttcgctatttcgttccct

SEQ ID NO: 35985 - DNA, 1610 bp, Setaria italica
  Peptide Sequence Number=SeqID_101959
gtgattgaagcattgagatcaattgcggaacttatgatatatggtgaccagcatgatccttcattttttgaatattttatggagaaacagatcatgggtgaatttgctcgtatattaaggatctcgaagctgtcaagggtgtcactccagttgctacagacgatgggtatcatgatccaaaatctaagaaatgaacattcaatttactatatttttagcaatgagcacatcaacttcttgattacatactcatttgattttcgaattgatgagatgctatcgtactacatatcttttctacgggcgataagtgggaagttgaacaagaatacaatttctttgctcgtgaagacaaaaaatgatgaagtcacttcctttcctctttatgtggaggccttaaagtttgcttttcacgaggatagcatgattcgagttgctatacgaaccttgactctcaatgtttatcatgtgggagatgaatctgttaacagattcgtttcccgtgtgccgctatcagattatttttcagacatagttcagcatttccagaagcaatgcattgacttggataagttggttacgcgctcctcacgaaatgcaaattgttctctcccatcttcctctgttgaagatgcaattgtgcaaattgaagacacactgtattatttcagtgatgttatgtcttctggtattcctgatcttgaaaggtttatcactgaaaacatcttgcaagttttggtatttcggctcttactcccgtcattgcagaggcagagcacagatttggatataagtgtcactacttccatgtatttgctttgctgtattctccacatttttaagaacaaggacatggcaagtactgtagctgccgctctttttcatcaacctgattgccctgataggaagcaagtgactcctaatggctatacctcggagcatgatgcatctgagaatcagtgcagcagtgactctacctgcgagcaagcaaatgaggaccagccaacttctttgtctgctgttagttcgccgcctagtgattgttgccaaggcaacacaccaagggaacacttgctgtcctatatcacaggaggagatgattcagaagctttgggttcgttgtgcttatttgctacattattgcagacaaaagaacttgatgaatcgatgctggatgcacttggaatactccctcaaagaaagcagcataagaaacttctactacaagctttagtaggagaagaccttgctgaaagacggttattttcgtcaagtagcggtctgactgatgacagtatttgtagcgattttgatgtttatgtaaggaagcttcaggataagtatgggctacagtgtcatcatccacggcaaatgacttccaaagttcacagatatcaggtgctcgatgcgttagtcgaccttttctgcagatcgaaggtatctgcagatgttcgcttggttggaggctggctttttcggcaattgctgccccatggggaggaagaattcactgcttttcatctaagaagattaaaggtacatccattcatcaatactgcatgattcatgtattacttttgatggagaactggggatcagaggagataata

SEQ ID NO: 35986 - DNA, 852 bp, Setaria italica
  Peptide Sequence Number=SeqID_101960
ccatggatttgtattcatttggaggttagaactacttgatcatgcttcacgtgactatctatcagcccccaatatgtattgcaactacacagtaaatttgtgatgtactgagtcatgcattgagcggtctgactgatgacagtattttgtagcgatttttgatgtttatgtaaggaagcttcaggataagtatgggctacagtgtcatcatccacggcaaatgacttccaaagttcacagatatcaggtgctcgatgcgttagtcgaccttttctgcagatcgaaggtatctgcagatgttcgcttggttggaggctggctttttcggcaattgctgccccatggggaggaagaattcactgcttttcatctaagaagattaaaggattcacacaaggattgtagtgcaaagctttcagaggaatctggaggatgctggtgcgacatgcttcttcccgttattaaggaggcttggaagaattgcaagaaagcaattgaggcttcttcaccaccaaaaggatccaagtctataattgtacccatggatttgtattcatttggaggtgattcttctgttgctgttgcagagagagtccatgagatggttaagggttttgtgctacagcatcaagttatactcttctgcatcggagaaactttcacagaccagcctcctatttaccctccaatcgatttgcctgtaaatactagagcaaatgctgcagatttcgatggtccggtgcctaaacctggggttgaagtcaacttagttgacgcagttccttgtcgaatagcatttgagaggggcaaagagcgtctattcttggatcagatcctgccaaaaggaagcca

SEQ ID NO: 35987 - DNA, 1158 bp, Setaria italica
  misc_feature (1095)..(1158): n is a, c, g, or t
  Peptide Sequence Number=SeqID_101961
aacaaaagttaaataactaacttaactagacaatacggaagaaaactttacaacaagaccagcctcctatttaccctccaatcgatttgcctgtaaatactagagcaaatgctgcagatttcgatggtccggtgcctaaacctggttgtgaagtcaacttagttgacgcagttccttgtcgaatagcatttgagaggggcaaagagcgtcacttctgctttttagccttatctaacggaacttctgggtggattcttcttctagaagaattacctctcaagcaacaacgtggaattgtccgtgtcatggctcctttggcaggatctgatccaagaatagacgaaaaacatgagaagtggttacatcttcgcattcgtccctccacacttccttttttggattctggaaaacaaaaagggaagacgaagaagtatcttgttgatggtagatggacccttgcttttagtgatgagcagtcctgtaaggctgcagaggctatggttatcgaagagatgaagctccaacaggttgctgttgggaaacaattgcaaccattggttgaatttgacatgcctgaggatggattgcagcatcctcaaccttcatcgcacgatatcccttctgatgacgggtcatgactcatgactcacttggatatcccttctgatgactcatgactcacttggaaatttcatcaagtgcagttgttgaacttctcaatcatgaacagggcaagaagttgccacaaaagtgcatcgttgaacatctaaactgtggcaacgcgaaaacaaaatgggcctacctctgtgagtaagttgtcgaattctgtacattacaatggaagattagagctttctcctttttataacacagcttagggtttgggccatcttaagttgagttagctggataggattctttgtacaatagtttgtatctgtcctttgtcccttgtaatctttatatatacacattgaaaatccattctttgataattttcagggcagagttgtgtacactaatgtcaaaacaagccctgcctatagtaataaaatttgagctccataatgttttctttgtcaaaaaaaaaaaaannnnnnnnnnnnnnnnnnnnnnnnnnnnnnnnnnnnnnnnnnnnnnnnnnnnnnnnnnnnnnnn

SEQ ID NO: 35988 - DNA, 355 bp, Setaria italica
  Peptide Sequence Number=SeqID_101962
tatggccgcaagccacaccagagccgtatctgtggagctattagatacagtctccgcattagccaccgcaggagagactacactgtcggcacttcctgatccactgcccacctgctcaggatctcttgaagttcccgtttccaatgacactataccttggaattcctcactcgcaagcagcgcagcaaggagatccatgaatgtttctctttctttacccaaaaagtcacttcccttgctcatgtcaccttggacatagtccagcacatcctcgtctgagatgtaaccaccaccaagctcgctgagctgagttaaccgaagctggttgtaaattttcacgaccatttacaaccag

SEQ ID NO: 35989 - DNA, 2465 bp, Setaria italica
  Peptide Sequence Number=SeqID_101963
gcaaggagcagcaaaagcaatgccagtatctaatgccagagcagtttcgacctccatctagcgcatgctaatccatccaatacagctaatactactaataatacaagacacatatatactccagtcaagacacatataatacagccgtggaggggagaccggaaggtgagaggagttgctggtgccggatccttgaggccacagcccaatttggtagtccaaacagaacagcacaaacaactttaggacagaagaagagatgatatgaatatacacttgctggaaagatgtcaaaaagaaaagaaaataagagatgtgaattttcacgaccatttacaaccagcttcggttaactcagctcagctagcatggttctgtggatctgatgaaacgctaaatttacaagcaagccgagccgtattgttagaaaattgaagccggatggatggattgctttgctaagctgctccaacaataattaatcatgatgcctggcttcaagggttgaaatagcctgaagcaccaaggttggaggacacgagcactaccacactcgttatggccgcaagccacaccagagccgtatctgtggagctattagatacagtctccgcattagccaccgcaggagagactacactgtcggcacttcctgatccactgcccacctgctcaggatctcttgaagttcccgtttccaatgacactataccttggaattcctcactcgcaagcagcgcagcaaggagatccatgaatgtttctctttctttacccaaaaagtcacttcccttgctcatgtcaccttggacatagtccagcacatcctcgtctgagatgtaaccaccaccaagctcgcttctcaccgtctcatcttcctcgtcctcaacgtacgccttgaacgtaagccgaagtagcacctctccagctgcgcatttcccaaacaagccccattcaccatataaagttacaattttgtcagttggaactgtatctttaagcgaccccaactcaacctccccagtgccaatagtgacgtcagttagtccaattgaatccttcacttgaatggtcaacttctgtttgcgaggatttgcaacaagcagatgaaaatcttgattccaaattggttctcctggtagcccaatcacagttgtttgactgttcttcttgctctttatcacttgatcaccaagaatcatgacaacataagggtctgtcttgccaaacagggtgaagctaagctttctagcatcaactagcgtcaccgatagctctccaacgaagtccttgtttccatcttggattatgtcacttgcaacattttgaattatgtcacttgcaatacttcctgaaacaggtcccatagctcttcccttctgaaaatcaaggactatctttttgggccgcacaaagagacgtggcaaatcttctgtcagaagttttgtgagaaacattgacagaacaggaatggccataagattgaataggcggaacagtgagagctcaaacttgatctttggaagggatacaaaagcccaagatacagctcccacccatggttctgttggaatgagccttagcttaacccataactccccatcaatgtcgaaatctcgaacccaaactggcacgacgattggtactttggtaaactttagggagagggccaatgccatgcgtgctccaccggcatagcgaatgccaatttggtactgcaggtcgtttgcgcgcctcgaggtccggcgctcgacgttcctgacggagagcggctcctctccgaggtagaactgcctgatctcgaccctgttgacgtaatcgggcttctggaggttgtcgatgacaggctggagcaggccgacgatccagttctcgatgcctgtgcggtagaccttccatagcttgccgagcaccatgttgacccattcgacggactccttgcgctggaggtccttctcctcgaggaagaaggagaagctggaggtggggacctggggccaggagccgttgaccttgagctcgcgctcggcgcggcggcgcttgcgcagcgtccagagcttgtcgaaggcggcgccgacgaagaagaagagggcgaagaggccgatgacgaagcggctgacgggtggcgcggggagcgggtggatgacgccgagctgggtgcggagcttggagacgagcgggtcctctgctccccggtaggcccccgcgggcgtgaagggggtgtcgagctggggcgcggtggagggggcgggggcctcgggcgggaggctggtggtggggagcggcgtcgtgcgcttggagggaaaggcggcggctctggggacgggaaggcatcggcatcggcggcgggggcggagggaggggaggaagtaggacgtggaggggctagcagcggagagggagggcggcggcggcggcgggatgccggcggagggggtcaacatcggggttcaccgacatccggg

SEQ ID NO: 35990 - DNA, 726 bp, Setaria italica
  Peptide Sequence Number=SeqID_101964
actacggtaggtaagacaagaccgccgaggaatccggagaagcctctgctgctgctgctgctgctgatgggacggacacaacaagcgcatggaccggtggaaagaagcccaagatccagagcacaccaacctctggctctggggatatgggcaaggttgcgagggatgacgatgatgatcattcttctgccaagattattgtccgagagcaagagcaagggccagagcaaatcgaaggcattgattgggatcaggataagctcgacgagaagatcgactgttatcttcagcagttgaaccgtggcctccctgatagcgacgatgatgactttgggttcactgtgatgacagacagcgccgggagatgaacgaacggctcgccctgtgccggatcagagcacatgaggaggaacaccggaaactggacgatgaaagtctgaaagcgatctaccctgcgaatgttcttgaagacgaggagtactacgagtcgtatgagctcgatttcgaatggtactttgatcctcaatactgcaactatgctcgcttgcaagactaccagcggcttatgcttcggaacaatgcaggaatttatgtggagtgttcgctatgataatacttggtataaatactatgttgttttctttggtgagatctggaagagggttgctaagcaaaagatgaattttaaagaggctttgaaggaagtgtattatgaaggaaagtata

SEQ ID NO: 35991 - DNA, 709 bp, Setaria italica
  misc_feature (36)..(36): n is a, c, g, or t
  Peptide Sequence Number=SeqID_101965
ggatgtactgctttggaatggcattgatgccatgcncaaggttactggcaatgggtgtgctaggtaacgttttcattgtgcatggggagtatgaggactgggaagaataccgaaaaacctgcagtacgcttgaaggtgaccaagcatctgtccagttgtgggaaaggttactaagtaacactaagttgattgagttcttccttacagacaactcatgtgagctgctaaaaattgagagtgtggccttctatcacgcgctgaagatagcagcagaactgtcctgcctttttaaggctctaattcacttcggcttcactgaatttatgtggagtgttcgctatgataatacttggtataaatactatgttgttttctttggtgagatctggaagagggttgctaagcaaaagatgaattttaaagaggctttgaaggaagtgtattatgaaggaaagtataccctgtgtaattctgaatggaaaactgagtttgagagcgacgatcctaatcctggtcctttggaacgtcttgtatgttacccaattcgcttatcatttcatctctctatctctctagttttatcatcggtatctaattcacattggttcacattgatgaaaaggtaagcttcatttgtctgagatcaaattctaactggaacattttcttcacattaaaggaacctgtgtgtctatctctgtaggctgaa

SEQ ID NO: 35992 - DNA, 365 bp, Setaria italica
  Peptide Sequence Number=SeqID_101966
cgaagcgcggcaacaggcagaggcaagcggacaaagacgagtccttgtgtaaggccagcgttcgacagcatctcatcgacctcccgagcctttgtttagcggcgaccggcacttcacgtacacggcggggtcgagctagggatcggagaggctagctgttttaatttgtggttgaggccgcgacgaccatggcgccggtagtgcacgccgcggggctcggcaccagcgggtccggcctgacgctgaacccggtggcggagcgggcgctcagccgccgcgcgtccacgctgtccacgcccatgtcgccaccgccggcgttcgggagcatcgtcaccgtgctaagcatcgacggcggcggcgtgcgg

SEQ ID NO: 35993 - DNA, 465 bp, Setaria italica
  Peptide Sequence Number=SeqID_101967
gttgactgtcctcttcttgctgtcgacccacgaggcgtagagcttgaggatgtgcttgtgctggagcgaccgcagcagctggatctccgtcttgaggcgctgcagctccttcggggatcccatgatccggccggttatctccactttggcccacgccacctcgatgccatcaactgcgtcgaagcctttgtagactgtcttgaaggcccctgatcccacgatctccttgtaccggaggtagcgaccggtggggtcgacctcgtcgacgtcggggtcggtcctcctcgtcgggcggctccgcctgcccgccgcccgccgcctccggatcgggagccatcgcgccggcgcgctccttctctcctcctcctccgccgccgcctcctctccacccgcgagatcggaatctgagccggcaattggtattagtcttgtaattcgtagtctagtcgtcgtagtacggtcggt

SEQ ID NO: 35994 - DNA, 456 bp, Setaria italica
  Peptide Sequence Number=SeqID_101968
agaataggttgttttccatatttgagtgtacagctacaagcattaaattatttttgccttcaaaagtttatttttccattatgtttgtgtgactaaaatactatgaatctacttactcatcacattgtcttcctgtctatcaggctgaatagagcaatacaagggacaccttaaaaggttatgcatggtgccataggtaggtaccttctatattgtgcctgacctaaatgatttcatcaggttcttgctgccacgagatactcatgtaatattcataaccttttgcaggcacctcacaaacatatttgtgattatgaaccctttaatatagaagaaaagttttggctcatgtgagctagcagcatatcagtaggcaattcgatttgttaccagcaataagtagatctgattcccagcggtcctgctagagtaacattttatgtcgtcagtgtatcc

SEQ ID NO: 35995 - DNA, 578 bp, Setaria italica
  Peptide Sequence Number=SeqID_101969
tattcttttgactgttctgaggaagagatggaaagacgtcttttggggcgcaatcaggtttccttcatcattagtcaattgtgtttttctttcctttagccacaaaattattgtttccaatatttcacgttgttgtttccaggggagagttgatgataacattgagactattaagaaaaggttcaaaacttttgttgaatcaagtctgcctgtcatagagcattataactcaaaggacaaggttaaaaaggtattggtgaattatcttgtcagggaaactcctattgcactctggtgtatagtgtgatgtcgtattatacaatagaaacaaagctagcaataagatgcatgccagcataaatatatggaggatatttttagatatatcttgttttccgctgagttaatgacaattatattctccagtttccattaattgctggcctttcttttggaatttgtccacattagcacctacagtaacttgttattttaacagattgatgctgcaaaaccaattcctgaggtgtttgaagacgtcaaagccatttttgccccatatgcgccaaaggctgaat

SEQ ID NO: 35996 - DNA, 399 bp, Setaria italica
  Peptide Sequence Number=SeqID_101970
aagaacaacaatgcacataaattgatcagatgctttcatgtgttccatgatcattctgcagggacatttttctttgctgtggctgtcagcctatgagcaatcaaccctgacattgttcttagttctgctgcagactgcattcaggacagggagcatgcactatgacagtccaagagatctgccaataaacttttttatgaggctttgactagcagcaatttgacgccatctggaaagtgtgggaactccaagcaccaatatgccgaaggatgacatgacaaatgctatgggcaacagaaagaggaagtatgcacctcccttgcaatcattcagcagtttaatttatgaagttttcatttgtctaagctactgttttttttcctgtctactttgtgtgtg

SEQ ID NO: 35997 - DNA, 622 bp, Setaria italica
  Peptide Sequence Number=SeqID_101971
gcaacattggtggccacaaagaagtcgaagaagtccacggacaacatcaacaacaagctgcagtttgttacgaagagcggcaagtacacgctcggctacaagaccgtcctcaggactctcaggaactccaagtgcgatggcggcggcggcaaggatgtaaacaaggttggcgaacacctcaaggggttggggatcccggacggctccaccagcagcgctgcaataacgtgcaataacgtgcttgtattgcgttgctaattttggagattttctcagtgattagagatttggaacactgatggatgccaaccttcgatccaagataatctttatggggatgcttctgcaactcttgcaatgtcttcaactctaatctccatgtgccactctgtcattacaggggatgcttctgcaactcttgcaatgtcttcaagaagggacagggagcatgcactatgacagtccaagagatctgccaataaacttttttatgaggctttgactagcagcaatttgacgccatctggaaagtgtgggaactccaagcaccaatatgccgaaggatgacatgacaaatgctatgggcaacagaaagaggaagttattgtctacctccctttgt

SEQ ID NO: 35998 - DNA, 695 bp, Setaria italica
  Peptide Sequence Number=SeqID_101972
accaaatggatgaattgatatggccattgtgtatgagtcaacgccatattgagtctccccgtgttgtgcatactgtacccgtgattgatatcacgggtaatgcacaagtggggatatcctgtctgtccattctttaccttagtttatagtattgatctgtatgtgaatagtgttaatgttgagtataattgtttagaaattatcttgtttaacaagtcttcttgatggtcttacctgctcaatttttttttggctaagcttttcccatggcacatctttcttatttttttgaagtatgtgaggatgtataaatttgtactgtactctgtctctctgcttgtagaaacagaatcataaccgttccattggctcaatttccttttccttaatttgtttaacatgcctacctgtctattgatttacagcgaagctggtgatcattgctaacaactgccctcccttaaggaagtctgaaattgagtactatgctatgctggctaaggtcactgttcaccacttccatggaaacaatgttgacctgggtacggcctgtggtaaatacttccgtgtgtgctgtctcagcattattgatccaggtgattctgatatcatcaagactacacctggtgaccagtaaggaagcggcatctgtaccccttctctgcatccgtctgttctagtgtagtagtggatct

SEQ ID NO: 35999 - DNA, 716 bp, Setaria italica
  misc_feature (711)..(716): n is a, c, g, or t
  Peptide Sequence Number=SeqID_101973
tcgttagttgaggtcatccccgagaaggagccgccgccgccgcgcaaaccctagcaggcttcgccgccgtcactcctcctcggggcgcaaccatggtggccacaaagaagtcgaagaagtccacggacaacatcaacaacaagctgcagcttgttatgaagagcggcaagtacacgctcggctacaagaccgtcctcaggactctcaggaactccaagtcgaagctggtgatcattgctaacaactgccctcccttaaggaagtctgaaattgagtactatgctatgctggctaaggtcactgttcaccacttccatggaaacaatgttgacctgggtacggcctgtggtaaatacttccgtgtgtgctgtctcagcattattgatccaggtgattctgatatcatcaagactacacctggtgaccagtaaggaagcggcatctgtaccccttctctgcatccgtctgttctagtgtagtagtggatcttgctggacttgttctttcatcttaaattgtgttaaacggcatttacctgccagtaaactgagttcttgggaacattgtcttggattgaaaattttgttcctggaaccgacactttcaacggaagtttgacctatggtcggcacagatctgagttcagtttttgttgctccgatatgatcaatttcgtgaagaataaaaaaaaaaaaacaaaaactagaacgnnnnnn

SEQ ID NO: 36000 - DNA, 207 bp, Setaria italica
  Peptide Sequence Number=SeqID_101974
cggcatattgattttactatttagccagcgttgagtatctgtaatacagcatttaagccaattaatcatatatatttgctggactgttatttgcatttaggtacttatgatcatgttgcataatgcttgcaggaagatatttcagaaatattcagagttgcagataaagataagtctggaaccttgactgtgaaagagattcaagac

SEQ ID NO: 36001 - DNA, 408 bp, Setaria italica
  Peptide Sequence Number=SeqID_101975
ggagctccacagctcgtccgttcgttggaagctacgagtcgttgcggtataaaccagagacttcctttgcttgggccgccggccatccccactcccatcctccagcgcctactttgccgctttgctctgctctgctgttggttccgagatcaccggagcacgcaacgcaaccaaccaaggaagaaagagggtgaacatgaggtgggcggcgttcttgtgggagggcgcgtccggcggcgcacgccgccgcccgggcgtctccaacctcctcctcgtcgtcgcagccgcaagtagtggaggcctcgtcgcttatgcggactccggatcagatgctgctgttgagaagccccagcttcctcagaggaagaaagttgtggtgcttgggactggttggggtggcaccacatt

SEQ ID NO: 36002 - DNA, 710 bp, Setaria italica
  Peptide Sequence Number=SeqID_101976
tttcttcggcatggacttttatgcaccatctgttgtacttaccaccggaacatttatgagtggtaagatttgggttggtaggacatcaatgcctgctgggcgagctggagaatcagcttctcatggacttactgaaaacttgcagcagctgggttttgaaactgaccgcttaaaaactggtacaccaccacgaattgatcgcaggacagttgacttttctggattggaaccccagcatggtgatgaagaggtaggttggtttagtttcgatcctgaatttcatgttgagagagagcagatgtgttgctatttaacacgaaccacaaaagagacacaccaaattgttagagacaacttagatgaaacaccaacttatggtgggtgggttgaagcaaagggaccaagatactgcccagcaattgaagataagattgtaaggttcaaagataaagagtctcatcagatctttcttgaacctgagggtagaaatgttcctgaactgtatctgcagggcttttccactgggcttcctgaaagattgcagttatcacttgtgcgaactataccagggctggagaactgtctaatgctaaggcctgcttatgctgtcgaatatgattacttacctgcatatcaatgctcaagatcacttatgacaaagaagtttgagggcttaattcttctctggccagataaaatggaacaacagg

SEQ ID NO: 36003 - DNA, 569 bp, Setaria italica
  Peptide Sequence Number=SeqID_101977
ctcacgcaaccctgtgctgacatacccaattttgtctccgagatcgagcaactcctgcaaagcaaagtggctgatcaccgtttgatggcagtggtaatacgcagggtgcaggatacaacagaagggaatgcatacttcgtatgtcatgttatcaacgtcaaggcgccaatcctggtagcgatcatacatgttcatacctcccagcaatactcttgtctgaaacatcatgatctcttcttcgaggccgccgggggagtgacggtacccgcgcatccggcggaggcggccggaggggatgaggtcggcaccgaagaagggggcgtcgaggtggggcggcggtggcgagtccatgaatgacgaggatatctgctcctgcacggtcgccctccgggacaagcacggcctctgttcaggtgagagctcatcaatacggcagaacatggcaaagattccatttgcgtaatacgagttaaagaattcacggcgcccagaaacacggagctaatcacattgacctctgagcaatattgacgaccgtccgtaatcaccacagttgtcaagattaaggg

SEQ ID NO: 36004 - DNA, 1000 bp, Setaria italica
  Peptide Sequence Number=SeqID_101978
tgtgcaaaacttttcttttgaaattaccctcaacaagaaggtatcagaattcagaacccatagatttgatgaaagagccagaaaatgacatttctttctgcaagatgcaacgaatggatgttgcgtttatataataatattatatataatgggctgtacaggaccacagatttcaccagttctacagaacgtgcatggagtttggatttcaagtcttggtgacagcagtcttgcaaactgggcaggtgttcttctgagagagccacttcttgatgcagtacacatggtagctatggccacagtccagccttcccatctcttcgttagcttcaaattcttcttgacagatactgcatttcctttccatttctgttgcaaaacggaaagagccgaaggatggttgtgtgaccttcctaatgctgcgagtaatctcatcctcacgcaaccctgtgctgacatacccaattttgtctccgagatcgagcaactcttcgtatgtcatgttatcaacgtcaaggcgccaatcctggtagcgatcatacatgttcatacctcccagcaatactcttgtctgaaacatcatgatctcttcttcgaggccgccgggggagtgacggtacccgcgcatccggcggaggcggccggaggggatgaggtcggcaccgaagaagggggcgtcgaggtggggcggcggtggcgagtccatgaatgacgaggatatctgctcctgcacggtcgccctccgggacaagcacggcctctccctgtgggacctctccccgtcggcgccgcggccgcccctccccaccatctggtgccgcgccaccacgcagtccaccgaggatgcctccgcggcgaagggtatcccgggcgcgcaccagacgtcggcgccgatcccgccggtcacgagcccaccacctcccgcgccccctccctagcctccgctctccaatggcgccctccctccccctccgccgccgccgcccatgccagtccgcgg

SEQ ID NO: 36005 - DNA, 971 bp, Setaria italica
  Peptide Sequence Number=SeqID_101979
ctcttagtttttttactcagtgtgagtagttttttggccagaagcccagaaaaaataaagataataaggatggtaaggttccaacaaaagacaaaacagctcataaatttactacaacaacatcacaactgaaaatgcaaccctaccagcatagcaattttcccaaccaagcacattaccatccaccaatattgtgtcgcaaaactcttagtccaggttgcttcacattactggttttccccccctttatctcttctatttcggcaagcacaggttcacataacttgacagcatgagcatgtgcgataccaggcacggcggcaaaattgtaaagcatcatctctacgacacatgggacttgcacacagacacagcaaactatacattgggaaactattgcacaaggagagacaagcgcgatggtacacatagatagcccaagcttgtccagttctctgtcacttgctcgaactgccatcagcggctgctaggaccttcttctcgagctcaggtttgttcgcaccgaccagcttgtcgatctgctgcccgttcttgaggaagaagaaggtcggggtcgcacggatatcccatgatgagctgaaatccatcaggtcatcgacatctattgtcaagaacatgagttgaggataagtcttcgacatctcagcatagacaggagcaatgacacggcatggtccacaccaggaagcgctgaagtttgccacaacagttttcccatctctgtttgcttctgcaatcttctgatcccagccctctttgcttgttatgatatgcacatttccacctttgaaatcaagcttatcttcgtcatcacgacgtgccttccctgcacagcctcccattgtgaactccaatcagcaaagcttgcacaccactgaaacaaaatgctgcctgaataaaggaaaaccagtcaatgtgtatccaatcaaaaattcatttccaaagatata

SEQ ID NO: 36006 - DNA, 463 bp, Setaria italica
  Peptide Sequence Number=SeqID_101980
tttctttagttcttcagcaagagcagcagcaactattgggaggggtgccaaaagcagtgcaaacggaatcatatacacaccaacagaaatgaacttgcttggagctgtaaggaagtagaggaaaaaggactgatggaacttttcaagcagattatttactgaacgcaccactccttccactaaccaggtataagagcattctccgagaggtatgtgtttttggcaagtgaagggaggaggaggagcgcaataatgcccgcaaagcaacaaataacactgaagaggatgtggtgagaggcaagaaatacaccaaggcgaacaatgagccgtggcttcggttgtgtctcttgcttggctgacgactccatgactgcaatttagttcttatataagaattatctttaaaatcagatcaactatgcactccccacaaagaacgcatcccgccgatggcacgtgggtt

SEQ ID NO: 36007 - DNA, 2819 bp, Setaria italica
  Peptide Sequence Number=SeqID_101981
ggaacgttggaagacgtaaacaattttctgttatgctctatgtctcggagattatacaacttctgaaagttgctgtacacactaacaacaaacttgtgcaaataatactcattgctgtgaagttctgatagaaacagttgcatgcctgaatgcacggcagagttcaatagccttagttatccgataagaagaatacagtaacaagaatggcaggcctagagtagttataacctgtcaaccttctaatgaaaggcaagcctttaccaactcagggaatcagttccgtacaatgacaaaccatgtaaatggtcggcaggtcaaaaatagtcagaaatatcttctgcactgctgtctacactttccaattttaaaataaaaaggtcctagagaccatacggctactcctgcttcatcttcgattccgattggcggcatgggtgcagcaacacatggatgcagagcagccagcaggggagatggacaagaaacaggtacagatacgtcgcgctgctccattcccacaagaactccatccacacccagaactctccaatgtctactgtccaggaccccttggacagccctttcattatcaacaatgcagctggaggaaaacctaacacggcaagagttatgtttgaagccaacagtgctgcacgaggaaggaaatttatcccagagcgagccttcagaggccgagaaaacagacacatcgggatcactatcagagccccaagctgcgctgtggcaaaatttatgattgacataagcccaagtcctatggagatggaagtgatcattgtagctttcagaagtttccactcaacaccagctgagtatggtgagccgaacatgacataaagggcaaccagtatgacgatggaaagcatagcccagatcactgcactttgcatcggtgtggcatcagggatctgagtaatgtagtatggaagtagagaaacgacaactgcccaaagttggataacaagcaatacttttgcagcttgaagccatttccatgatccacccttattactctgcagaaaatgagcactgccatttgctttactgtcatcaattgacttctctgccaatttttccatggttttactgccatcagcaagagcagcagcaactattgggaggggtgccaaaagcagtgcaaacggaatcatatacacaccaacagaaatgaacttgcttggagctgtaaggaagtagaggaaaaaggactgatggaacttttcaagcagattatttactgaacgcaccactccttccactaaccttcccccccttagaagaaataaagatttagcattctcatttctgacattaaatgttggtgaaaattctaaagaaactgcatcaacttgataatcacggaaagcgccatgggatcctgtaggcactccaagagcctggttgtatatagagttagcaaggtttgcagtcccctccacataatcagggactgtgatatcaagcttccagtctggatttatttttcttaacacagtcccaatggtatgaaaaaattcagcaataaccctaagccatgcagagctcagcaaagaactaaatgccgcgatgttcacacgaaaaccttgtctgtgaacagctaaatagtgtacgacattcagaaggtccaagtttggcatttgtccattagatgcctctgcatacatcataacactatctctgtcaccatatctccgggtttcaccaactttaaatatgagagcagcagccattgttccagcacgtttgaaagactcaaattctgccttttctgtattgccatcatatatatgatctgcaccatatatcttggtatctaatatcacggaatgactcaggaacactggattatggtactggtttaaccatgcagagactgcagtatactctccaaattgtgagtctgcggatagccacacaatatccttcgacagccatgctgctcggcttaagagggagaagacagagaaaccaagggccagggataataattcatttgagtgaactctctgagaattataaggagtaactagcactatcgcttcttttccatcgcctcgaggagctcgtataatgccaatagtgtttatcccaaaattgatgtcagtgccgttaggttgtattgccatgtgattcgacgtggaggtgaagaacttcagaggatgaaaatgcttgctatgagggaggaacttatggtaacatacttctgcacccagatcttctatttgttgtgcaatgaattttgccatatttatgccacccattgaatccccagccgcagcttcaattcctttcataaatctgtttgcttcaatggcatcttcagtagagtataatggatttgcagagccaggtataagagcattctccgagaggtatgtgtttttggcaagtgaagggaggaggaggagcgcaataatgcccgcaaagcaacaaataacactgaagaggatgtggtgagaggcaagaaatacaccaaggcgaacaatgagccgtggcttcggttgtgtctcttgcttggctgacgactccatgactgcaatttagttcttatataagaattatctttaaatcagatcaactatgcactccccacaaaagaaacgcatcccgccgatggcacgtgggttgcgttgccctcggtgccgagtcctctcgagatccttgctgccctcccgtgcgcgtcctgtgggctggaggaggttggcgtcttggggatggtctcgacggtcgccgtccttgtacgagagcccgtcctctaggaggctccccagccgcagccgctcggcgaggcaagg

SEQ ID NO: 36008 - DNA, 404 bp, Setaria italica
  Peptide Sequence Number=SeqID_101982
gggttgaaatggtttaaatagttctatgacagttatagatatacaagatattttttcaccccatgatgattgcatattttttcacatgttttttcttggttacactcttctataccttttgcgtgaaaaataaaagagaacccaggactgcacaattctttttctgacaaattttcattttcttgagccaaatcgccatgaataaaggaaccaagcgatccacattggtgaaacgacaagaagatatgccaagacaaatgtaacaggctcattcgctaaacatctgctgtatgtgtttgattccagagcatcatggagaaaaacttggaccttatgatgaaacttttgtgttgatgaaataaaaagcttgaattggtcatatggaatagaaatgcttgatcttg

SEQ ID NO: 36009 - DNA, 1205 bp, Setaria italica
  Peptide Sequence Number=SeqID_101983
aatggttgcatccttcccaagggcgtggagaatgagatacccctcatcaagcatgatcttgaagaaatcctagccattctctcaaacctcgatgacgaccatgctatggtggtgagatgttggagaaaggaggtgcgtgagctgtcctacgatattgaggatttcatcaaccagtatgagcatgctaaggctgggtcctggactggatccattcctcgccgtaagattattcagcggcataatagcaggacaactctctataggcttcgtgaaaagctcaggcaccgcctttggatagccaacaagattagagagttcagcgtgcgtgcgcaagaggtacttcaacggcacagtatgtataaccttgactccattgctggttcttcttccagaagatatgctggtgcgcactttacctcttcgcatcccacaccatgttgggacggcaacgctcttgttggtattagtgccactatggacaagctcgaagaggggctcatgaagatggatgatgaaggtcaccagaagctcaaggtggtgtctattgttgggtttggtggaatcggtaagacaacacttgcaaacgagctttatcgcaagcttggacggcagttcgaatgccgggcatttttgcggacctcccagaagcctgatatgaggaggattctcatcagcatgctctcccaagttcgcccgcagcagccacctgacaattggacggtgcacagcttaatttccaccatcaggacacatctccaacataagaggtacttcgttattgttgaggatttatgggctacatcatcatgggacattctaaaatgtgctttaccagatgacagttgttgcagcagaatattaataacaacagaaattgaggatctagcacttcaatcttgtggctatgaccccaactatatttttaagttaaacccgcttggtgaagatgactcaagaaagctattttttagttcagtttttggccctcaacaagaatgtcctccagaacacagggaagtttactgcgatattgtaaggaaatgtggtggtttgccgctagctattgttaccattgccagtatttttgcaggccagctgaatgtaaaagagcaaatggattatttaaacaaatccttaggttgtagtttgataacaaatgctacattggaaggtatcaaacaagtgattgacctaagttataacaa

SEQ ID NO: 36010 - DNA, 289 bp, Setaria italica
  Peptide Sequence Number=SeqID_101984
actttaactagctttactggagtccactgtgcagcttctttctttctcctgacaagaaagaagctgcacagtggactccagtaaagaacgaggaatcttaagttgtgttgaatcaatatttcgacctatttaccgaaatagaccccaacacggtgaagtcacttttgacattttgggggctagctctgtatccttgtcacacgactgtatagttatgtaagatggtgcctttgtatgtgatagtctcgggcaatggaatttttgatctacaaaaaaaaaaaaaaaaaaa

SEQ ID NO: 36011 - DNA, 821 bp, Setaria italica
  misc_feature (1)..(19): n is a, c, g, or t
  Peptide Sequence Number=SeqID_101985
nnnnnnnnnnnnnnnnnnnaaaggttgcacgaaggccggatttatttatcattgagctccatttgtacaagacggtcagtgactcggtgtatatacaaccagctaccggcacctcaaaaataaaaaaagaaagaaagccgaaagggcgctctgttaggtaaagagcatccctgaaaccggctaaaagcttcgtcgacgatcgacctgctctgctgcgacggcaccgctcgatgctacgctgcagccggcagcagcgtacaatactaccgctacaaactctttcgtcactctccttggtccctgctccgtacttacaaaaccgtatacacaacgtcggtgttcgtggccgtatccttacggcgatacacgccccgttcgccatggtctgctggtgcgtgtcgcttcaggttggctgccccacagcacgggctccgccgccgctcacgatccacgggtgagcgaggacttgctcagcggtgaacctcctccactcgtcacggcagatcatgcgcctcatcaggtccttggcggccggggacacgccgccgaacagcctgggcgggaaccgcacgctgccccgcatcacggccgccagcacctccgcgccgctctcgccgccgaaggggagcgcgccgccggagagcagcgtgtacatcaccaccccggcgctccacacgtcggccttggcgccgtactcgccgccggacacaacctcgggcgccacgtagtggggcgtccccaccagcccctccgcgcggccaaggccccccagcccacccacgccgcggacccgaagtccgccaggcgtgcgcgcggcgccg

SEQ ID NO: 36012 - DNA, 500 bp, Setaria italica
  Peptide Sequence Number=SeqID_101986
ggcaagcagatgggcttgagtgatcaggacattgttgccctctctggtggccacaccttggtttgttgctgtccactcatgtttgcttcatcattgtgtaatatgtatgcatgcattgatgttgttttcttgtttttctttagggaaggtgccacaaggagcggtctggttttgagggggcctggactagaaaccctttggtctttgacaactcttacttcaagtgagtctacagtacttgttttaaaaaaaggaaatttggaattaattaagtgatgtttgtaactacctttgttatctcattctaggcagttgaatgttattagacactaataagccatccgatatttctgtagggaacttgtgagtggtgacaaggagggccttcttcagctcccaagtgacaaagccctgctgagcgaccctgccttccgccctcttgtggagaaatatgctgcggtatgcctccagttcaattgtcatccagagtttggagatat

SEQ ID NO: 36013 - DNA, 748 bp, Setaria italica
  Peptide Sequence Number=SeqID_101987
gggcagaagggtttcaaggatataaggcgctacaagtgtgaattttgtcactgttgtcaggtcaaagaaatgcttgattcaagctcacatggttgcacatcataaggatgaactggacaaatcagaaacatacaactcaaatggagaaaaagataatttgcgaggaggaacataggtgcccagagtgcggagcttgtttccagaaaccggctcatctgaagcagcacatgcaaagtcactctaatgagagactcttcatttgcccacttgaagactgccccttcagctacaaaaggaaagatcacttgaatagacatatgcttaagcatcagggcaagttgtttggttgtactgtggatggttgtgataggaggttcagtatcaaggcaaatatgcaacggcatgttaaagaattccatgaggatgaaaatgtcactaagagcagccaggagtttatttgcaaagaggagggctgtaacaaggctttcaagtatctctcaaagttgaggaaacacgaggagtcacatagttaaattggactatgtggaggtagtgtgctgtgaaccaggctgcatgaagatgtttacaaatgttgaatgcctgaaggctcataaccaatcttgccatcagcatgttcagtgtgagatatgtggggaaaagcacctgaagaagaacatcaagcggcacctacaagcccatgatgaggtgcccactggtgcaaggatgaaatgcacctttgagggttgtg

SEQ ID NO: 36014 - DNA, 751 bp, Setaria italica
  Peptide Sequence Number=SeqID_101988
aaaccggctcatctgaagtcagcacatgcaaagtcactctaatgagggtatagatagttaacagcgtgaagcattggatcccatttaaagaactccaaaatgcgatgaggcaatttttcatcttgtctgaactagtagcaggttgggatgaccacctgtgaagcttcaacaaggttgcctccttcacgctcattgagtagagactcttcatttgcccacttgaagactgccccttcagctacaaaaggaaagatcacttgaatagacatatgcttaagcatcagggcaagttgtttggttgtactgtggatggttgtgataggaggttcagtatcaaggcaaatatgcaacggcatgttaaagaattccatgaggatgaaaatgtcactaagagcagccaggagtttatttgcaaagagagggctgtaacaaggctttcaagtatctctcaaagttgaggaaacacgaggagtcacatggtatgttggtactgacagaaatataactaggatattaaattgaatgaactgaaacttagttgctgttaagttcatgaggtctgcagttttttccccagctttttgggatccccaaatttgagtgttttctttgtgatattttcttgcagttaaattggactatgtggaggtagtgtgctgtgaaccatgctgcatgaagatgtttacaaatgttgaatgcctgaaggctcataaccaatcttgccatcagcatgttcagtgtgagatatgtg

SEQ ID NO: 36015 - DNA, 668 bp, Setaria italica
  Peptide Sequence Number=SeqID_101989
aagcttctgtgatctctcccaccgccgcatcgcattctccgatccgaagctccctgcccgcagccatggcgaagtgctacccgaccgtcagcgctgagtaccaggaggccgtcgagaaggccaggcgcaagctccgcgccctcatcgccgagaagagctgcgcccccctcatgctccgtctcgcgtggcactcggcggggacgttcgacgtgtcgacgaagaccggcggcccccttcggtacgatgaagaacccggccggagcaggcgcacggcgccaacgcgggcctggacatcgcggtgcggatgctcgagcccgtgaaggaggagttccccatcctctcgtacgccgatctgtaccagcttgcgggagttgtggccgtggaggtgaccggtggacctgagatccccttccaccccggtagggaggacaagcctcagccgccacctgagggccgccttcctgatgctactaagggttctgaccatctgaggcaggtctttggcaagcagatgggcttgagtgatcaggacattgttgccctctctggtggccacaccttgggaaggtgccacaaggagcggtctggttttgagggggcctggactagaaaccctttggtctttgacaactcttacttcaaggaacttgtgagtggtgacaaggagg

SEQ ID NO: 36016 - DNA, 295 bp, Setaria italica
  Peptide Sequence Number=SeqID_101990
aatcctgaactaagagaatacaaaatgatatagaggcaactgtgtctggataaagtaattcgacaagttcagagccaaaacgtgaaacaaaaaaggcgtcaatttgcacaacaatttgtgcaaactgtcgggtaacataaaaacaacaagatactagcaatctagcactcatcttctcaagaaccgctgcatcgcctcggtcactagctagtgatgatcgaagccatcaaagatcacttggcgaagagcacgtccatgtcctcgaggctcctgcccctcgtctccggcatcccgg

SEQ ID NO: 36017 - DNA, 479 bp, Setaria italica
  Peptide Sequence Number=SeqID_101991
aaggacctcatgcgccgcatgctctgcaaggacgtctcccgaaggttctccgccgagcaagtcctaagtaagaagagcagcccatgcccatgtccttatcgactccgttgccgcccttgttcttgaacagcatatgcagatctggtgattctgatcgtcgatggaaatgtttgctgatgattggcgtcgttttcttctacctgcagggcacccatggatcgtgacccgaggggggagtgcggcgtgacctgctgattcagatcatcagatgctccgcttcatccgtccgcagtgtagataagataatggcgttcgtcgaagaggagtagggagcgaccttttgcagtggatttttgcttcgtttctggcaatcgtcgatggacagtagtgccggtagcagtaatctagcctaggcgagcactcgtgaagcaggaatttgggggcttccgtgagtttgtctgtcaatgttcgtctcgtcg

SEQ ID NO: 36018 - DNA, 844 bp, Setaria italica
  Peptide Sequence Number=SeqID_101992
tcgcgcaccgcgacgtcaagccggacaacctcttcttcgacgccggcggcgcgctcaggctcggcgacttcgggtccgcggggtggttcggggacggccgccccatgacggggctcgttgggacgccctactacgtggcgcccgaggtggtggccgggagggagtacacagagaaggtggacgtgtggagcgccggggtggtgctctacgtcatgctctccgggaccgtgcccttcggcggcgccaccgcgggagagatcttcgaggccgtgctccggggcaacctgcgcttcccgccgcgcgccttcgcgggggtctcgccggaggccaaggacctcatgcgccgcatgctctgcaaggacgtctcccgaaggttctccgccgagcaagtcctaaggcacccatggatcgtgacccgaggggggagtgcggcgtgacctgctgattcagatcatcagatgctccgcttcatccgtccgcagtgtagataagataatggcgttcgtcgaagaggagtagggagcgaccttttgcagtggatttttgcttcgtttctggcaatcgtcgatggacagtagtgccggtagcagtaatctagcctaggcgagcactcgtgaagcaggaatttggggggcttcctgagtttgtctgtcaatgttcgtctcgcttgctctttgtttttgtaacccgtgtacagtcgtcttcgttctggctcaagaagagagaactagacttgttcggcagagaatggacccccaaagagcaagcgagacgaacttcagttcagttgcgtgttccttccattttgctagcgaatctctgtgcttcctatatctgaaccttg

SEQ ID NO: 36019 - DNA, 334 bp, Setaria italica
  Peptide Sequence Number=SeqID_101993
ctttctttgtttctaaggccttccttctagcaatgctatatatcttgcttcatacaagtgcagagtcttggattcagatggtatcagcacctccgcgggctggaacgggaggagcggcagatcgagcgacgacagcggcggcggcggcagggacgacgcgcagcggacggcgcggagctggcggcggcggggtagccatgcgtggaggggaggcacgggcctggggctcgggtcttggggcgaccgcggcgagctggagggggaaaggaggcggaggggagcggaggcggccatggccgcgccggggtttcagcggttgggaatagcccgtggg

SEQ ID NO: 36020 - DNA, 193 bp, Setaria italica
  Peptide Sequence Number=SeqID_101994
gcttgcgtgcttgccgccggtggtggcagcggaggacggccgtgaggaagaggacggcggtggccagcaggacggtgaaggtggccgcccatgatgggggtactggtacctccattattgcagactgcagagtgcagaggccaccgaaaagctttgcttgcttgattgatgcactgtggtagacgatttgtag

SEQ ID NO: 36021 - DNA, 291 bp, Setaria italica
  Peptide Sequence Number=SeqID_101995
tcaagagggggcaaaataccccaattcttggccccaaagtcaggaagggtggcggcggggggagcgcggtgacgtcggcgtcgtggaggtggacctggagtggcacggcgccgccccagacccgccgcgccgcctcctccgaccacgccgcggcctcctcgtgcgcggcggccattgccgccgccggcgggcagatctcgtggcgcggggcctgtccccagggctcgctggaccaatccgcttcgcttcgccggcgtcgcgtagcgcacgcgagaggggaagggagggaga

SEQ ID NO: 36022 - DNA, 467 bp, Setaria italica
  Peptide Sequence Number=SeqID_101996
acccaatacaacctacgactctaactaacatcgcgccctgctgcctcgccttcctcaccattccgtggtacgccgtcgagctgcccaggctgcgcgccgccgcggcgtcggcggcagggctcgcgcgccccgacgtgttcgtgttcgggaccaactcgctctgcgccttcgcgctgaacctagccgtgttcctgctggtggggaagacgtcggcgctgaccatgaacgtggccggcgtcgtcaaggactggctgctcatcaccttctcgtggacggtgatcaaggacaccgtcacgcccatcaacctcgccggctacggcatcgccttcctcggcgtcgcctactacaaccatgccaagctgcaggggctcaaggccaaggaggccgagaggaaggcggcagccacagcggtacccaagccggatgacgcggaggcagccgcgcgcctgctgccggagaaggacggc

SEQ ID NO: 36023 - DNA, 1096 bp, Setaria italica
  Peptide Sequence Number=SeqID_101997
tacaaacgaacgaacaacgacgaaggtcttctagactgaatcaagtaccttgtgaaatcgcagaagtatctcacaagacattgcatgaggatattatagttccatcaccttcttccactttaagtgttcagaaacatcatggaccaaccgctggaaaagatacagggaagtcactgcaaaatgaatgcagtgcagtagtgcatgaagaattaatgtcttcagtagtagaggaaattgagataaatgaacaaccacaaaagggagtgaatttgaaggtacaagaagcttgttccagcgttaccagagttgaggctcatcaaattgatgttaaggcctgcgacaccaaacatagccatttggctagtcaatcatctgtgccatttaatatcactgagccccccaagccaccagaagacacctgtatcaagaggagctcaaacaaacagaagttggcattatgtgaaactggagaagctgtagaggatgtaaattctaagtgtggcgtgactatcagtgagcaattgcgccaagaaaagaagagaaaatctcaaaggagaggaactgcaagattgaattcagtatccgctgagaacacagacagcgcttttgagactctgcaagaggatgtcattgctcctttggcctcttccagttcgattgcctccatggagcaaaagacaactcaaaagcagaatgatgcttgttcttcgatgaaatctactgaggggcaggtggtggcagggaggaggtctttgaggcgggctgctgaaaaggtcgtctcttacaaggagatacccttgaatgttaagatgcgacgaccttaactaccaggagagccatccattgcactgtgatttgtgtagacatgttgtagtttactttctttgctagcctcagcaggaagctttcttgtcattttttgttgcagaagtagtgactcactgcacctttagctctgcttcaaacagataatcgaaacctgttgcagccttgtcaatagctcttgctgccgttcttgttctgattgtgtagtgttgcagctgatactagcaggagatgtaccactgtgttgtttgagaaaattattaattttgag

SEQ ID NO: 36024 - DNA, 199 bp, Setaria italica
  Peptide Sequence Number=SeqID_101998
gaggcagactgccagtcgtcttgctactggctgcttcttgcttccattgacatcgatcatactcgtagcacctacagaggctgcttaataattagaatatattatatagagatccggccggtcgacatgcccatggctctcgagtcatggctcaccaaggtccgctcggccatgtcctccgccaagtcttcaggggccg

SEQ ID NO: 36025 - DNA, 775 bp, Setaria italica
  misc_feature (296)..(296): n is a, c, g, or t
  Peptide Sequence Number=SeqID_101999
gtagtagtattcacaattaacaggtcactataattagggattgctggacatgtggacagtgctaaagtttatgtttctctatttgctgagaatgtaggtatgtttcttgtgtggttggatgcccagtagatggaccagtaccaccgtcaaacgtagcttatgtagcaaaagtgcttgattatttgggttgattgccctttcccatctgcacagacctgatgtgttgcagcttgttccgtctatccaggcaccgtggttccaatgcttgaggccaccatgtccgcggttcctgtggngaaacttgctgtccatttccacgatacctacggccaatcgctctcaaatatcctcatctctctccagatggggatcagcgtcgtggactcctccgtcgccggcctcggcggctgcccttatgcgaagggcgcgtcgggaaacgtggcgaccgaggatgttgtgtacatgctcaacgggctggggatcaaaatgggtgtagacctgggaaaggtgatggcagccggcgagttcatctgcaagcatctggggcgccagtctggttccaaggcagcgaccgcactgagcaaggttactgcaaatgcgtcgaaactctgaggcttagaaatttaccatgatccactatcgcaggtaacagctgtaaaatgggcccgagattgtgaaataagcaatgctgttctgtcatgaggtgtctgttcaagacaacaaataaatactacagcaatgctattctgccattagaggtggcacctctcatgcc

SEQ ID NO: 36026 - DNA, 643 bp, Setaria italica
  Peptide Sequence Number=SeqID_102000
cagggatttgaggctgctattgcagcaggggcaaaagaaattgcaatatttgcatcagcttctgaaggattttccaagtcaaacataaactgcacaatcaaagagagccttgcgcgttataatgatgtcgctcttgctgcaaaagagagagaaattcctgtccgagggtatgtttcttgtgtggttggatgcccagtagatggaccagtaccaccgtcaaacgtagcttatgtagcaaaagagctttatgacatgggctgctatgaggtttcacttggtgatactattggagtaggtaccccaggtgacgtacattacatttgcaaccaccctctgccccctcccttttcttgtgtttctgagagaaatccatatgatagcttataaggtaacactctttatagggcttggagatgcttatacatatgacaactttatgtttttttaagacaaacaagattttttcctgcataatgctaatctgtttcaataaagtttaaactaaccagggcctattacactttcaaatatggacccgtttatactatatagaccatatcacttggaaaaagataactgtaaaccatgaggcacatgtaaaccccaatcttctctttataccatatctattgtctttgtattt

SEQ ID NO: 36027 - DNA, 1717 bp, Setaria italica
  Peptide Sequence Number=SeqID_102001
cccatttccccgcgttgaaagctccttgccccgtcggctgccgctccgtccctcgatcccgcactccaggccgccgatcggtatggcgcgctgagcccccgtgcgcgcgcgcgtctcggcggccggcgggcacgatgctggcggcgtccgccagggtctgctctaggctcgcttctccgcacgcctcctcgcccgccggtgctgctgctgctgctacagcggcggcggcgctggcgagctcccccgtgctgggatccgggatgagcgcgctcgagaggcagcccgctcctccgggcgccgggttcggcgacacggggaggggtcccgcggccgacgacccgccaccgcggcactgcacctcgtcgggcgaatcgagggaaggatatcagttgagtagagtgccatatcaaaggcatccgatgctagatcggggcacagtgactgctggatcaaaccatcatgtttctgccgcaagctgttcctcacagtatcatcagagttacagatatttttcatcctcttctgatcaacagaggatatgggctggaaacaagcatatatgtgatctgccaaggtgtgtaaaaattgtcgaagttgggccacgagatggacttcaaaatgaaaaagacattgtaccaacacctgtaaaggttgagcttatacggagattggctgcctccgggttaccagttgttgaggcaactagttttgtatctccaaaatgggtaccacagctagctgatgcaaagaatgtcatggaagcagttcggaatattgagggtgtgcgtcttcctgtattgaccccaaaccttaagggatttgaggctgctattgcagcaggggcaaaagaaattgcaatatttgcatcagcttctgaaggattttccaagtcaaacataaactgcacaatcaaagagagccttgcgcgttataatgatgtcgctcttgctgcaaaagagagagaaattcctgtccgagggtatgtttcttgtgtggttggatgcccagtagatggaccagtaccaccgtcaaacgtagcttatgtagcaaaagagctttatgacatgggctgctatgaggtttcacttggtgatactattggagtaggtaccccaggcaccgtggttccaatgcttgaggccaccatgtccgcggttcctgtggagaaacttgctgtccatttccacgatacctacggccaatcgctctcaaatatcctcatctctctccagatggggatcagcgtcgtggactcctccgtcgccggcctcggcggctgcccttatgcgaagggcgcgtcgggaaacgtggcgaccgaggatgttgtgtacatgctcaacgggctggggatcaaaatgggtgtagacctgggaaaggtgatggcagccggcgagttcatctgcaagcatctggggcgccagtctggttccaaggcagcgaccgcactgagcaaggttactgcaaatgcgtcgaaactctgaggcttagaaatttaccatgatccactatcgcaggtaacagctgtaaaatgaccaaccgtaatagtacgacttactagtaggaagaagacttagactagtactttacgtaagtaataagcaatgctgttctgtcatgaggtgtctgttcaagacaacaaataaatactacagcaatgctattctgccattagaggtggcacatttctagccatcttcatctggctaaataagcacaa

SEQ ID NO: 36028 - DNA, 245 bp, Setaria italica
  Peptide Sequence Number=SeqID_102002
attagaggtagaacaagcacaagtgttacaaagctaagctccacagctcgtcgccaatggcgtctgcttccctcgcgtcttctgtcctgtgcagcagcagcggttctaccagtagaagcgcagccgtgccgagggcgatccggatccctctcttccccaagaaccagcacaggccgcctcttcggcctctcaggagtagctcggtagctaggcgatcactgcagcaggagcaggaggagagggcc

SEQ ID NO: 36029 - DNA, 411 bp, Setaria italica
  Peptide Sequence Number=SeqID_102003
gggaggtggtggctttgggtccgtattcaaaggcaagataggcaagcaaactattgctgtcaaacgcttggagggtctcgagcaaggaatggaagagttcttagcagaggtcaagacaattggcagaattcatcactttaatctcataaggttggttgcttcttgtctacgaatacttgtccaatggctcgttagacaaatggatctttcccaaaagtacagtcttcactctctcttggaaaactagacgtgatatcatattgggcattgctaggggtttgtcttaccttcatgaagaatgtgagcaaaggattgctcatttggatatcaagccacagaatattctcttggatgacaaattcagcgctaaggtctcagaccttggactctcaaaaatgtattaaacagggt

SEQ ID NO: 36030 - DNA, 398 bp, Setaria italica
  Peptide Sequence Number=SeqID_102004
tgcaggcagacttgaaaccaagaaccgctcaatattatatttatgatgaagaatatatctttaatttcgagaccaaatggaactggaacatgaacggaagcagatatcaggagtccattaacaacaccaacaacagcagatctaaggtgtactggagccctccagacaacagccatacagagactgacagaatttaaggtaagcctttctttcagcctgtttgcttcagctacttgcttgggaggcgtaccgagtcgtattgaggaagttcacgggggaggggtgagaggggcgacgcaaggctgggagggcggagggcggggcagatcgagcgcccagcaaatcgcgaagaagatgacgatgccgaccttggcatcgcagagcacgctgatctcccg

SEQ ID NO: 36031 - DNA, 359 bp, Setaria italica
  Peptide Sequence Number=SeqID_102005
aggcgcgtaccagcctctgcccacggtcgcgcccggccctgatgtacttggtcacgcggcacctcaactgcaccgcgaactcgggctcgccgccgctgccgatcgctttggtctgcgagggcgtgtcgaggcatgtggtgctggcctcgacacggcgcgtgatcaggggcgatccgttcttcccctgcctcctccacgccccacagggtcaggtccgtgaacaggtaaaggaaaacaccaggatgccatccacggccgcggcgtcgggacctctcggcgaggtctcatcggcagcggggctccggtgggcgtccccgatcggaacgaggacttgacaggctaaaggtaggcctgctaac

SEQ ID NO: 36032 - DNA, 188 bp, Setaria italica
  Peptide Sequence Number=SeqID_102006
tgctgcgcggaaccctgccggcggctgctgccgccgcatgccattggacggcctgcaccaatccgcgacggagtagtgtcctgcagctgtgaagttggtcgatgttggtaatttctcgagagaggaggagagaaataaaaggagactgacacacgggtcccattttctctggagctggatccgtgctt

SEQ ID NO: 36033 - DNA, 652 bp, Setaria italica
  Peptide Sequence Number=SeqID_102007
tttaaggtgaagcacgggtcattagacatactgacatttcaacttctgctacatccagtaactaagaacattaagcaatcggaacaaacaagtaaacagatatggcaagaccaactttattcgacataaacctgaaaccatcctaacttaaccgtttcttcgtgtgccaaagttcgtcttcattttatttcagagcctttgtgctagccgactctgaccacccggcacctacgcttcagcagctaccgcgatcaggggctcgcgacccgcgcgcgccgcggacggagagctagagagctactagcagctgggcacgggcaccttgcaggcggtgaacaccctccgcttgtgcctggtgtcgacgaggcgcttcaggttggcgtcgtccttgaaccggcacaggcagttgggcccgtgggacttgagcctggcgcagcaggcgggcgtcggggaacccttccccgcgaacgcgctcgcgcacgggttcagctgcatcacgtcgcacggcgccagcgccgagaagtcggccgcggcgtggctggcgaggaggctcaccaccaccgcgacgaggaggaagacggccggcctcatcccgacgatcgcaggtggggttttcgctggactgggactgggaggccacgagtaagttcgt

SEQ ID NO: 36034 - DNA, 727 bp, Setaria italica
  Peptide Sequence Number=SeqID_102008
gccaccgcgccaggcattcagcggcggctagcagcatttagcatcaagaggaatacccaactctagaatcctggctctgccactgccacactgccgcttcgccctcagcgcgcctgcccgcaacctcccgagcgtaccccgccatgcgtgccgaggccacccagatcagtgccttcaccacggcagcagcgcatgcgctctgcttcgctgggctcgctgtcgcccattcactcgctggccgcggcattcttgtctctgaccctgcgctcgccctccgcctcctcgtggtatgtgaagcgcctgttgtcatcgcagtgtttagctacctccggcgtgaccccagaagctgctcgtttttcaaggctgctgcgagaggattgattggcttgcccgttggagcatttcttaatgcatttggagccatagttcttggtgcacctgttggaatcaaatactggacggttactatttattggtcacttctcatgtcccttttcacgtttgttcctgcagcatgtgtctttggaacatccaagattgattggcagaatgtgctttctcactccatttatttcacgccaactgatattgagaattacatgatctctgcaccttgtcatggagctgtgctaggtgcatggctcggtgcttggcctatcgcccctgactgggagagaccttggcaggaatggccaatctgtgtcacttatggtgcagttgctgggct

SEQ ID NO: 36035 - DNA, 1225 bp, Setaria italica
  misc_feature (1214)..(1225): n is a, c, g, or t
  Peptide Sequence Number=SeqID_102009
ggagccatagttcttggtgcacctgttggaatcaagtaagtctagattcaggaaggagttagcctatctttttacttgatccgtaggaatcatgactaggattggtgtctgcagtgttttgctctataactgtatcttgcatagcttgctgattggttttgtaatttcacatagtcctttcctccttctttccctttttggccttgagccatgcacgtgtacatattctttctttataaatcaaaaatttcagtagggggctcccctgctgtttgtctaaaaaaaactgtatcttgcatcggatcaacaccatgacatttcaatttacaggtactaacagttccttgcttgattaaattgtgcatttgtagatactggacggttactatttattggtcacttctcatgtcccttttcacggtaagtgccattttcgttattaacttgtactaaactgaggacttggcactcgagcacaacgagattgccactggagaattagtaatgtcttgtgctgatactcctgtactcaaaagtttaccactttgtatttactaaataactgcagcaatcgaggcagggaagctaattttattacctttcagtttgttcctgcagcatgtgtctttggaacatccaagattgattggcagaatgtgctttctcactccatttatttcacgccaactgatattgagaattacatgatctctgcaccttgtcatggagctgtgctaggtgcatggctcggtgcttggcctatgcccctcgactgggagagaccttggcaggaatggccaatctgtgtcacttatggtgcagttgctgggcatttggttggaatggtggtgtcatgggtcttaatagctgttcacaagagaagcggtcgtgcaaaagctgattagatgatgagtgctgccgtgctttcttttttcctctcttttcctggttagacacgacttatccagattcctgtagtgtacaactgttcttcccacaaagatttttttttaattagctttcttgttatagtgtgagtaccgatggctttcaatagcttcatccaagttcacattgttagctccttcagctagccttttttgctgatgtacattattttcttgaatgtaatgataaggatgctgtttagctttttctatagagaagagaaaaaaggttagaaaagacttaaagttaagtaaaaaaaaaaaaannnnnnnnnnnn

SEQ ID NO: 36036 - DNA, 423 bp, Setaria italica
  Peptide Sequence Number=SeqID_102010
ggcgcaggccgcgcagcgtcgccattagccgccggacgcgccgcccgctcgtgtgcacaagttgggggtgcgagtgtttggggtttcgttagcgggccagccggcccactaccaatggtgatcagcaaaattggtccaaggaaggagaggaacaaattcacaacgaaatgctaactccttgccttcgtaccagacttttctgaaacaatgtttcaaaaacgattctgggagataatctctttgcagatcaaggcattgtaagttgttcctcgctcttgagtcttcacacttgaggttcttgagcaaatgaaattggatagggacctggataagacaagcagtccccaacttgtgcacacgagcgggcggcgcgtccggcggctaatggcgacgctgcgcggcctgcgcctccgaagccacctc

SEQ ID NO: 36037 - DNA, 270 bp, Setaria italica
  Peptide Sequence Number=SeqID_102011
gcgctctcgaggatgcgctggacggcgccgctggcgcaggcggcgcgcagccgacgcagcgcccgcctgtacatcgccgccagccgccaccggaggtgcagccggcggagcgccgtccccaggaacctgcgacgcggcctgacgtcgccaccgagcctggccaccgccatcttcctcctcctcctccccttcccctgcagcgccatccacggcgcgcggctagcaacggcgtggccggacaccatttgccgcaggcccctcatctcctac

SEQ ID NO: 36038 - DNA, 504 bp, Setaria italica
  Peptide Sequence Number=SeqID_102012
taggtggacaagatgcagatgaattcaagcatcgatcagaccccgagtgttcgaagaggaagaaaagaggagaactctgtaaaaggagataagacggatgcgacatcagcaccactgacgccgactccgttgacaccgactccgttgagacgctccaaccgcctccgcaacaaggtgatttcaccttgagcaagacgccggtcgaccctggatggctggttccttttggggtgtgggggacagcacctagttgttacccaagaatgcaaagctttgtctggtgaacttcagaagctaggacagtgttacctgaaaatagctgcagtattacgtttggttttctgaaaaccccgtgaaatctgtattgactccttttagtgctcatgcgcttgtatttctcgtactgatggctacacttaatagtggagtaatttgtaatgaacaaatcggtggtattctagtttatccaagtcctaaatcggtggattatgctagttaaaaaaa

SEQ ID NO: 36039 - DNA, 275 bp, Setaria italica
  Peptide Sequence Number=SeqID_102013
tttttttttaagtaaaacattctgcactcgtttacaaacttccatggtacaaaattcgagacaactgaatactcactggatcaagggtacagacgcagttacaagaaaagtacaaggaaacaagggtgtaaaaaaacaatctctgtatcctagctacctgtagatacgatacgatcatatgaaccatcgatcagaactgaataatcatattcatatatacactctcttttgcctctgtatacaattggaatgacaattccgtcgtcgacgcagga

SEQ ID NO: 36040 - DNA, 385 bp, Setaria italica
  misc_feature (356)..(356): n is a, c, g, or t
  Peptide Sequence Number=SeqID_102014
tactctgttccaacttcactcctaccatgacattttgatgcttggatcaatcgacaattttccttgcgcatcctccaataagcagcagtggaagatttgttcaccttctcttttgttacacttgcagagttctctacatctaaatgtagctttttgctaccagaggattggcgaatacagaaaatccattgaaacatgcaataaggtgctggatgcaaatcctgtgcatgtgaaagctctttatcgcagaggaatgtcctacatgttactaggagaatttgatgacgctaggaatgattttaagaagatgattactatcgacaagtcgtcagaaccagaagctacagctgcccttnttaaacttaagcaaaaggaacaggaagct

SEQ ID NO: 36041 - DNA, 237 bp, Setaria italica
  Peptide Sequence Number=SeqID_102015
tcagtggcattgaacctgagccttatgtggaaggggagcatttagttcaggttagtggaaagctcattgtgctggatcttgttctgaagaagctccatgagctaggacatcgtgttttgttatttgctcagatgacccaaacactggacattcttcaggattttctggagctgcgcaattacacttatgagcgcctggatggttcagtacgtgctgaggaacggttgcagcaataag

SEQ ID NO: 36042 - DNA, 205 bp, Setaria italica
  Peptide Sequence Number=SeqID_102016
cggacgcggtcgagacgaagatccaaggtcaccggcgagccgacggggagcacgacgatgtcggcgtcgggcttgtccttgaggatcaccttcttggcctcctccacgctcatccccaccacctccggccacgacgtcttgccgccgccggcacaccgcacttgttccgtcgaggagctcatattggttgctggtcgatcgctag

SEQ ID NO: 36043 - DNA, 283 bp, Setaria italica
  Peptide Sequence Number=SeqID_102017
ggttgcactgcggcggcggcggcgactccggcgggcggcctcgagctccggctcgcccaaccctccgctctccatcctgggcagtcaagcgccgtccgaagctcctccgtccgcgccgaccgtcctctactgacagtcggttgcttgctggtcggatacgccggcgctggagtgcttcaaggcgatcgagcagcggcccggccgggctgaccagctcctgttctggtgcgagtattggtaatgattcagaagcctgtatctctgggtaattgatccgttttag

SEQ ID NO: 36044 - DNA, 467 bp, Setaria italica
  Peptide Sequence Number=SeqID_102018
tgacctttttttaaagattgaacatgtgatacacaattttctgtggcagcgcgaaagaacaaatcgtaggggtagagcgttcaacaccaacatatgttacctcgccactgtcatagtttgggtcatttcggtcaaggcaggcttctgcatcagtatcaataagtttgccccaagtccctttgccaccagcaccatctgcaacagaatgctcagcaagtcagatatttgaatacagtggaaaatagagatatttcagcatttttctatcttggaagaaatagaaacatggtggtactaatcttaggtataactcaatgtatttactagaactaatgtaactacatagggcccaactatgtgtttgcatttagatcatagatggttagtcaccaattttatgcataaaaactcccaaggactaggcaactgacactccatatcatgcatgtgccttctgattccgatgc

SEQ ID NO: 36045 - DNA, 402 bp, Setaria italica
  Peptide Sequence Number=SeqID_102019
ttgcgcttgtgcgtaggtagaggagcgagcccctcctggttgcgagacgctacggcctgcgccctgccttctgcttcagcttcatacttctccaaccagctgttcaagccacagccgaaatgccgaacgagggcaggagccatccgctcttcttggcacgctccacgtaggagaggaacttctccctggcatcaggaatgtcgagagccaggtcgtccagcccgtccctgacccttgagaaccccttggtcatctggttgatggttatgatgccttcaccgaagcactcctgcaacaggctcagggtcctctcattcttcttctccatcgccatcacgagagccttcttcgacaacttcatggttgaagaaagacattccagctcgcggatgcagttgcatg

SEQ ID NO: 36046 - DNA, 2697 bp, Setaria italica
  Peptide Sequence Number=SeqID_102020
ttttggagcacggtaaaatttttacaaacacggtcttttctctttgttttcacttgatgtaaaaaaaggttctatggagagttaaaatggaatgaaacaagaacagcatgagcatatgtcagatgcgacacctagacacacaagccaccaccaccgcaaccaggaggggctcgctcctctacctacgcacaagcgcaacgacacacggacagaaacgcaagggaactgggtcacagttgcgagacgctacggcctgcgccctgccttctgcttcagcttcatacttctccaaccagctgttcaagccacagccgcaatgccgaacgagggcaggagccatccgctcttcttggcacgctccacgtaggagaggaacttctccctggcatcaggaatgtcgagagccaggtcgtccagcccgtccctgacccttgagaaccccttggtcatctggttgatggttatgatgccttcaccgaagcactcctgcaacaggctcagggtcctctcattcttcttctccatcgccatcacgagagccttcttgacaacttcatggttgaagaaagacattcccagctcgcggatgcagttgcatgcttcccctacatcgcctccactctcgtattcctccaggagctttgttatcttgtccttggcatcctccacagcccatccagttccaccaccccagcatctgagaagcctctcacctgcatggcgggctgatgcaagtgagcgtgccatgttcaacgtttcagccccgctgcagtttggtggaagcttgctgctgatctcatctaagtttagaggcgcgagaacatcatcaatcacagctctggctaggaacagtcccagctcgtctgaggcatccaatatatccagtgcggtgtcctctgcagattcaaggagcattatgaatcccttgacgatgtcttcagtagagaatagctccatgctcaatgaggatagaagaaccgacgccatctctttctctctgttcttgcggtccaaagcaattgttatgagcttcttgatgaaaattgggttatattctggataaccaagctctttgaggctacggataacctctgctgtatcatcagaaaggaagtactcgtgaactatagatacagcctccctcttgtaccttgccagcttctcatgttcatcatcttcaacacttccgttggcacctgaactcatatacgaagaatctagccatccctcagatgttgcttttgataccaacagctgaaattcagattttgcagatgggatatcaagaatgagatcatcaagactctcagcaacacgagagaatcctttcatcatctgactagagcttatcagacattcttcagatgcttccttcagaagcttgacaataagagcttcagcagctgggctctccattccaagcgtaagagctcgcttcaccacctcgtgatgaaaaaatggcactgccaactctctaatgcacctacatgcctcagctgtatcaccatttctgatgtattcctttagaagatcagcaatcctcttcttcacctcttctactgtgatgtgagttgaaccaccccatcgtcgctcaatcaactctgcatggtgaggtgctgaaaggtagctcttctctgcaatttgtacaacctgcaaaccctttgaggactctgagagagtcacttttgccttgctgaggaaagcaggtggcaaaatgtcatcaacaactgcacgtgcaatgaaaagcgcgagcacatcaaccacatcaggtatgtcaacagccaaatcatcaacagcctctaacagcagcacaaagcccagtctgatttgagttgaactgatcacattgccataaagagatgatagcagcacagacgccatctctttctccttgtcatgcctgtccattgccatggaaacaagcttcttgacaaagtaacggtggaagtcatcataacccaactctttaagatcagaagcagccaatttgacatcaccattgctgaaatattcctcaattattgggacaacagatttcttgtagacttctagtggggttgtaacaggggcttcaactaactcatatggctcctcgccactgtcatagtttgggtcatttcggtcaaggcaggcttctgcatcagtatcaataagtttgccccaagtccctttgccaccagcaccatctttcttcaccttgatggtcttcccggaatgcgagcggcgcacgtgcctcggtcccccgcctccgcctccgcctccccctcctcccccgcccccgcccctacccgcggccaccgcggcggcggcggcggcgcgcttctgctccagcatctgcagctcgtactgctgcagcagcgcggaggtggagccccccgtgggcgagcgcggggaggcgagcgagagcgtctccgcgttctgcaccgcgatccgcagcttctcccgctggtcctgtgtcaggaaccccccgtccttcttcggcgacgccatcccctcccgatcctcctcctccaccaccaccaccaccacccgccaccacctagggtttcggccgcggatcgagccggcgccgccccacagccccgtgcgtgcgcgagatttgtgtgcgggactacgaagtgatgatggattaatttttttcttcctttctctctccccactcctgctgccggttttgttttgttttctagagagagg

SEQ ID NO: 36047 - DNA, 607 bp, Setaria italica
  Peptide Sequence Number=SeqID_102021
cccgccgtaccgcgtctcggcggacgcgtcccggttcggggaccgcgcgtcggcggcgcggatggccaggatcgcggcggactcgttcctggccgtcgcggcggagctcgggaacgacacggcccgcgacgagctgcggtggttcgtgatgggcgacgacgacacggtgttcttcccggacaacctggtggccgtgctgcgtaagtacgaccacggggagatgtactacgtcggggcgccgtcggagagcgtggagcaggacgtgatgcactcgtacggcatggccttcggcggcggagggttcgcggtcagctacccggccgccgccgcgctcgccaaggccatcgacggctgcctcgaccgctacgtgtacttctacggcagcgatcagcgcgtgcaggcctgcctcgccgagctcggtgtcccgctcacccgcgagccaggattccaccaggtggacatccgcggcgacgcgtacgggatgctggcggcccacccggtggcgccgctggtgtcgctgcaccacctcgaccacatccagcccatcagcccgcggggcaagactgcgctggaggcggtccggccgctggtgggcgcgtcgcggcgg

SEQ ID NO: 36048 - DNA, 732 bp, Setaria italica
  Peptide Sequence Number=SeqID_102022
taagtacttacttagtaaattgtaattgtctactagtagttggggtcctaagttctttctatttcttggtatttcttttgttcaagattacaaagcagcagatgccagggaagcagaaaacatagtggaacgagttacaccccgtctccaacatgcaaattgtgcggttgttctttctgctgtcaagataatccttctacaaatggagctcattacaagcacggatgtagtccggaatctctgtaagaaaatggcgccccctcttgttactcttttgtcagcagagcctgaaattcagtatgtggccttgaggaacattaatttgatagttcaaaagaggcctacaatacttgctcatgaaattaaggtcttcttttgcaagtacaatgaccctatatatgttaagatggaaaagctggagattatgataaagcttgcctcagatcgaaacatagatcaggtgctcttggagtttaaggagtatgccacagaggttgatgttgactttgtgcggaaagctgttcgtgctattgggagatgtgcaattaaattggagcgagctgctgaaaggtgcatcagcgttttgcttgagctgattaagataaaagttaactatgttgttcaggaagctataattgttatcaaagacatcttcagaacgactaaccctaacaacgtaacgaagtaactaaataacaaattaaagaaacgaaaacaaaactttaaagtaaa

SEQ ID NO: 36049 - DNA, 987 bp, Setaria italica
  Peptide Sequence Number=SeqID_102023
ccgatctctcaaatcgacaaaatccccgaactcctttccagcctctctgccctccccacccacccgcccacgcgcgccagatcacgcgccccagcaccgcgaccaccggcgccgccgcggcgtccggagcaggcggcgagcgtcgtcacgcagcgtaggctcgtctcgccggggcgggcaagatgagcgggcacgactcaaagtacttctccaccaccaagaaggggggagatccccgagctgaaggaggagctcaactcccagtacaaggacaagagaaaggatgctgtcaagaaagtgattgctgccatgactgttggaaaagatgtctcatcattgttcactgatgtcgtgaactgcatgcagactgagaacttggagctcaagaaactagtatatttgtatctcatcaactatgctaaaagtcagcctgatcttgccatacttgctgtgaacacatttgttaaggactcgcaagacccaaatccattgattcgtgctttagctgttaggacaatgggttgtatccgtgtggacaaaatcacagagtatctctgtgatccacttcaaagatgcctcaaggatgatgacccctatgtgcggaagactgcagctatttgtgttgctaagctttatgatataaatgctgagctagtggaggacagagggtttctagaggcccttaaggatttaatatctgataataatcctatggttgttgcaaatgccgttgctgctctggctgagattcaagacagtagtgttcgtccaatctttgaaattaccagccatacactgtcaaagcttctgacagctctgaatgaatgcacagagtggggccaagtcttcattctggattctttgtcaagatacaaagcagcagatgccagggaagcagaaaacatagtggaacgagttacaccccgtctccaacatgcaaattgtgcggttgttctttctgctgttaatactatgcttctacaaatg

SEQ ID NO: 36050 - DNA, 2569 bp, Setaria italica
  misc_feature (2525)..(2525): n is a, c, g, or t
  misc_feature (2532)..(2569): n is a, c, g, or t
  Peptide Sequence Number=SeqID_102024
taaattaaagaaatagacaaactagtacgaagacgaccttagatagtacactggccaagcttctgaaagctctgaatgaatgcacagagtggggccaagtcttcattctggattctttgtcaagatacaaagcagcagatgccagggaagcagaaaacatagtggaacgagttacaccccgtctccaacatgcaaattgtgcggttgttctttctgctgtcaagataatccttctacaaatggagctcattacaagcacggatgtagtccggaatctctgtaagaaaatggcgccccctcttgttactcttttgtcagcagagcctgaaattcagtatgtggccttgaggaacattaatttgatagttcaaaagaggcctacaatacttgctcatgaaattaaggtcttcttttgcaagtacaatgaccctatatatgttaagatggaaaagctggagattatgataaagcttgcctcagatcgaaacatagatcaggtgctcttggagtttaaggagtatgccacagaggttgatgttgactttgtgcggaaagctgttcgtgctattgggagatgtgcaattaaattggagcgagctgctgaaaggtgcatcagcgttttgcttgagctgattaagataaaagttaactatgttgttcaggaagctataattgttatcaaagacatcttcagacgctaccctaacacgtacgagtctatcattgcgacactttgtgaaagtctggacaccttagatgaaccagaggctaaggcatcaatgatctggataattggagaatatgctgaaagaattgacaatgctgatgaacttcttgagagcttcttggaaacattccctgaagaaccggcattagttcaactgcagctgctaactgctactgttaagttgtttcttaagaagccaactgagggaccgcagcagatgatacaggctgttctcaataatgcaacagttgagacagacaatcctgatttgagggatcgagcttacatatactggcgacttctctctactgatcctgaggctgcaaaagatgttgttttggcggagaaacctgtgattagtgatgactccaaccagcttgactcatcacttcttgatgagctgctagccaacatttctaccctttcatcagtttatcacaagcccccagaatcatttgtcagccgtgttaaggcagcgcctagggcggacgatgaggagtttgctgatacagctgaaggagggtattcggaatcaccatcacagggagttgatggggcatcaccttcctcaagtgttggcacttcttctaatgtacctgtgaaacagccaggagctggatccccacctgctcctgctgcaatgccagaccttttaggtgatctgatgggtatggataatgctattgtccctgtcgatgaagctgcagcaccttccagccctccgccacctgtgttgttgccttcaactactggccaagggctgcagattagtgcacaactgacgcggcgtgatggccagatatattatgatatatcttttgaaaatggaacccagggtgtcctagatggatttatgattcagtttaacaagaacacatttggtcttgctgctggcgaagcacttaaggttcctccacttcaaccgggagcaacaacaaggacacttcttcaaatggtgccgttccaaaatatcgcccctggtgcaccaaactcgatactgcaggttgccgtgaaaaataaccagcagccagtgtggtactttaatgacaaaattccattgcatgttttcttcggtgaagatggaaaaatggagagagccagttttctcgagggctggaaatctttacctgatgaccacgagtttacaaaagaattccctggctctgtcatcagcagcatagatgcaactgtcgagcgccttgcagctgcaaatgtgttctttatagccaagcggaaaaatgcaaacatggacgttttgtatctatccgccaagatgccccgtggaattcccttcctaatagagattacagctgcggtcggtgttcctggtgtgaaatgtgcagtcaaaacggcaaacaaggagatggtccctctcttcttcgaagctatggaggctcttaccaagtgatgacaacgttaacggatcagtgtgtctacaaaagtcgatcggttgatgagctgccataggcctttggatgcgggaatttttttcacggaagctggtgtgagatgtatttgttgttttgtattagattacagtatttaaactgctagtttcctggttccaaagttttccccccagaaatactggagatgttccgttcctgtctcagcatgatttgtatatttgcccatttgggctcgaaccttttcttcttgttaatgcatagcacatgaaatataactagttttcgacatagctgatgtaacagaggatacaatgttgttttgattcacccctgactaccttctgctaccatttcttctatggagtaagaatttaagaaaaaaaaaaaanaaaaaannnnnnnnnnnnnnnnnnnnnnnnnnnnnnnnnnnnnn

SEQ ID NO: 36051 - DNA, 600 bp, Setaria italica
  Peptide Sequence Number=SeqID_102025
ctggacctgtccgtgggcgggatgcccgggcatgggctcggcggcggcgggccgtcgctggacctcgacctcctcggcgggtgcccgccggggatgccgttccagatgccggcgcccgtgacggagatggagaggcccatgatggtcgacatggcggcgcgcgccatggacgagctcatccgcctcgcgcaggccggcgagcagctctgggccaagggcgtcgccggggacgcgagggagacgctcaacgtcgccacctacgacagcctcttcgccaagcccggcggcgagttccgcccgccggacatcaatgtcgaggggtccagggactcggcgctcgtcttcatgagcgccgtcgcgctcgtcgacgtcttcatggacacgaacaagtggatggagttcttccccggcatcgtgtccagggcgcacaccgtcgatgtcctcgtgaacggcttgggcggcaggagcgattcattgatcatgatgtacgaggagctgcacatcatgacgcccgccgtcccgacccgcgagttcagcttcctccgctactgcaagcagatcgagcagggcctctgggccgtcgccgacgttcttcccttt

SEQ ID NO: 36052 - DNA, 450 bp, Setaria italica
  Peptide Sequence Number=SeqID_102026
caataaaaaaactagcaataacgactgatgcataaactgcactaaatcagttaactaactctccacaatatcctctaaaattaaataaacacaccaaaagtaaccaggtacctttggaagacatccatcattaaacaaccattaataaatccattaagaaccaaatgatatgaaaaactccatcttgaggcctcgttcttttactgcacccaaatcaagaacttagtgcaatgagaccacaccttgtgataaacagaatcagaccttgcaaattaaaacaacgaatccagtagaactagtttatgcaaagcctgctccagaacattgcactagtctccagaattggaaacattggcaaaagtgaaatctcgataccagttcaataatcagtttgaaacaaacccataagacctaagatggggcagacacagctgcaacggcgatagtgaa

SEQ ID NO: 36053 - DNA, 151 bp, Setaria italica
  Peptide Sequence Number=SeqID_102027
acagcgggtggaactcgacgacggagagcatcctgtcggggtgcccatggtgtgctggcccgggttcgccgaccagtacatcaactcccggtacacgtgcggggactggggcatcgggctccgcctcgacgaggcgctgcggcgggagcag

SEQ ID NO: 36054 - DNA, 596 bp, Setaria italica
  Peptide Sequence Number=SeqID_102028
gcaggcgcagcaggcggtgccggcgtgctccgtggaggggtgcgcggcggacctgtccaagggccgcgactaccaccgccggcacaaggtctgcgaggcgcactccaagacgcccgtcgtcaccgtcgccggccagcagcagcgcttctgccagcagtgcagcaggtttcattcgctcggggagttcgatgatacgaagaggagctgcaggaagcgccttgatggacacaaccggcgccgccgcaagccgcagccggaccctctcaaccctggaggcttgtttgctaaccaccatggagtgacaagattcgcggcgtacccacagctcttcgcttcatccttggcagatcccaaatggccggtcgtcaagacggaggccgacgtgttccaagaccagtactacccagccgtccacctcaatggcgccggctccctcttccacggcaaggaccggaagcacttcccattcctgaccaaccaccaccacggcggcgaatcggcgggggccttcggcagccagccattcaccatcaccaccgcttcctcagagagctgcagcaagcaaagcaacggcaactgtgctctctctcttctgt

SEQ ID NO: 36055 - DNA, 510 bp, Setaria italica
  Peptide Sequence Number=SeqID_102029
tcctgtggagaaagcatccagtactgggagtgacaagaaacttccgagttactcagggaagaagggcaaaagatcgaaaaggaagcgcatggtgcagtaatcgttacaacctaattggatgtcagttttgttacaactggtaactgctcttgaccctcaggtagtccccataatgaagcatgtcacaaagaaccagggttgaactttcccgttttgcaaaattgatagctagttccttactggtcttttttccagtaaattcaaaattccttggagctcttactaaatacttaatgatcgcatccaaatcatataaaaacaaccgacagttgtactttgatttttttttttgttgctagaaaagtgagcaagatggctccccaagtcttatctaataatagttcgttgttgcaggttaattcagttgaccagttcagtggcacagttgatctcagcagacaattttgatggtctcttggaggcctaaatttgaggtgctgacaaataggc

SEQ ID NO: 36056 - DNA, 336 bp, Setaria italica
  Peptide Sequence Number=SeqID_102030
tttcaaatgtagcaaatgagggctgttgacagaaggattttttctggattccatcattgggaggccctacaacaattgcagctcggcaaagtggtgctggaatttcgtggctcttcccatttgtggacggtcatcctccattaggttggcatgacacaatatgttatcttgtgttgcctgtgctacttgttgcttctcagtttgtctctatggagataatgaagccaccccaggtgaatgcttccctatatactttttcattgtgcatattgccaattgtacaatgctatggtttaacttccaatctgtggtctgctacagagcgatgacccatca

SEQ ID NO: 36057 - DNA, 885 bp, Setaria italica
  Peptide Sequence Number=SeqID_102031
tttatgattggatatttctctttatcagtgccatcaggattgtccatttattggtttacgaacaatgtcctcagcacagcccagcaggtgtggttacggaaaatgggggagcaaagcctgcagtcagtgagggaggtagcggaataatcacagcgggacgtgcaaaacgctctaatgctcaaccagctggggaaaggtgctctggacttcattttaatacttagactttttatgttttggttccatttttcacatacaatctggcaagcaggtttagggagctaaaagaagaagagaacaggagaaaactcaacaaagcacttgctgcaggagattcaaaagcatcggcatcaacgtatgactcggaggatgaagagtcagatgatgagaccacagaggagggaggacctgtggagaaagcatccagtactgggagtgaccaagaaacttccgagttactcagggaagaagggcaaaagatcgaaaaggaagcgcatggtgcagtaatcgttacaacctaattggatgtcagttttgttacaactggtaactgctcttgaccctcaggttaattcagttgaccagttcagtggcacagttgatctcagcagacaattttgatggtctcttggaggcctaaatttgaggtgctgacaaataggccatttctgggggtcacacgtatatgctcagtatatgctaggctttgagagggtaatggacaggagaacaggagtcgagtatatggacaagcagagagaaaggatctgtagaagtagataagagatactcgtgtatgctgtaagctggttccaattgggccgaatctggatattccagactatcggtatgcattcctttcttctcatgtaacctattaaacca

SEQ ID NO: 36058 - DNA, 1763 bp, Setaria italica
  misc_feature (1702)..(1702): n is a, c, g, or t
  misc_feature (1704)..(1704): n is a, c, g, or t
  misc_feature (1707)..(1707): n is a, c, g, or t
  misc_feature (1717)..(1717): n is a, c, g, or t
  misc_feature (1722)..(1722): n is a, c, g, or t
  misc_feature (1740)..(1763): n is a, c, g, or t
  Peptide Sequence Number=SeqID_102032
ggcgtgcgcggtgagggcgggcctccacgggctggactcgctcgcgggaccccacctccaggccgcgctggagcgcgccgaggccgcgctctacacgctcgccgacgccgcggtcgtcgcggccgacgcggcggcgggaggaggggacgccggggaggcggtgacggcggtgcagaagaacggcggctggttcggcttcatctccgaggccctcgaggtcgtgctcaaggtgctcaaggatggtctgtcagcagtccatgtgccatactcttatgggtttgcaatcattctgctgaccatcattgttaaggctgcgacgttgcctctaaccaaaaaacaggtggaatcaactctggcgatgcagaatttgcagccgcagattaaggcaatccagcagagatatgcaggcaaccaggaaaggatacagctagagactgctcggttatataggcaagctggagtcaacccgttagcaggatgttttccaacattggcaacaatacctgtctggattggtctttaccaagccctttcaaatgtagcaaatgaggggctgttgacagaaggatttttctggattccatcattgggaggccctacaacaattgcagctcggcaaagtggtgctggaatttcgtggctcttcccatttgtggacggtcatcctccattaggttggcatgacacaatatgttatcttgtgttgcctgtgctacttgttgcttctcagtttgtctctatggagataatgaagccaccccagagcgatgacccatcacagaaaaccagcctgctcgttttgaaatttcttccatttatgattggatatttctctttatcagtgccatcaggattgtccatttattggtttacgaacaatgtcctcagcacagcccagcaggtgtggttacggaaaatggggggaggcaaagcctgcagtcagtgagggaggtagcggaataatcacagcgggacgtgcaaaacgctctaatgctcaaccagctggggaaaggtttagggagctaaaagaagaagagaacaggagaaaactcaacaaagcacttgctgcaggagattcaaaagcatcggcatcaacgtatgactcggaggatgaagagtcagatgatgagaccacagaggagggaggacctgtggagaaagcatccagtactgggagtgacaagaaacttccgagttactcagggaagaagggcaaaagatcgaaaaggaagcgcatggtgcagtaatcgttacaacctaattggatgtcagttttgttacaactggttaattcagttgaccagttcagtggcacagttgatctcagcagacaattttgatggtctcttggaggcctaaatttgaggtgctgacaaataggccatttctgggggtcacacgtatatgctcagtatatgctaggctttgagagggtaatggacaggagaacaggagtcgagtatatggacaagcagagagaaaggatctgtagaagtagataagagatactcgtgtatgctgtaagctgggttcccaaattgggccgaatctggatattccagactatcggtatgcattccttttcttctcatgtaacctattaaaccattgtttgggggggtatattgcgtaagctcacaaccatccagtcatacaaattaaatgagttttaatacaaaaaaaaaaaatgtaatttaaaaananaanaaaaaaaaanaaaanaaaaaacaaaaaaaaaannnnnnnnnnnnnnnnnnnnnnnn

SEQ ID NO: 36059 - DNA, 237 bp, Setaria italica
  Peptide Sequence Number=SeqID_102033
ctcatcctcgctcctctcccctcctagctaacttacccccctccggagaagaagaagacgccgccgccttctcactcctcgcaagcacgagcccaacccaaatcaagcagattgactttatcgtcttcccccaccccctctcgaccgatttgtcaaaagaggaagcgctggcgagggatttataaaagagggggcggcggctagaggccagagcgggcgttgggcgttgctgctggc

SEQ ID NO: 36060 - DNA, 406 bp, Setaria italica
  Peptide Sequence Number=SeqID_102034
ccgcccttggccttcccggcgagcgggtacgccatgtcccactgccggacgcgctccccttgctggctcttctccgaggactccttcacgaggaggctcaggtccacggcgttccggccgaggtcgagctccggcgcctccacggcgacggccgacacgaggaacggccggggctcgaacttgagcggcttccccgtggcgccgccgccgctgcagtagaggtagcaccggacgaagagcgtctcctcgaagtcggcgccgccctgctgcacgcgcgacggcatggtctgcacggcgccgtcgcgcgactccttttttcgcacggccacggcgaggcgcagcccgttcatggacggtgggaggccctgcgccgccaccacctcgacggagaagaggcagcccatcc

SEQ ID NO: 36061 - DNA, 749 bp, Setaria italica
  Peptide Sequence Number=SeqID_102035
tgcgcgacgaggagacgggcgcgccgatcgacgacgcggcgcgggtcaggcgggtcgagtccaggctcaggcacgtcctccgcggcggcgcgcgcggcgccaggacggtccttctcgccgacgccgcggccgtcaacatggaccggcggctccaccagctgctcaacgaggacggggaggccgggagccgcgccgaccaggcggaggcgcccacgacgacggcggtcgccgtgcaggattggggggagagggggtactcggtggtcaccgtgagctgccgcgaccggcccaagctgctcttcgacgtcgtctgcaccttgacggacttggattacgtggtgtaccacggcacgttcgacacggacggcgatcacgcgcagcaggagttctacatcaggcggttggacgggcggccaatctgctcggcggccgagaggcggcgcgtgatccaatgcttgcaagcggccatcgagaggcgcgcatccgagggcgtgaggctggagctgcgcatcaccgaccgccgcgggctgctcgcctacgtcacgcgcgtgttccgggagaacagcctctccgtcacgcacgccgagatcaccaccaggggcgacatggccatgaacgtcttccacgtcaccgacgtggccggccggcctgcggaccccaagaccatcgacgacgtgatccagaagatcggcacggagagcaacggaagaagacctaccgggtaggaacacctatgcctccacggaggg

SEQ ID NO: 36062 - DNA, 338 bp, Setaria italica
  Peptide Sequence Number=SeqID_102036
gtggaggcaatgatggtggaggtggagcacggcgcggtggtggcgggggcagagcgggtggcgggggagcacggcgaggcggtggagggggcagagtgggtggtggcggagcacgttgtggaggtggaggagcacggatgggtggtgggaagcgctgtggcggtggcggggcttgaggccgcggtgttggcctcggatagtaagggtttggagggaagtaggggaagcctagtccaggaggattagggttgaacgccattgttggatgagagagagcgcgcgctaggaggccttggtgctccgagcaagagaggtcactgtgctgctgctgtcgtgcg

SEQ ID NO: 36063 - DNA, 386 bp, Setaria italica
  Peptide Sequence Number=SeqID_102037
tctcagactcagtgtgagtagggccgggcaaactgtggtatttttgtgtccagtttggtggagactagaacagtccttgcaagatcaggatcaacctgcatcaccactctccgtgtagttgcattactccaatcactgcaatcttcaaggcacagtattatggtctctttatgctggattttagcacgaacaaggctctcaacagcagaagcctggctctgcaaaactcggtttttacggccaggagctggaagaatgaggcctggagtgtcaataacggtgagattggggcaatgcttgtattctacctttattatgatttccttctctgaaaattggcaagggtcattctccaacctcatgttttcagcttcaatatatgcctg

SEQ ID NO: 36064 - DNA, 856 bp, Setaria italica
  Peptide Sequence Number=SeqID_102038
agatactggtgatgatcaggctgcactgctaaatccaggattcaaagcactaacccaaattgttcaggatgatgtattcagagaatttgagtttagacagtacatatttgcttgccaggctaagctattgtttaaattgtctcgtccaattgaggttgctgccagaggacatgcttttgttgttggcttttccaagacacttgccttgcatgaaaactctcttccattttgcttccgtgaagtatgggtgataactgcatgtttgggtttgataaagtctacaacttcgcattatgatggtggagctgtttctgtggactcagagaaagaattctatcgtcttcagggtgacctttattctctctgccgtattaagtttatgaggcttgcttacttgattggctatggggttgagatagaaaagagtccagtcaacagtgcatctttaagcatgctaccttggccaaagccagctacatggccttcaattccacctgactcatcagcagaagtaatggaaaaggagaagatggttcttcaagcaaaatcaagagaaaagctcttcaacattcacaggaaacctctgccattagaaccttctttacttctacgtgaggctaataggcgcagagcttttctttctgttggaaatctgtctgagttatatgactcagctgatggttcaggtttagatgcaaattcaaaactttctcccaacagatctgcttctaacttcatggcaagaacaatgtcaggtccagcaacgtcggaaacttctctgccagttgatcgacccatgaggttgtcggaaattcatgttgctgctgaacatgctctgaaacagacgatatcagat

SEQ ID NO: 36065 - DNA, 446 bp, Setaria italica
  Peptide Sequence Number=SeqID_102039
tgcggattcccaaatagagaacagaacatccgtagactcccggcctgggcagccaggtgcaatgcagtgttcccgtcattgtcttgcatattcaaaatccaagctaacgaccgagttctgcaagcgaatgaaacaatattccgtctcgatttctcaacagcaacgtgaaggaacgttcgtccaatgctatcgcgcaatccggcactgctcggacagtacctgataaatatagcgacgacctttttattaccaacagaggcagcgatgtgtataggatacaatccacacttgtccggttgatacagtgcggctggatttgcttccagtagtctccggacttcttgggcacccagagatgctggaaacggaacacgaatccagagaatagtatggataacccatgttgtgtttagtcgtgatcgagatgacatgaagtgaaggggcgt

SEQ ID NO: 36066 - DNA, 587 bp, Setaria italica
  Peptide Sequence Number=SeqID_102040
taagaacaaaataagaacaagtagttacccgtacaattagtacttagacaataattacaaaaatccaaagctaacgaccgagttctgcaagcgaatgaaacaatattccgtctcgatttatcaacagcaacgtgaaggaacgttcgtccaaccgtattcgagatgacatgaagtgaagggcagtacttccgttgcagtccccttgtgaagtaagtttctggttccagtccaacagcttttttaccatctctgtgcttcgcaatacggcagcatgcaatgcattttgcccatctggtccccaatatgagagaataccttcactcttatcatacagtgtctgtgcaatgctttcctcctcctgcaagatggctagatacagagctgaagagcctttttctgggaaacaagccaagctgggatcagcctccaggagcaccttgactatgtctttatttccgatacggacagcctcatgcaaggcggtctccttactattattctccttccttaggagttcttcaacaatattgttgtctttggaaagaccaataagatgagacaccattttggtcttcccagcccttgct

SEQ ID NO: 36067 - DNA, 744 bp, Setaria italica
  Peptide Sequence Number=SeqID_102041
gtaataagctgggagcatcttcagaagcatcttcacttcagatttcttcatcgtttttatcatgtaccgatcatcgtttgttaggtagaaaaagcttccactcttaccgggagatgaaagctcccggagagcctcatttccacatagggataacatatagtcagcagcatccaccttgaacagcttgcgcaatgtccggaacacctgtgggcagtaatccttccatctgaagtcacaagaattgtgtggaggtgtgtattttgagccttcaggagggaactttgtccatactttttcctttgggtcaaaagccgacgatttcagatcaagcacaattgggccttgcttccccactgcgtgcctgatcccgagctgcaagtttagcatgagctcgtagtgcttgtgacccttggcgatggtctccccttgccgcttcgcctcccgcggaggcacccactgggtgatgtgcggcgccggcgaggacggtggcagcccccggtcgtcaccaccgtcgtccgtcctcacgctcctccgcgcggccaccacctcgtcccccaaggcaggcccatccacaatgtcgcaagtgatgtcgccgtcagactcccaaatgcaaatcttgtcgtacttcctgtcgccgccggagctgttgctcagcccggacaccgagctcgcccgcccgttggtcatcctgttccccgacgatgtccgtgacttgcgcggcgacgccgagttggagcttggtgc

SEQ ID NO: 36068 - DNA, 280 bp, Setaria italica
  Peptide Sequence Number=SeqID_102042
cgtgaagcaccccggccgcgggaggcacgccgcccacggccgcccccgcctcctcctcctcctctgcctcttctcgtccccgccctccccgccgatctccatttttttcactccctctgactcggccggcgggcgttcggggctctgattcttttttatgggcgcgcggttggattctggaagccgaccagagtgcgccagaccaagactggagcaggtctttctgttcagctccgcgcgatgcgcgaccccggccgcgaggtggttggttgccgaggcg

SEQ ID NO: 36069 - DNA, 245 bp, Setaria italica
  Peptide Sequence Number=SeqID_102043
atcctggaccttttcttggcgccgtcgcgtaaaccgcacgacgccaccggcttgtgctgcgccggcttgtcgtccatctcggtcgacgaggtggacgccagggagagcggcggcgactgcggccgcggcagtggcggcggcggcgagtacgctgccgtcaccgcggcagccatgacatgggagcgcatgtggccgcccagcgcgcggccattgtggaacctccggaagcagagcttgcaggtgtg

SEQ ID NO: 36070 - DNA, 260 bp, Setaria italica
  Peptide Sequence Number=SeqID_102044
cgactaagaacaagatcgactactgccgcctccacggcatcgagctcgcgcacatcactgcgcgcctcgacggccagctcacgggcggctgggccaagctcccgctgctgcgccgcctcatgctcgcgcacccggaggtggagtggctatggtgggtggacggcgacgcgctcgtcaccgacatggggttcgagctcccactcgcgcgctacgagggcgcccacctcgtcgtccacggcaattcctacctcctcttccag

SEQ ID NO: 36071 - DNA, 392 bp, Setaria italica
  Peptide Sequence Number=SeqID_102045
ttgttttcttattttaatttttattaatgcgacacagtggttgagaacagatgattagtatttttctccagtatggttaataggtgttcaaaaattaagcaagttactggcatgagttatctgttatgtcaagctattattttggtatagtaaagtaaaaaataatatactgacgaatatagtccatttcgaattatgtactgattcttttctccatttcagggttggagagcacttcaggtgctctagcacctttgggtgctcctgtactcccacaaacaaaaaccgccaaaaaatatataaaatattcaaccaaaaaatatatatgtataaatgatgcaaggaattatgttcatgtaaaatttggtgttagaaaattttaacgtaaggag

SEQ ID NO: 36072 - DNA, 795 bp, Setaria italica
  misc_feature (353)..(353): n is a, c, g, or t
  Peptide Sequence Number=SeqID_102046
tgaaaggtgttcgagtttagggagaaaatatataagaagctgtgcagacttgccttgcaaattaaatggcgatgccggtaaggaagaacggacggtgtgcatcgcgcacaatgtgttcctgctgctcgatggctgggtctggacgtgcgtcctcgccgccgatgagaccgcgcgcctcctccgttcggcaacacagagatcggccagctaactcaaagggttggagagcacttcaggtagactactaagcacctttgggtgctcctgtactcccacaaacaaaaaaccgccaaaaaaatatataaaaatattcaaccaaaaaatatatatgtataaatgatgcaaggaattangttcatgtaaaatttggtgttagaaaattttaacgtaaggagaaacaaatggagaaatcatcctataaatagtgtgggttgtacggtttttcttatacccgcaacccaccactgtttataggctgatatcacctttctatttctcctcgtacaaatattttcaccctccattgaagatagatgcttgcttattctatctatacatatttttttgcaactctccatgtgcatctaccgttgttttattgaacgggagtactggagcactggaaccgcgggagtatagtaggtgcatcgtgtgcatacgatggtagatattgatatgtcagtagatgctttctcctttttccggtatacaaaatgatgtaaattctgagatagctcatatattttttcctttctttcttttctttttgttttcaataaagttctgctgtaacca

SEQ ID NO: 36073 - DNA, 316 bp, Setaria italica
  misc_feature (290)..(290): n is a, c, g, or t
  Peptide Sequence Number=SeqID_102047
ttcctgatagccaacttcagatccttgaccgtggcagcattcgacaatgcgatatcgaaggaggtgttgtccaacttgacaacggtcaccctcatggcgctgccgagctcgaggttaatcagcgtgtcgacgtcggcgagagagggcttcctagggacgtccgcgagtatagggtcgtcgaggagcgcggcgagcatggactgcaacctcgcctgcttggcctcgctgctctggtaggcggccacctcttcgggcttcccggagcccgaatccatctcacccgccgccgnagggaacgattgcctcaggccctata

SEQ ID NO: 36074 - DNA, 240 bp, Setaria italica
  misc_feature (164)..(164): n is a, c, g, or t
  Peptide Sequence Number=SeqID_102048
atcgaccagtgcgagacccactagctagagcgcgcagcaacttgcattgctcctcccgcccttcccaccaccaccaccaaccagcacggcgcggcggctgacccctggccggccggccggctctctcgctagctctcgagagtatttggcgtgctccgcccgtnatccgcccccgctccgggcgccagcccgatcgatcacattgcgccgcgtcgttctagcatcatcccgcggccgcag

SEQ ID NO: 36075 - DNA, 440 bp, Setaria italica
  Peptide Sequence Number=SeqID_102049
agtagacaatttttacaaggaatagcgcatgagaatacctattgctgcatctggagaccttgttaacgagccccagcttcctgactcgaatcgtggttctccctgtcagagagatcaattctgctaagctgatcaatgatggtgtctttatcttcccatgcaaaaaccaactctcgctcatccagttcatccatgatgaaaagcttactggaggtccgagtcaactttagtccacgaaaatataccaaatcatctttgccaaaagataaaaccttttgcaaggacttttcattctgaacctcacccagcctgaccaaattatttgttactattgatttatcataaggagaatgtgtcggattctctattttgaaagggcattgttgcttatccttcctatgtggagaaggaggcagcctgctggatggagcactgtcata

SEQ ID NO: 36076 - DNA, 758 bp, Setaria italica
  Peptide Sequence Number=SeqID_102050
gcgcgtcgcgtcgtctcctccgattcctcttcctccctcccacgcgctcaattgatcggtcgctgctcgccgaagctcgagtcagaatcctcgcctctccatccaaaaacatgacgggcaccgccggcggcgacggctgcggcgagcagtactcgcggatgatccgggagctctgcgcgctgctcctcacgatcgtctccccctcgccggcggcgctggggcggccggcgcccgggatgtcgccggccgcggcggcggccatgctcctcggcgcgtcgatggcgctcatgctctgcggttccgtcacgttcgccatcggcctcctcctcatgccatgggtcgccggcctcgccctgctcttcggcttcgccggcgccgtctccaccctctcctccggattcttcggtaaggacgccgcgctcccatgcaaggacgagacgcgggggcggatctgctccccgatcggctccgacatgctcgtagcgtagctccagcagcagcagcagcagggtagatttgatttctttgtccctgaatattattaggagtcaaacagagttgatgatccctgtaaaaatgcacccttttgttgtacacctaaatccccggagatggttgcttgttgattgaaggaaacgtcacaagaattaagtgattgtttaaccccatgttctgatttgttaccacaagcatttctttatttatttttttcttgttcttgaggagaaatcaagatgctaataccatttttctatgac

SEQ ID NO: 36077 - DNA, 468 bp, Setaria italica
  Peptide Sequence Number=SeqID_102051
cggggcaccgggacgtctggagcgcggcggcggagaagggcggcgagcgcggcgatggagttctgcccgtcgtgtgggctgctgctgcagatcgatccaggcaccggaagccaccgcctgcgcctcttctgccccctctgcccctacgtctgcgccatccagaacaagatcgtgaggaaggcgaagttggtcaagaaggaggtagagcccatcttcagcaacgccgacgcgatgaagttggcccccaagaccgcaacttcatgcccaagatgcaaccatggagaagcatacttcaagcagatgcagattcgatcagctgatgagccaatgacaacattctatcggtgttgcagagaagaatgccagcttgaatggagaggatgactgatcctagctatttgctacttcgtcttacactatcgtaccgtgttgtcttctagtttgagttgttgatactccctgttgcac

SEQ ID NO: 36078 - DNA, 671 bp, Setaria italica
  misc_feature (635)..(671): n is a, c, g, or t
  Peptide Sequence Number=SeqID_102052
cgcgggtggcggcccccgtcaggaggcggcgcaggtgggcggcgctcgtggtctgcgcggcccccgacgaggagaagattacgcggcggtcgcccctcgatttccgctaggaatgggagagaccaaagcctgggaggagacctgatatcttcccaaagttcagcccaatgaagacaccattgccacatccattaccagctgatgaccctctggatgatgacgaagaagaggaagaggaagaacaaccacctccggaggaaccacaggaggatgatccggacaaggaagaacctgaggaagatgacccggacaagccaactgagtaattttggatggcgtgggccgtggtagatagacactgagcaaaaattcgccgtacctttggagcacctaaggttcagtttgaactgatagttccaccggcttatataggctctagacgcatatgtttgtaatgacccactttgagctttctaaaagctatgaaagttttgttcgacagattacttgttacatacaatgctatatttattatatgtattcacctcttggctaagtagtatgtacattacaattatatcttgctagttaagactgcaactattatgcgattgcaaaaagttgtgttcaagacnnnnnnnnnnnnnnnnnnnnnnnnnnnnnnnnnnnnn

SEQ ID NO: 36079 - DNA, 295 bp, Setaria italica
  Peptide Sequence Number=SeqID_102053
tgcagagagagcctctaccctcccctgctagtgctggcagccgctggtttggctgcttccattgcatctccgcacatctccagcctaggtagctaccatcaatggggaaggcggtgctgagtaagagctggcaggagtcgaagctgctgtggcacatcgcgttcccggccatcctcaccgccgtcttccagttctccatcggcttcgtcaccgtcggcttcgtcggccacatcggctccgtcgagctcgccgccgtcaccgtcgtcgagaacgtcatcgagggcttcgcctacgg

SEQ ID NO: 36080 - DNA, 676 bp, Setaria italica
  Peptide Sequence Number=SeqID_102054
tgtcttcgtattcttgtaattgggtttggtctattcttcagcaaagacaccagcttgctgcgaggaaggttgtagaggcaatggttgccaaacatgtgataggttggcccgtcaaacacgtcgaattcatcaaggaccttctgcaccgccgacagcgatttgtcctttgggcagtagccatcgattatgtcgccaaagttgatcgagaacttaatgttgccatgcttgttccatctattgacagccctttggaggacactgatgctgtggcggtagtagcgcgggacgccgaggaatgagcggccatctgggatatcggcatactgcacatcagcaattacaccaaacgaaaacatgggttccttcgcagaagcagcagccactccatttgccacagacatcatcggagattctgatctcggaagaaattatccctgtgctggaactgcaaaagaaggaatcaaccaagcccagatggatctccgctccgccccaccagaccgagcgaggagcggctcacaaagtagacaggagtcgagacgaggccgtcgccgaaagcgtccgctgctctggatagacttggtcggattcctcggcgatctctgaaaatctcccacggccagggcactggttgtcctccgaccgcactaaccttcgtaagtcgtcccttcccgta

SEQ ID NO: 36081 - DNA, 153 bp, Setaria italica
  Peptide Sequence Number=SeqID_102055
gtgcgacatccatatgtatccctgccctgcgccagtggcgcctgagcaggggacggcggcgtcggcgacagcgacggagaacggggtgtggaggagcaggtggcgcgcgatcgcgagccccacaatcccggcgcccacgaccactacgtcgtg

SEQ ID NO: 36082 - DNA, 334 bp, Setaria italica
  Peptide Sequence Number=SeqID_102056
acaaggctcttgtggaagatcctgaattccggtgctatgttgaaaaatatgccaaggatgaagaggccttctttagggactacgcagaatcacacaagaagctctccgagatgtgcttcacgccccctcgctctgctttctcgtgcaaatccggaaataaacagaagtccttgctggtacaagctgcagctggggttgcagttgctgctgcagttgtcgcatgggcatacctctgcgaatccaacaagaagattggctaacttctgctcatcgtacagcagcactggtggaagaattgaaactaaagtactcaaaaacaatttacgaaggacca

SEQ ID NO: 36083 - DNA, 523 bp, Setaria italica
  Peptide Sequence Number=SeqID_102057
catttcaaaagatatttcaggatgaggcaatgtcatcgaattctcatggttgggttttgtttttcccattcacacaaaaaagagagaagtctcttgctacactcctgcatctctacttgcaaacaactgcagccttgggatcattgcagcccgaagttactccaaaagctttcccagtatgtcgtgctctctgaaaagaaggtactccttctcagcgagcttcacttctgttccaccatactcaggaagtagaacagtgtcaccttcattcagggatacagggatcagcttgccatccctatcacgatcaccaggaccaacagctatgactttagcagcattcagctgcttggtggtctccgggaggaggatgccgccggcgctcttcttgggctgcagcagcttctccaccagcacccggttcagcgaggggatcagacgcttcgccatcgccgcgaggagctcttccgctcgcttcttcttggggagcaagttgatgcgggcttctgcttgctgtctacgt

SEQ ID NO: 36084 - DNA, 581 bp, Setaria italica
  Peptide Sequence Number=SeqID_102058
gtagcgtcaaatgagccattatatcatttcaaaagatatttcaggatgaggcaatgtcatcgaattctcatggttgggttttgtttttcccattcacacaaaaaagagagaagtctcttgctacactcctgcatctctacttgcaaacaactgcagccttgggatcattgcagcccgaagttactccaaaagctttcccagtatgtcgtgctctctgaaaagaaggtactccttctcagcgagcttcacttctgttccctgagattgcaagcagccaggttagacatccagcatggaatcggatgcagcacttgacaaaccagagtgaactgtgtattagtcttaaatcgaaattgcctttagctatgaattttataactagcacccacttcagttaaagattcatatagcatatggagaaaaatagtgtcagcaaacccagaaaaatatgagcagatgagaagaagcaaaacacccattcagactactaattcataggaccatgcacagaattattgcaacctaaattcttaaattggtcaactccaaatgaaggagttgaatttaaagaattaagcagc

SEQ ID NO: 36085 - DNA, 166 bp, Setaria italica
  Peptide Sequence Number=SeqID_102059
ttggtttaagtggctggcttccttgctcaaggaccctgaggaccaagattgagagctcacagactgctcttagaaaagctgctgccttgccgatcctgctcaaccatggaagagccgatgaggttgtcacctacaggaacggtgagaggtcagctgagattctgag

SEQ ID NO: 36086 - DNA, 1329 bp, Setaria italica
  Peptide Sequence Number=SeqID_102060
aatttttgattattagctagggtttaatttctaaataattttttaaatacaatagtttctaaaaaaacattagcccgtgctcccgcacgggttgatggactagtgtatatgaatgtacttgacgcatggaacgcttgttcgatggagtcgccgagtttacacaccacagctcactgtcccctcaaaaaccgaaagggctcgagacaaaggagccagcaaccagaggtcgtagcaaagcacagcgaaatcgccaaacgcatttgaaacccacaccaaatcacaccaccaatcacgtacaaatcccaagttcaaagatggagaggaagaaggatgcaacccacggcgcgagtcgacacgacacgtatctacttgatgggtctcctgccgagcccggccggcatggacacggtggagtccacgctgagcccgctgatcgaccgccggtgccgcccgccgccggccaccgacgccgccggcgtgcccacccgcgacgacgacggcgccttccagaacgggctcttggcccagctcccgatgctctggcccagcccgaacgagaacctgggcttctcctgggccgccttctgctgctgctgctgcagcagcagctgcgcccgcgcccgcgccttagcggaggccgacagcgtcggcgtcatgtagttgggcacgccgccgacgccgaacgccgggcagctcgtcaggctctcgtcgtcgcggatgctcatgctccccgcgtggctcaacggcggcggggccgctcccgcccccttggagggcctcgcggacctcggcttggagtaggccgagaccaccgaccgcgccggcgtcgtcgccgccgtcatcggcatcgtcggcgtcgtcatctcgcggtgggcgatggagagagccggccggggcttgctgacgggatccacggggcggtagtaggccccctccggttcgtggcggcgctcgatgggcgtccaccaccaggggctccggcccgactgcaggtccgccaggatcgcgtgggccgccatcggagtcgccttcagcagctgatgcgagtaggcgtaggcgagggccctctcgcgcttgatcacggcctccaccttccgcttcgtccgcgcgtccgcctcctcccgcgtcagccggctgtcgtcccagatgccgccgtcctgcgagccggcacgccacctgccgccgtcccggagcatggcgccgtggtgctgccggttgcgccgctccatggcgtcgacgcggctggcgcgcacctgcgcctgcacgcgcaccagcgtctgcatgcaccgcatcgcctgcgccgtctgccgccgcacgctggcgccccgc

SEQ ID NO: 36087 - DNA, 315 bp, Setaria italica
  misc_feature (311)..(311): n is a, c, g, or t
  Peptide Sequence Number=SeqID_102061
aaggagaagccggcggccgccaagaagaagcgcgacaagccggagccccaagagggcagcaagcgtaagaagcagcaggcgtccggcgacgcggcgacgcctgcgaagaagaggaagaagggcgacggcccggagcccaaaccccggaaggaacccaagcccgcgaagaagcagcagccatccggcaagccggagaagcccgcgacgccatcgaggaagcagcagccatccggcaagccggagaagcccgcgacgccctcgaagaagcagcagcagtcatccggcaagccggagaagcccgcgacgcccgntaag

SEQ ID NO: 36088 - DNA, 159 bp, Setaria italica
  Peptide Sequence Number=SeqID_102062
tggaaattcttgggaatacgcttggagaaattgcatatgatcatatccaagggaagataccccacaaactacaggtgcttcaaccacattagttgcatcaaacttccctcctagtccaacctcgagaacagcaacatcgacctgctccacgcgcatgcg

SEQ ID NO: 36089 - DNA, 487 bp, Setaria italica
  Peptide Sequence Number=SeqID_102063
agtagtagaagaccctagggaagaacaagacaataggaattagacttaacaagtttgaacttcaagctgtatatcatttcgaaatagattacttcttgataagcctcaagacatcaccagcgagatgaagggagccagtaaccaagacctgaaaagaagtagatcggttttctcgagcattcttccttagccactctattgcgagtggaagtgacgcaaaaacttgactagcatcactggaatttgcactgattatacctttatcctgaagtaacttctcccacactgtttggagtgacaactgccatgacaaatcgatttcctcaggctccgcaggtgctgatgtattagaaccaagcttgttgtattgcgattggtttggcgcaaatagcgccacatcaaagtggactccattttgagttgacgcatccaggagattgcggtcagttagttcttctattaggttattcttcttctactagtacta

SEQ ID NO: 36090 - DNA, 474 bp, Setaria italica
  Peptide Sequence Number=SeqID_102064
agcgacttggagagattatacccaactctgaagctctttgtttgagagcaatcattgcctcgtctggttgtggagcagtataggctggaactccttcttgaaaatcccagccttctccccagcaatttctccaagcgtattccctgctcatgggacacccggtaaacatgagagcatgaagcgaccttttcatattagtagaggtactttaattgtcaggttatttgactaaccaagaatttccatatgatcatatccaagggaagataccccacaaactacaggtgcttcaaccacattagttgcatcaaacttccctcctagtccaacctcgagaacagcaacatctacctgctcagcagaaaatatcttgaatgcaagcaacgccaggaacctgaaataggctggcatgggaataatcaatacaatacaagtacttactaccttacaaacttaattaccaaagaacaaacc

SEQ ID NO: 36091 - DNA, 1574 bp, Setaria italica
  misc_feature (1)..(27): n is a, c, g, or t
  Peptide Sequence Number=SeqID_102065
nnnnnnnnnnnnnnnnnnnnnnnnnnnttttttttttttttttttacttttcattggcaaatgattgcctgatcaaaatcaccttattattcatgcgtttacatggggttccctgggggttcttgatgccgagatacagcagtggccagcagaaaacgcaaaagggaatgtaaaaatcatgaagctcgcagcttggttagcatcataatcaagcccttcaaatttctgccctcgctaatcgtgtgagccctgggagacagcatggattgcttacagtttgaacttcaagctgtatatcatttcgaaatagattacttcttgataagcctcaagacatcaccagcgagatgaagggagccagtaaccaagacctgaaaagaagtagatcggttttctcgagcattcttccttagccactctattgcgagtggaagtgacgcaaaaacttgactagcatcactggaatttgcactgattatacctttatcctgaagtaacttctcccacactgtttggagtgacaactgccatgacaaatcgatttcctcaggctccgcaggtgctgatgtattagaaccaagcttgttgtattgcgattggtttggcacaaatagcgccacatcaaagtggactccattttgagttgacgcatccaggagatgcggcagtagtctcataggatctctcacagacatgcaattgaacagaaggatcttttgagacttagaattcggagaatgatctgaggaagatggtagccttctatcatcatttgtgacatgggaaaaccacttggcacatatttccatactttcaggactgtgcgccccatctaaatagaaaaccaaagaagaatctttgtccgcccctgaattcacttgtgaatctggaacaatctgtgctcggccttgcaaagaagcatttgatagtcctctaataaaatgatctggtaggggatcagtgcgattgagtggtatcctgtccttgtgtccctgcttctcaagccacatactagccaaagcaactgcaaggccagcgtttatgtattggtgttcaccatgcagtccaagatgatggccttttaagtgatagggctccagaggatcagcgacttggagagatatacccaactctgaagctctttgtttgagagcaatcattgcctcgtctggttgtggagcagtataggctggaactcctttcttgaaaatcccagccttctccccagcaatttctccaagcgtattcccaagaatttccatatgatcatatccaagggaagataccccacaaactacaggtgcttcaaccacattagttgcatcaaacttccctcctagtccaacctcgagaacagcaacatctacctgctcagcagaaaatatcttgaatgcaagcaacgccaggaacctgaaataggctggcatgggaatatcatcatcagtcttctccttcaacttattccagcaccaccaaaagtactttaaaaacttctcttcagaaatatcaaccccatctagccggaatcgctccctgacatccatcaaatgtggtgaggtgaacagcccagtgta

SEQ ID NO: 36092 - DNA, 284 bp, Setaria italica
  Peptide Sequence Number=SeqID_102066
acgagggtcccgacccaagggctaaacccactgccggaccaaaatggcggctctcctaaaccctacgtcccggcgactcgccgccgctgcctaccgccggatttcggcgccggcggcagcggagcctctcgtgtctcaccggatctcccaagaaagatacagttccagtccagtggatgtgagtggcgggttcagcgagatgcttgacggtacgcagaggtactatgtgcttggaggcaaaggtggtggttgggagaactagcatggccgcgtcacttgctgtg

SEQ ID NO: 36093 - DNA, 1614 bp, Setaria italica
  Peptide Sequence Number=SeqID_102067
cctccgccggagttcgtcaagaaagttacaaaatttgccagggagacaggtgacatccaaacactttcagatgttgatatcaagattattgctttggcttacatgttagaagccgagatacatgggactagccatttgcgggagcaccctcctcctctgcgtgaggtgaatgtcagaaagctgtcagaagctccactgcctggttggggctctaacgtgccaaacttgaaagagtgggaagagttggatcagatgtctgaagcaggtggagatatcaattctcggatacttccactgaaggatcttgagaatcaagatattcccatgagtgagaccaacgttgtttgtgaggcacaagagggcgcaggacaccagcctaacaaagatgcatgcactgcttgggaagatgatgaaaataatgaaggttggacacctgctgttagccgcagcacacacagaagatatctgcggaggaaggcaaggcgtgacgcccttaaggaatctggacaaagtcttgagacaagctctgttgctccatcaattgatgctgataaagtcctctctgaaaatggtggagttgagcatgattcgactccaacagatggcccttcttctgtccctgagaaaatcaattcaagtaccgatggattagaacatcaagtagagaatgaacttgaaattgctggagaacatttgcattctgatcaagccaatgatgatgaaactgatgcatgcactaaagaattggataacctggacataaaaagcgaggctgagggaggtgatgatgcgtattctgtggatgatgagagcagtgagcagagttgggctctgaggtctttatctgaatctagtgtagcatgtgttactagtgactatgccatgcaaaatgtcatcctgcaaattggccttcgtctcttggcaccaggtggcatgcaaatacgccagatgcataggtgggttttgaggtgtcatgcttgctataaggtgacccaagaggttggcaaaatattttgtccaaagtgtggcaacgggggaaccttgcggaaagtgtcagtaacagttggtgaaaatgggatcactatggcctcacgacgcccacgcgtcacacttcgaggcacaaagttttcactcccaatgccccaaggtggaagagatgccataactaagaaccccattctacgagaagaccaacttcctcagaaggttcttcatcctaaatcaaagaagtccagcaagctggaggacgatttcttgggcgtcgatgacatattttcgcacagtggtgacaagaaggcaccgctgaaacctcctgttaggaaggccctttcgatgttcagtgggaaaagaaatccaaacgacaaccacttttcacgcaagaagcactgagatgaagctttcatctgcctttttgttcgttttcatctacctacgataccttagtcccattatatgagttgaagcagagtatgtgatccagacttactttttcgtggttgtgagaaagcatgtaagctatgcagtttttgcgacatctatgtaaggttcttatgctactactgcacatttttcagctggaatgagttggttcacttgagcttgtagtctaaaaaa

SEQ ID NO: 36094 - DNA, 924 bp, Setaria italica
  Peptide Sequence Number=SeqID_102068
tctccgactcagtgtgagtagtatctggtaaaagcattttattttattgttagtgtataaaaatgcttttaccagatccggaaattctccaccagccagccacatgatgacacaagttcctaacgagtatttctagaggctaagttcaaggctaatagcagtatggcatttggcacccagtacagtcaagagatcgagcaccctaaattttagggtattattctattcttacaaatcaatagctaatcaccacggcgccccggatggttcaggagcagtagctgcagcaacacccaccaggacgtcaccaacacttcccacaacaggcggcacaagcatgctgaaccacctatccacagtcatcaggtattggacactgtgtcatgtgcccaggtattgcatcaagtcatcgtcgtccagcaattcatcgaggtaagggatcgggctactgataggaatgaggctcaaaggaagcccaccaaatgagttgcctgcaaacttatcagtggcctcgccaaagaaaggatcatccatgagctgttcggctttgctagcaacagtccccgaatgcccactccctgccgtaggatagctgtaagaaccgttcccggacagcgctcctgtgcccattataggcacatggtgatccataggcagtggttgctgctgctgcattgacgacgcctgaacaatcgccgaaggattaaaaccaataggcccatgaccaacatcctgtcgaaacgagtgtccagaccatgagttggcaatgtcactgccttcacaagccagaggtggatcgctcagatatgtgcttgattgagcagcacttgcagcctggttactgttgtgcttgttgagagcagcacttgcagcctggttactgttgtagttgttgagtagcagcaccaggtagataggaattcc

SEQ ID NO: 36095 - DNA, 392 bp, Setaria italica
  Peptide Sequence Number=SeqID_102069
tttgtcttaagttattccctattaatttactattgtcctatttcctttggtcttaacctagtctaactaccttctaaagttctactagtcccccttttaattatcaaatgtagcaatgacaaaaccaggtacccctcttgccttccatgtcatagctggtactgttacttcacgtgtcccatcagcatggagaaagtctgagaagctaccagtatgagcattaaatataatccttggtttaagtgcctgaagaatatactgagttgaattagctggaagcatatgcagacgatcatatagtccccctttgtttcgagcttgcgaaaactgatgaatgatctgagacaatttcctctgaaagatatggtgtaaagaaccaagtaaacttacta

SEQ ID NO: 36096 - DNA, 961 bp, Setaria italica
  Peptide Sequence Number=SeqID_102070
taattatagcaacattgcttcaagatacaagtgttcactgtaccttcttgtaaacctatgatgaatgaacaaccagaagtctggaacaacgtgtgcaaagaaaaagttacagattgccaaggaacagatttatccccagagagcgttatgcctgattgcctctaaagtctaaaccacgctatgcagttctgtcagaaacgcttcaaaaaagcaagctcggtatcagttccatcttccatcatttggtaatacgatttccaaggttttacttccgggctgtacagggcggcaacacattcttcccataagtaaatctttggcctttagatgtcccgcctagcatctcttttgcttcattcacgaccatttaggtctgtaaatatttaaaccacgcaccacggcaccagcaaactggttcgtggatatggtccataacttggagcaatgtgatcctttgtgcacaaggctctctaatatcgtaccttcggtggctaaaggatgcgcaccatgcacgtactccatatgttcatacatagtgaatccttgctagcaaggctagaaggccatttcctgaagaattttcagtgttgtttgatgtacccattctagatgttgagctgtaatgccagatgtgttgcttgcatacacaccacctaggaccttggaaacagtctccaggaacattccagggcggactggccgtggcttgcgccctgatacacttccccttccagatactccagttagatgctcctgttcagaatgcgaatcagcacttgattgttcaacattatcagcaccttcccctttgccattcataacatccctgatcatcctctccaatgccttcccaggtttaagagcaacgagcttgctcaaaaagttcacctcagcctcagggagagtagtcaaaccacgatcatttctttcatctaacaggccacctcccatccatatttcg

SEQ ID NO: 36097 - DNA, 480 bp, Setaria italica
  Peptide Sequence Number=SeqID_102071
cctttcatgcttcttgaggtcctcctaggcactgccattgatgggcctgcgttatcattttcttccaccagttcagttttgactcgcttgcgcctctttctcgaggaatggttagctgatggggcttgatcctcctcaggttcattcacatcatcaccatcagcttcaccatcctgacggggccattcggtaccacaaccaggacaggctcttgaagcctttcgctgtgaaaatttcttcctaagacagtattcatggattctaacattgcactcctcattaggacagctagatgcctttatacaagcttcgttacacaccatgcatgatgggatgtcgttaccacggaaccagcttcggagatcaagaaatgatctggtgcccagaccaatcttgcctgtggaggtgtatgacaaccaacaatcccgtatcagctcatctagggttttctctttctggctcagtgagtaagtttcttta

SEQ ID NO: 36098 - DNA, 286 bp, Setaria italica
  Peptide Sequence Number=SeqID_102072
aattaaggcgcattctcactgcaggctcagcaagccacactgcaagacgcctcagtgaaaggtaattacccgacacacctgaatcagatccaggcgtcggaattggattcactgaatacgactcaagaacagccagcagcttgtagtaatcagagagctcctcctggagcgccgagcagaacgcctgagcaacagtgcccacctcagtggcagcatctgacggtgagcggcttatgctgtcagaaatgaagccccgcaccttgcggaacagccagccgagctcgca

SEQ ID NO: 36099 - DNA, 403 bp, Setaria italica
  Peptide Sequence Number=SeqID_102073
taaaagaggagagctaatcactatggtttctgaagaaagaacagcaggtaccaagatgacgattctgcaaactccggttggagcgaggagcatcgtgacctgcttagtggctttcttcatcttagccagttccatcgtcttcctccttgacaaaggccaggaagtgcaaatggcagtcgagcaccgacaccaacaagtgcaggtgaaggttgaagctagactccaagaaccagccatgggaggggcaactgaggtggacacgagcgaggaggattgcaactggtcgagggggcggtgggtgtacgacaacgtgtcccggccattgtactccggcttcaagtgcgccttcatcttccgggaggtggcttgtgacaaatatggcaggaaggatgtgatgtaccag

SEQ ID NO: 36100 - DNA, 1663 bp, Setaria italica
  Peptide Sequence Number=SeqID_102074
tttagtttaccttaatttaagttacttaagttctttcctgctgccatagcagctgcacaggcatatgcatctgtagaggcagagataagtgtgcctcgtgagcttccaaagataccatcattccatacttttgcgatgcgtgatcaccatttggatgaatctgatacaagaaaaaagggagtgaaggataattttgggagacttgagtgcatactggaaaatggttccaagaatggcaaagctaagaactcctcacctgacgatgccaactgcgctgatgttgacagcttgaaaatgtctggtgataatggcactcagaggagccactcgaacgagaaagcttgcctagcaaatactagggatcattctacagacattggtgttttattagacggtcgggcatgggtggatactgatacaatatgcattgatggtgtgaaggatcctctagccattgagaggtggcaggcacaggcaatggaagctgataaagaattctacagtcggatacgcataccggatgatgaagatgcaactagtcagaagcaagcgtgccgtagttctgcctcacagggtgccgacagcaaacctgcatccgaacggcaatcaagaggcgtggagcacataaaacagggtctcgtgaatttcatagcctcgctgctgatgccattgtacagaggaaaaaagatagatcgtgatgggtacaaaacaatcatgcggaaagctgttaacaagataattgagacatgctcagaaggagagaaattgatgaccactcatgagtttcttgatgttaaaaggaaaataagattgaatcctttgtggacaagatggttgacaggcatttgcatgtggtaagcaaacctgccaaaccataaggttcacattcacagtaagccagtaaggtgttgtgtgcaaaggaagctactctctttcaaaacaccaagctctcactcagtgatcgtgctccaatccaaatgaaccaaaacctcaattcggaaactggcatggttcatcagtgttgccgaaaagatcagcaggatactattacccagactatcagggtggcatagaagagcattgaccagatcagtgcatttacttttgtatttagttaggcatcatttccatcattgtagctatagatcagtagaaggcttagacctctgtgcactcgacaagcatgttgtgcatgcagtagcttggatgccaagttgagtttctgtggcttgatgaagtggcatatgaagatccaggattcagcatggtctcatatgcaatgagggctcttgcgccttatatggtggtagttcagtccagcctagcggattaatcctgttcgttgttcagagttaacttacaccaaagtagatcctcttcttctctctttgttgtacagttcttttgcagtttctaacaggcgtttaacttatagtcggttgggttagaaaggctgcagttggcagagaaggttgagctttgcagccctttgtatatccttcgctgcttataatgtgcatccttgatgattgtcgaatgctaaatgattgcaaaaagaaaatgatgtttaccccctaagttctcttgttgatttctgcctttcaatatgtttgtatgctttgatatgattgtatgacttaaggggggatacactgccattgta

SEQ ID NO: 36101 - DNA, 469 bp, Setaria italica
  Peptide Sequence Number=SeqID_102075
ttatatccagccatgaatttccagcattcgcaaatatctaaactaatccaggttgagacacgctaccagacaagctaatacttggtgccccatcttgctggctacattcatcaggttctttaccggatactttctgaaaatgctcaaagtattcatccattcctgatacgtactgcttcatgctctcaaaatgccgagcaagatctattcccatcttcatccattttctagcaactgaacgttgcccaagccgcaaagctaaatttgacttgttccatgcagtcattgcaagccacttcccttcctcaaatggatattcaccatctctaagtccaaccacaatctggtaagcttgtcgaatacgtcatagactgcatcactcatgctaccactgaagtcttggagaccagcaacgcctactagccttctgaggcagtgctgattatccctatagtttggcgagtgagaa

SEQ ID NO: 36102 - DNA, 657 bp, Setaria italica
  Peptide Sequence Number=SeqID_102076
gtaaagtctataacataggagaggtttcaactttctcgctttattaataacggaagcagtggtatgccattctagcgatgatttgacttgagccctaaggaacaatcctatagatatgggaacttgtctctaaatacatcaaacaaatctcaaactcaaccagctattactatctgtgtttccaactaaataatggaccagcaggtcccaactcaactacgtaagcatactgctacagtacttctgtacaaaaatatcaccctgacacatgcccatgtcggttattagggaccaaacagatagcatcatcgttctcttgactttcaggatctatagaacaagatcccaaaatacgaacaagtgtgttaattgaaagattagataggaaattactaactgtatcctgcttttatgttcaaaaactgaattaaacgtagaagatgagaaacatttagcaatccaactctgcgttaattacctaattcatttctgtgccaactctgccacttcaaacttattcatgactatttactactgtacgtactaaggtccttagaagatatcttcgtccactccctttcaggattcaagggtcatgactcaaggctatgaaattaaaaactagagcttagagctattaattggtatgttcttttc

SEQ ID NO: 36103 - DNA, 310 bp, Setaria italica
  Peptide Sequence Number=SeqID_102077
agtttaggattaattgtaatcccaggataaccttccttatctcctatatactcagcccatggggctcaagcaatacaatccacgcattatacgcaatcttacacgaaggagagaaaataaacacacacaatgcagattatgacagcctcatgtgacatcctaatggctgaattatcgagattccacagttctgtgtgaacaactaaggaccagaatgaccatcaagttagaaacagattctgacagagtaatgcagcctttgaggcactgagactatcgcaaagaaacatatgcaagctcatcgaggggt

SEQ ID NO: 36104 - DNA, 392 bp, Setaria italica
  Peptide Sequence Number=SeqID_102078
taagttactactgggaatcctgacaggcttgccccagctgaggccttcctcctccgtctcctccttgatgtgcccaatccatttgcgcgtgtcaatgcactgcttttcaaggtgaactatggcgccgaggttgcacagctcaagcactcgctccggaccttggaattggcaagccaggagctgaggacgaagggtctgttctttaagctgctcgaggccgttctcaaggcaggaaacaggatgaatgctggaacagcacggggcaacgcacaggccttcaacctcacggcgctccgcaagctctccgacgtaaagagcactgatgggagcacctcgttactgcactttgtcgttgaagaggttgttcgctctgagggaaagcggcttgccat

SEQ ID NO: 36105 - DNA, 378 bp, Setaria italica
  Peptide Sequence Number=SeqID_102079
ccgatgttctgggatccggggcagatgacatctccttgttgagctccttccaggtgtcggcggcgcgggcttggtcctcgccggtgcaccaggcccaccgccatgcagcaggcgaggcattcggaagagaagcgctgccgaatgcagatcaaggtcgttgtcttcctgctcctccttgtcatcggcagcagtatgatgaatggagaggaggatggcttcgatctcctcctcgaaatggtaggcgatgccaagactctgcagctgatggatcatcctcagcctgctgcttgcacttgcagcctcctccagcaccagcagacgcctcactctctccttgggggttgttgttgctggttgcagcagcagctggttgctggc

SEQ ID NO: 36106 - DNA, 426 bp, Setaria italica
  misc_feature (232)..(232): n is a, c, g, or t
  misc_feature (252)..(252): n is a, c, g, or t
  Peptide Sequence Number=SeqID_102080
cccaagctgcaaaattccaaggagaggtgcttaatatgaaacaagaaaataacaaagttgctaaggaactagaagctgggctggaccatgtaagaggttttcaagtggaggttggaagggtgctcttgaagctcagagagaaccttgagttatcaatagcaagaagccaccgagcccaacaaaacttccggaacctgtcaacaaaagccggggtgccccttagaacttttcngtttggctcaaagccaaagngaccatcactcttttcgtgcatgggtcctggtgtgcataagcaacatggtggctcaaaggctgggctagatgagtatcggcaattatttttgacatttacgctaaagagatctcaatgtacatgacaattaatatgttgtaaatgtggtttctcttaggccttaaatgtaaaag

SEQ ID NO: 36107 - DNA, 569 bp, Setaria italica
  Peptide Sequence Number=SeqID_102081
ttcctcttctttgtacgaagaatagtaatgcgagaaatcattggttcctgagctgataaaaatcagggagttggcaatgatcctggaagcttccttatctccaacgatgcccctgagccggaggaggtagtccttgaagaggttcacctgctttgacattggcagagtattggccagctgcgacgtctggtcatcgaaccctgaacccgcagatgcaaagttgacccctgtcatgatgtcgttgttcgatagctttgagtccaggtatggtggagagaattccttgagttgcagcctctggttgaggaggtctggaacgagccggccattggagaacctccctgtcggcttcttccctgggaagtctctcccgtaaggaacatggtttgctacagccaccgtggggagacgattgttgtttccggtatcgagaacggagtcgccaaagtagaagatggccgagaacttcggctgaattctcttggcagaagaaatggctggggaagagaggaggagaactaggagaagagcagggtgtgccatcagaatgatctgtgtgcctctgtttt

SEQ ID NO: 36108 - DNA, 951 bp, Setaria italica
  Peptide Sequence Number=SeqID_102082
tttcagaccaacccgaagcccaaagtccaaaaccacaggggtgtgaactgtgaagtcccgcaccgcagtaccctccccggcggcacagcgcagcgtgacgtcagctcgttcgccccttctccatccccggccgaatcaaatccgaatccacagcgacgaaatggcggcggcggcgctccgtccggcgatcctccgccgcatccgcctctccccctccccgtcgctccccttcgccgcctccgccgccgcggcgtcccacccgcacgccctggtgcggtggctcgcgcggcccatgtcctcccacgacgcgcacctcacccgcgaggaggtcgtcgaccgcgtcctcgacgtcctcaagagccaccccaaggtcgacccctccaaggtgactcccgaggcgcacttcgagaaggatctggggctggacagcctggacaccgtcgaggtggtgatggccatcgaggaggagttcaagctcgagatcccggacaaggaggccgacaagatcgactcgctcccgctcgccatcgagtacgtcgccaaccaccccatggccggctgagcctcagctcgccggaggtgaggtctcttggtttttgtttccgagggcaaataatttgccggagtggcgcaggaaaacatgtccctggcgcgctccgcattgcttcgcgagcagatgatgatgccaaaatggaacattgacattttgtttctcagacgatgcaatgttagattgctatttttgtgtgttatatctatatatgctgctgttgacaaaatagtttggttggttacgaggttgcccattgttccatgatctaattgttcaaattgggttcatgatagtttctatgcttatttttctattttcatccatctgtttatgagaaccaacccagaatcgataaacaaatgatggtccgttgcttatggtgattgatttaaggaacg

SEQ ID NO: 36109 - DNA, 398 bp, Setaria italica
  Peptide Sequence Number=SeqID_102083
cggcggcctgagctcccgcaggagttgaggacgcggttggcccggatcttggcgggctcccccggctccgctccccgcgcggcgttgcggaggcccagcgcggcccccgccatggcgccgccgaggtagccgatgccggtgtagtaggtgaggttctcgccccaggagcggcgctgcgcgatggcctcctcctggaagaggaactccggggaggtgggcaggtcgtagagctgcttgtaggggatgttgaggtcctggtacgggttgtagaggcggcggccggagtcatcccggcggtcgtcggatcttaaagcatggcgccgcggatcggccatggcgtgatccggcggcggcggcggcggcgtgggaggcaaagaaagaaatgggaggagggtttg

SEQ ID NO: 36110 - DNA, 1560 bp, Setaria italica
  misc_feature (29)..(29): n is a, c, g, or t
  Peptide Sequence Number=SeqID_102084
tttttatcggtcttcaagaaactgcatgntcgtataaaaccatgagcagcaattaaaaggaggatatcatttaacccccaatagtactgacgggcaataagaaaagaatacatctacacacaacgtaatcatgaacaaaaaagagtccaggaatggttgaaggagatcctgcgcagaccaatcccaatctggaagatagtctacagcacaatgttcttttctcctctaatacaataactacaaaccaacatatatttatcacatttaatgaattgtgtagatgctctatagacttacataacaactcttttcttctgtagtaagcttgatacagcggtcaagcagagtacttggttatgagcttatcaacgtggattataatatcatcaatatggggacgaactgcaggatgtggctgcagcatccaagttataaactgacgtagagaatcaggatacgaagatcctgcttcggtaggccatttaatttgtgcacttctaataacagtatgcaagctttcaccagcagattcatcaagctgataatcaaatggagactttccgtacatcatcgcatacaaagtgcatcccaaagaccatatatccgtcctctcatcaatgtcagcatggcttggacattcccatagttcaggagcccggtattgatcagaacagtgctctgaagcccattcctgcaactgcaaagcttcggcttgtgatctaatagcccttcttgctggaccagcactctcaaaatccatcaaaattgcaagatgaggcaactccttcctatgcgttatgaggacattatcaggtttcaccgcattgtgcgcatatggtgggtcaaaactgtgcatatgctttaatccagcacaaagctgacgaaatatctggagcacagtaattgttgggaaggattcattcctttcttgcatggttttagttacatcctgtaacgttccatccaaatgaactgggaataacaaataagcctcatggttctgtgatccatcttgcacgcccttgacagcaatgatggcgtgttcaagaagaggaagtaaatttggatggctgaattgggaggacactcggatctcttgccgaacaagctctaagtgctgctcactccgaataagaaccttctttagagcatatattccatcggctgagatgtgtgatgggtcaacgcccttcttcctggcgatcccggaggtgccgggccccgccccagccgtgccgtcggaagaggctgcggctgcgacgacctccttgacgaggaagacggacgagcccgcggggccggcgtcaccaagcctgcggagcacgcgaaagcggtagtcgttgacccagacatcaccgccgccaccgccgacgttgtcgtacagcgcgttcagccccgagaaggagcaccccatcgccggcgacgccgactcgctcgtccggttgttgcggtcgagggagaccagcttacagcagcattcgcatccggggagcgtgggttggcttgttccggcaacggcggatctggtggtcggcctctctcgtaggcagttggcacttt

SEQ ID NO: 36111 - DNA, 2400 bp, Setaria italica
  misc_feature (2365)..(2365): n is a, c, g, or t
  misc_feature (2373)..(2373): n is a, c, g, or t
  misc_feature (2392)..(2392): n is a, c, g, or t
  Peptide Sequence Number=SeqID_102085
catgcaaaacttagcttgcttccaaatcaacaagcagccgatgaggaactatcttcatactacagaaatgggtttgctcctcgcaatggatctgcaccttggctaagaaggtttctagagaagcacaaaaaagtgagaactgtgctgcttctcgtagttttgtgtggtgctagcatggtgatcggtgatggtgttcttaccccagcaatatcagtcctgtcatctatgtccggattacaagttcgagctactggtttagagcaccgttctgtagttctcctttcgtgcattgtattggttggtctatttgccttgcaacaccgaggtactcagaaggttgcattcatgtttgcaccaattgtcatcatctggctgttttccattggtggaattggtttatacaacatacttcattggaacccaaatatatatcaagctctctctccatattatatggttaagttttttaggaagactggtaaagatggctggatttctttaggagggattcttctttcaatgacaggcagtgaagcaatgtttgctgaccttggccactttacgagtgcatctgtcagggtggctttcgttaccgtcatatatccatgccttatactacaatatatgggtcatgctgcatttctatcgaagaacacctttcacatgccgacaggtttttatgatactatcccagaacctgtattttggcctgtatttgtggtggccacactcgctgcagttgttggtagccaagctgtgatttcggcaacgttctccattgtgaaacagtgccatgctttgggatgtttcccacgagtgaaggttgtccacacatcaaggtggatctatgggcagatatatattccagaaataaattggatccttatggtgctttgtgtagctgtcacggtttctttccgtgacactactcttatcggcaatgcttatggtattgcatgcatgactgttatgcttgttactacattcttgatggcattgatcgtcatctttgtttggcaaaggaacataatatttgccctaattttcctggttttctttggatccattgaagctgtatatctttcctcatctctcatgaaggttcctcaaggaggatgggtgcctcttgtgcttgctttcatattcatgtctgtcatgtacatctggcactatgggttaaggaggaagtaccagtttgacctacagaacaaagtatcaatgagatcgatcctgtctctgggtccaagccttggcatagttcgggttcctggtattggattgatttatacagagctggtgactggtgtaccctccatcttctcacattttgtcactaatctccctgctttccatgaagtcctagtctttctctgcgtgaagtcagtgccagtgccatatgtttcgccagatgagcgataccttgtgggtaggattggacctaaagaatataggatgtaccgttgcattgttagatatggctacaaagatgtgcagagagatgatgacaattttgagaacatgttagttatgggtattgcaaagtttattatgatggaagctgaggatgcttcttcttcggcaagttatgatatcgctaatgaaggaaggatggcagtcataacaaccactgatgatgctggcactccattgactatgagagatttcaatggcctagctgactccatgactacgaggagcagcaaatcagagagccttcgaagtttgcaatcctcttacgagcaagaatccccaaatgtaagccggcgccgccgtgttcgctttgaggtgccagaggatgacgacatgggccagcaagtgaaagatgagctcatggcacttgtggaagcaaaacatgctggggtggcatacatcatggggcattcttatatcaaagctaggaggagctcaagtttcctgaagaagtttgctattgatgttggctactctttcctccggaagaactgcagaggtccatcggtcacactgcacattccgcacattagtctgatagaagtgggcatgatctaccatgtttagccttgtgcccattgccaagttccatgtggataacctggttgcgacaaagcatgtgctacctgcagcttttgatctgaagttcaggcttgtgttttctgggacaggagttgctgcatcctcatgtgcttctagtttcagcttgtagagatgaaggcagactttccttgttaatattatttcgtctaaataaactatcagaatggtgcgagttacgctaagttttcgtttgtgtatttacatgcatgctctgtaatttttcttagagctatgtaatggaaatatgcattatcttacggtctgctttctctaacgtaagtgcattgtcaanaaaaaaanaaaaaaactaaaaaaaagngaactacg

SEQ ID NO: 36112 - DNA, 1766 bp, Setaria italica
  Peptide Sequence Number=SeqID_102086
acttgatgggaccatccgagcgtgggatttgtttccgctatcgcaacttcagaacatttaccaccccttcacctaggcagtttgtttctttaactgcagaccagagtggggaagtaatatgtgctggaacacttgattcatttgagatatttgtttggtcaatgaaaactggtcgattgctggatgtacttagtggccatgaaggaccagtgcatggtctaatgttttcaccaatcaatgctatcctggcttcatcatcatgggacaaaactgttctcctttgggatgtatttgagagcaagggtgcggtggaaacttttcagcactcgcatgatgttcttactctggcttatcgacctgatggaaggcagatagcatgcagtactttagatggcctaatccatttttgggacccatctgatggtttgttgatgtatacaattgagggccgcagggatattgctgggggcgcctcatgactgacaggagatctgctgctaatacaagtatagggaagtacttcactacgttgtgctattctgctgatggaagttatattttagctggaggaaacaccaaatatatttgcatgtatgatgttggagaacaggtgctgttgcgtagattccagatcactcgcaatctctcattggatggagttctcgattttctgaattcaaaaaagatgacagatgctggtgcactagatctcattgatgatgaggacagtgatgttgaagaaggaattgatcaacaaacaagaggaaacttagggcttggtttacctggatcaatggcaaatcgtggaagacccatagctcggacaaaaagtgttaagttcgctccaactggaagatcttttgctgcagctaccacagatggtgttttattgtactcagttgatgaatcatttatttttgatccaacagaccttgacattgatgttacacctgagaaagtagaggaagctcttgcagaaaaccaacaccagagagcccttatacttagccttcggttaaacgaggactccttaattaaaaagtgtatattcgctgtggatccatccaatgtaagagcaatttgtgctgcaattccttacaagtatctcaaaagattgatcgatgtattcgctgaacttttggaaagttgtccccatctggaatttatcctcatgtggcctcaggagctatgtaaggttcatggtcactatattcaacagaactccagaaccttgcttcctgctctgaaatcgttgcagaagtctataacaagactgcatcaggatatggcagacacttgctcttctaacgagtacttgttgagatatctgtgctctgctggtacaaagaattaggttgtgttgagaaatgccgagtccagtgaattcatttttgcaggtcgacatgactgcaattttgacagaagattgatgtgtttgcaaacccagagacggatatgagggcagaagcagatgatgttcctctgaatcctgttgtgttggatgggcattcttgctgaatgacatgggtggcggcagttctgcagttctgctcaacagtgtgaagcaaaatgattgatttgcaggattaatttttgagccaaatccgacaggattttcggtgattttgtcatagtgatcggctgatcggggaccgtggatagttggttgtttttttttttctattttccatcgttgtatcaggatggctagggcatccccagtcggaaatgctcttaaccagttttgttagaggcgagaacaattg

SEQ ID NO: 36113 - DNA, 334 bp, Setaria italica
  Peptide Sequence Number=SeqID_102087
acggtctaacgtaaacgaaacttcacacggtacgaaatggatcaatctgcggaagcatcagtcgcgctttgtaccgctcccgttctggccagcgagaatcctcgagatctgcagcccccggctgaaggcctggttgaagagcagcctcgtctggaactcggagacgaagggaaaccatgacagcacggcgatgggcaggaagatgaggagccccatggtgtactcgtacatcctcgccatctcctgtatcgagtcccatggccccatcttccggagcccggctccagtcctctgcctgaacttggcacagcaaggacctctgcctgccccacca

SEQ ID NO: 36114 - DNA, 486 bp, Setaria italica
  Peptide Sequence Number=SeqID_102088
gttcaagatgaacatccttagcttgctcctcatctacaacaggaatacctggctgaggtcctaagtactgcaatcttgactttacagagcttgcgaaccaagctttctccctgtgctggagcttggcagggtctgcactggagccatcaattgcatctatgcttccgctgatacggaattgttcccagctgtctgtgaagtaccaacaaatctctccgaagggacaaatacttatctcaccaatcttgttgcttcgggtatccgtgttaatctgaatcttatcacagtgttcctggaaacccctgaacacgacggtgcgattcgcgggcctgccgccggcgcccaccgtggcgagttggaagtaggtggagtgcctgaggtgcgcgttggcgtccaacgctcgctggagcagcgccttccaggggctcgaaagcgccgacgcggcggcgacaccgccggccatctctgcttgtcgccggtcgccgc

SEQ ID NO: 36115 - DNA, 251 bp, Setaria italica
  Peptide Sequence Number=SeqID_102089
cgccccgtcggatcacaaagctgattaaagttgtgtgattcttaaccaaagctctaataccaattgaaggaccaaaaagatgaccagaggggaggtgaatgggagctgattcaaattttctcaaagaatcttggctaaagtcccaacctaatccacaaaactctcttctagcaatatcaagtccccttagctatgcaggagctaatggacctagaaatattgctaggaacccaatttgagactagtggaag

SEQ ID NO: 36116 - DNA, 443 bp, Setaria italica
  Peptide Sequence Number=SeqID_102090
tataaaaaaggaacaagaagtatgtgcatcatgtgcaacaaacagctaacaacatcttgtgggggagtatgaatacacccaaaaaaatcagggcaacaacagaatcattttcccctaaacagccatttaggctgatgaaaccgcatgtgatccctacatggccgccaaactttgggttttctttaaaccctcctcttcttaatatattgatacgcagctctcctgcgtgttcgagaaaaaaaatggccgccaaacgtgttaaaaagtcgtttagcatgattaaacagtcatgtaggccactatttggtcaaaaaatgggcaaccgattgtttagcattttcagtttaggcattcagaaatagtttttacagtacttcccattagatgctgcactatcaccaaactaattgctatccaaacagaggttttttgctaatgaccat

SEQ ID NO: 36117 - DNA, 247 bp, Setaria italica
  Peptide Sequence Number=SeqID_102091
gatctcctccccaaaccaagctcgtcctcaccaagtctaaccacgacgcagtccagggcctagctgtgcccgtgagtgtaggagatcgatggccggcgccgacggccagcggctctgctgggacctctcgcggcgggccggctccttcctgcgcatggcgcggctggcgctcaccggcgccgctccggcacaactggtcgtcgaagaggaggtcgtcgacggccacagctgccgacccgtatacaag

SEQ ID NO: 36118 - DNA, 673 bp, Setaria italica
  Peptide Sequence Number=SeqID_102092
ccgttcacctgcaagaacaaggtgtcgagattctgcagcctccctagctccggtgggatttcgccggagagcccgcagttggcggcgtcgaggcggacgagctcggtcaggtttcccagctccggcgggagcccgccggtgtaactgttgtagtagccaatgtagagctccctgagggtagtgaggttcccgagctccggcggtatcctgccggagagctcgttcccggagacggcgaggtactggagccgtggccaccggccgtactccggtgggatctccccggagaagaagttgccgcctaggtgcaggtggcggagcatcggcatctgcgtgacctcgagcggcagcgtggcgctggtgaggttgttgttgtagaggtcgaggacgcggaggccccggaggcgcgcgagcgccggcgggaaggagccgttgaaggcgttgttggagaggttgaggtggacgagctgctgtaggcgcgcgagcgacggcgggatggggccgtacagggcgttggcggcgacggagaggcgctgcaggccgtggagccgcgacagcgcctgcgggagcgcgcccgagaggttgagcccggacacgtcgagcccgaccacgatgccgccaccgcggccgccgccggggggcgcgcaggtgacccccgcccacgcgcagtggt

SEQ ID NO: 36119 - DNA, 326 bp, Setaria italica
  misc_feature (1)..(78): n is a, c, g, or t
  Peptide Sequence Number=SeqID_102093
nnnnnnnnnnnnnnnnnnnnnnnnnnnnnnnnnnnnnnnnnnnnnnnnnnnnnnnnnnnnnnnnnnnnnnnnnnnnnnatttaatcaaataataattgtaatataaaaaatatacattctctacacatataaaaacttcctttccctaaaaggaaatcaagaatggaatgaatggctttccaggtcctttaaattcgaagggcagttgttcatactagacctaaactacaagaaaagccttagcagtcgtgagataaaccatttgcttttttggtgtcgttgctgtctttcgttgccaaaagtggttcagcctccttatctggcat

SEQ ID NO: 36120 - DNA, 209 bp, Setaria italica
  misc_feature (166)..(209): n is a, c, g, or t
  Peptide Sequence Number=SeqID_102094
aggaggagatgagatgtggatggaagcatgtgtgtgagcactgggttcctcttatattgttgttgctggtagcttgttcgtacagctgtagctagccttgtatgtagaaagtgtgctacattttttagaagaattgagtcaaatagctgtaacaaaaaaaaaaaannnnnnnnnnnnnnnnnnnnnnnnnnnnnnnnnnnnnnnnnnnn

SEQ ID NO: 36121 - DNA, 940 bp, Setaria italica
  Peptide Sequence Number=SeqID_102095
taaatttaactattctattagtccacccattctgcttgatcagtctcactagctctctcccatgcgcggctaccagaaagctttctagatcgtctggggcagtagtcatgaccaactatactactcccgtcatgactactgcagccatccataaaatcatcctcagaaaagctaaggtttgtcggtgcagcgggtggctgcacaactgagagaattgtagggagttcatcccactccccagcatagaaatgcacattgggagccaacagctgcctagatggtgtaacggggctctcagatggtctgttctgcctatcccgcgcctgctcaagatttgcaagaacgttgggtattgttctgcatcggatggtttctgcatttatgtcttgaaagtgcactgtggatgcacccttcaagcaggcaaaaatgccagacagaccagatccacatccgagctctagaacccgcttccccctgaagctcaactgtccatcacggatctcatttttaagaatgttgacaagagtgatggaactctcccaatatttcagagttccatcgtattttgctgatgctacttctgaaggtgaaaaggctatcatatccgctacactgaccttccccttgaaaatatcaagaccttgcacatcgaccttctcaccagcatatttgtaaggatgggcgctctttgaggggattatttcaacagctggagaaggtagctgcagatccttctcggatacaattggcacacaactagtggccttgctgggaagcaagccagggaaacactgaaccagtagagacggtgccttcattatgctaccttttaatatctgctgctaacaaagctcctcgattgtagcccgagagggcagaatccagcgaagacgcgtctcctctcccccgcgcgcccttccgcctccaagaaccgcggcga

SEQ ID NO: 36122 - DNA, 479 bp, Setaria italica
  Peptide Sequence Number=SeqID_102096
gccctgttgccattcgtttccccttcatgaactcaaacatcctcatcgcatccgccaaagaacttcttcgcacgaagcaagccaagagggaattgcaggcatgcgcgcttggctgcagcccagacgcgcgcattgagtcgaacagctcagtggcactcctgaccttgttcgattggcagagctttattaaccttctcgacagcgtctcctcattcctctcctccaagaagtgcagcctcgacccaccatgctcagatttcatgtccagctccgccgtcgtcgccggcggagcacttcctgcgcccactccggccttctccccaacagccggctgtctcatcggacgccgacgcagcccgcgcctcttgccgccatcatggccatcagcaccgtgtggttcaccatcgacgcccaaaatcgctacgccagcgtcctctttgccgccgacctccgactcaagtaagcatggagccgcctac

SEQ ID NO: 36123 - DNA, 228 bp, Setaria italica
  Peptide Sequence Number=SeqID_102097
cgatattttttaatgatgttatgatgaataacaaagatatatgtcgttccattcgccttgatgctcaggccttcaaagacagagatccagcctgtgcgcaatatagttgggcattgttatacctaaagggttccataatacattagctatcctataggattgcaaggactggtaaccctttaggtataacaatgcccaactatattgcgcacaggctggggtcttggt

SEQ ID NO: 36124 - DNA, 1556 bp, Setaria italica
  Peptide Sequence Number=SeqID_102098
cttaggtcagtgctaactccttgtgttgtaagatatgggccttctatgattatctatataaaagatgagcactgaagcaggattctcggatgcacttgcatagacacaatcctactgtttctaccacaccactgaatgtaacttcagcttcatgaaagctagccaacatactccaggtctagactgctgtatatgtttgatcttatagatctctacatactctgagaaacaaaccgttcctagtcctaccacgtttgtcaacaacgtttcacgttattacagcagattaagggtacaagaaaactattaactggcatatttgggagccctgggtgacccgtttcaatcttcatttggttgcctgggcagaaagaggagcactcaaaagctcatcaacttatccagcctagtgccaatgacgaaacgtccaaaatggcatttggttgcttcatcgcatttcgacaaactttttacttcagaactccatgcaaataatacgacgaaatcccttttttcactcaacaacaattccactgataaatagaaagaagagtcaccattagctgtatcaatcatctgagtatctgatggcaacatgctcaaaataatcttttcttgcatcatgtttcatagttaaagaaggatcttctttctccatgtaaccaaccacctttgcgggattacctacagccatactgtggggaggcacattctttaaaacaagggatccagcagcaatcatggcaccttcacctacatttatgttgccaaggatagtagcaccagctccaatgagagctccctgaccaatcttggggtgcctgtctccatgttccttgcctgtacccccaagtgtaacaccctgcattaatgaaacccaatttccaactacagcagtttcaccaatgactaggcctgttccatgatccaacaatattccctcaccaattttggcagctggatgtatatccacagcaaagacctcactaatacggctttgcagtgccaaagccaaaactttacgtccctggttccataatacattagctatcctataggattgcaaggactggtaaccctttaggtataacaatgcccaactatattgcgcacaggctggatctctgtctttgaaggcctgagcatcaaggcgaatggaacgacatatatctttgttattcatcataacatcattaaaaatatcgatcagctgagtagcaagcaatgttggatcttcaagcctgtttgcaaggacgaagctcaacgctcgctccagacaatcatgagacagcacactggcgtacaagaagctacttaaaataggctccttctcagactcagacttggcctccgacttgacggcctcccatatggggtccccgggggagtcgactaagccccgcgccgccgcgacggtgctcgcccgcgagctccccatgacgtagatggggaaaatggcctcggaccggctcctccacgcccccgcgcacgatccgccgcacccggagccggcgccaggcgccaccttcactaccctcccgcgcgccgccgcctcg

SEQ ID NO: 36125 - DNA, 246 bp, Setaria italica
  Peptide Sequence Number=SeqID_102099
aggcaacacgtacatgaaggcgtcggcagaaaaccctctccatgtttcacagaactccttggagatcagcacataggcgaacagcatcaggcagcagacccaaaacgttgctgagaccgccgcggaagcgcccgcgagccccaggccaaacacgttcaccagcaggtgcgccagggcgacatgcaggacgaacggcaccacggagcagacgacgagcggtagtaccacggactgcgtctgaaggta

SEQ ID NO: 36126 - DNA, 715 bp, Setaria italica
  misc_feature (348)..(348): n is a, c, g, or t
  Peptide Sequence Number=SeqID_102100
ttaacgttttctttagttcttacgttaaacgttattgttaaattagaaatttttgaccctgttacgttgactagcctgactttatgaagtaggggtcataggctcgtagctacaccaaaaggcgctagatgaaggacacgatgtacattggcaactccaaaagcttggcacagggagggtatacctggagcatcatcacccaacagctgttcctttctcttagacagatgctacagcagccctttggacacgagacggtgggccctaaaaaatcaaaactgcaatctcgcaatgaagatccactagccgttaatttgagggaagatctgtgatatcttcatgaaaacntccatgacctctttgcattttggtatttcacaatgttaagagggttctgcgagcaatccatgatggctgtctggatttttggattttggaatgcaacagcgacttctgggtttgccattattttcgatactacttcctccggagtcatgccaacttgcgcaaactgctgtcgcacttctggactgctaaggtcaaagttcttcaggtgatcaaccatgcggttatcccattgatcaggagacgaacccatgttatttagcatatcctgtagttgttggcggtacattggattctgcagcatccaacttagaaacgaaataactaagggttaacctaacaaataactaacttaacgggaacaaaagaa

SEQ ID NO: 36127 - DNA, 1063 bp, Setaria italica
  Peptide Sequence Number=SeqID_102101
aatcgtttctatcatgccgtgacatcctaccattgaagattaatatggtttgtataaatggcttttatataatcaaactacttcctgccatgattcatcttaattccaagtactcaaacttaaacaatgtaatatacaaaaatgcaatagatgtattacagcatatcctgtagttgttggcggtacattggattctgcagcatccacttgaacgaatctgggttcctcatctcttcgggcaagtagggatacaccatcttctgcacagctggatcttccatcattttctcgattgtctcaacagatagcataggtcctgagttgctagattcagttggtccacgagcagcaccttcatttggcttaaaagcctctccatttgtgggaacttctcgctcagtatcctccttactttcactatctgtactatcactttttacatctacggtctccagtgaagattggaggttcttttgctgcaactcttcaggagaaacatcgacaaatgcaaatttctttgaaggtttcggtgtttcagccacatccgcctcttttgatgttccagcagcttcaacttcagtagccgagacatcaacagttgcagcctgtgggtaggtatctttctttggtactgagtatggataaggataactgcttggtgcagtgggagctgcctgtggcggcatggcaaatgggaaaggggagttggagccaaatgagtttgatggtgactgggacatcattgacttaaatgcttgctgcatggcatatttctttaccatggaagagaccgtggtaaacgccacagacaatgctacaccaactccaatccagaagacaggagaaccaatgtatgatgacgggggaggcatgggaggcagggtaccggttccagtagacgtattctcattgctggtcgaagacgacacgcttgcaaagccttttgctctcaatccctcgaaagcgttcctggatccgcgaggagccgccgccgcgacgaggagcctgggcctcctcgcccctccccgcgcggcgccgccggtggaggccgcggtcggcggcg

SEQ ID NO: 36128 - DNA, 710 bp, Setaria italica
  Peptide Sequence Number=SeqID_102102
tcttggattttttggtattttttggtaattgtctaactagtcgaacttccttgggtttgctacattattttcgatactacttcctccggagtcatgccaacttgcgcaaactgctgtcgcacttctggactgctaaggtcaaagttcttcaggtgatcaaccatgcggttatcccattgatcaggagacgaacccatgttatttagcatatcctgtagttgttggcggtacattggattctgcagcatccacttgaacgaatctgggttcctcatctcttcgggcaagtagggatacaccatcttctgcacagctggatcttccatcattttctcgattgtctcaacagatagcataggtcctgagttgctagattcagttggtccacgagcagcaccttcatttggcttaaaagcctctccatttgtgggaacttctcgctcagtatcctccttactttcactatctgtactatcactttttacatctacggtctccagtgaagattggaggttcttttgctgcaactcttcaggagaaacatcgacaaatgcaaatttctttgaaggtttcggtgtttcagccacatccgcctcttttgatgttccagcagcttcaacttcagtagccgagaacaatacaaacaagtttagtactaagtaccttagtagggtaaggtaatactttactttaggttaacttagtaagta

SEQ ID NO: 36129 - DNA, 1304 bp, Setaria italica
  Peptide Sequence Number=SeqID_102103
aagggtagaaaaggggtaaaaagcgtgcgcctctctttcccgtctctcctctaaaagggcgctgcgtttcctcgccgcatctccccatccgccattgcctttcgccatttcttctcttccctcgcatccacatctccgcgtgctccatctctctaccaagctcgctcgctgcggaagggttcgatccggtacgaccaaggatttggacatggctgaggctttgtgcaacggcgtcgtgccgtcgccgtgcggcggggacgtgggcgtggccggccgggtcagtggcgccgcggcggcgctagcggagtccgtgccgatcggcggctaccgcaccaagagctccttctccgcagggaggatggccatgaccgacaggaagatgaggcccctgcctcggagcatcgaggccgcgcctggacagatgaacctgtcgtttcctaaggccatgcggtggtgggagaaggggctgcagcccaacatgcgggagatcgagtccgcgcaagacctcgccgactccctgctcaacgccggcgacaagctcgtcgtcgtcgacttcttctcccctggctgcggcggctgccgcgccctgcatgccaagattgcccagtttgccgagaagaacccagatgtgatgttcctgcaagtgaactatgagacgcacaagtccatgtgctacagcctccatgtccatgtcctccctttcttcaggttctacaggggagccgagggacgggtcagcagcttcagctgcacaaatgcaactatcaagaagttcaaggacgcgctcgcaaagcacggacctgacaggtgcagcctcggccctgcacgggggctggaggagtcggagctcatggccttggctgcaaacaaggacctgcaattcacctacgagaagccgggccttgtcccacttgcagaagccattgccaaggaggctgctgcaccaggaggcccgtggttccctttgcctgcgtccgcgacgcagttcctcactcagggatcagagaattcattgctgtcatccggaagatagacactagttccatccagattgcccctttctgtacagatttattctttcttgttctgatgtttgagtgacatattgagatgcagatgcgcaggctttggcttttagtttataagcctgctgactattgcatctgtgttgtagcatctagtcattgctcaagcatgaaatcgtttgcttgacgaacctgtctgagtcatgtctctgtgcacggagaattcgttccggcatgattgataatattaatgcttgagctgccctttacaaaaaaaaa

SEQ ID NO: 36130 - DNA, 1224 bp, Setaria italica
  Peptide Sequence Number=SeqID_102104
tttttttatttaaaacactggatcggatcttcatcgtatattgaaattaatataatgatctcgacatttacgcatgaaatggtgacaatttccaagaagatagattacagggccaagaaaggaagagccaaaaagacggtggataattaatgctgcgcgtcgtcgcctatgattggagtcgggaggcggcgccggcgccgtcgtcggtgcggggtaggccggtggggcagccgagtaacgctcacttgacgcggcggcagagggtgacgccgtcgccgacggggagctggcagatctcgacgcgctcgtcggcggcgagcgccttgttgaggactagcacgaagtcgcggtagtagcggatgtacttgcgcatgggggcgtcgttggggagcacgacggagccgttccacagcgtgttgtcgtagccgatgaggccgcccagcttcaccagcttgagcagcctctcgtggtagttgaggtagttgtccttgtcggcgtccacgaagacgaagtcgaagctgccgtggttcttctcgtcggcgatgaggtcgtcgaggacggggagcgcggggccctcgcggaagtcgatcttgtgggcgacgccggccttctcgatgcagggcaggccgagctcgtagttctcgcggttgatgtccatggccaagatcgtgccgtcctcggggagggcgagcgcggtggcgaggagggagtagccggtgtagacgccgatctccatggtcttcttggcgccgatgagcttgatgagcatgttgaggaactgcccctcgtccgccgacgtcgtcatcaggttccaggggtgcttggcggtgatctcgcggagctccttcatgctctccggctcccgcgggtacacgctcgtgtccaggatgtactggtagaggtcatcgctcttgagcaggctcttgtgtcccacctcggagtggcgcgtcttctgctcgccgttgccgttggcctgctgctgctccgccgccgcgggctgctccgccgccttcgccgcctcggccgccgtgctggccattgccgatggtacggtagtggctgctgaacgggtctgggagatctgggtacgagagggggtgtagctggattgaccgaaccttgcctttggctgccaggacgaggctggctggctggctgggtcatataacgcgcggccgcggcagcagcgtggcggttgggcggggcatgtgaggtgaggtgagc

SEQ ID NO: 36131 - DNA, 1226 bp, Setaria italica
  misc_feature (18)..(18): n is a, c, g, or t
  misc_feature (123)..(123): n is a, c, g, or t
  Peptide Sequence Number=SeqID_102105
cttactattcatcattcngaaaagagttgctgaagaacctaaaatcatgtttctgcctagtgcctactcagtcttccacgcatttagtatcaaaagtgaaaccgaaacgatgtgcttgagccnccttttcattctgtgagcatgttctcaagaacttttccattgattggccagaccgaacaaaaacacggcacatccacttgatgaagtaaacaaccagtcatgcacatcccagagcacctctactggaagtccatcgacataaatcgtctggttccctctgaacttccatgctagcctcttcacctgcaacactttcttcttgtcaatcctaatttctaagcttggatccctcacccctgccatgtcgcactctatggagatgtgatgaagctggccaatgtccaagaaccgagctttcgcagaatacaccttctttgcataaatgtgctcctttctagctatcatgactgcatcagaatgtgaagcatccgacaaaacccggtgctcctcctgcttatgcaggtcgccaagaacaaggacaacttcaagatcatggaccagagccacatggaagccttcaaggggttctggcccagctgcaaatttcgcagatgacaggtcccagatgatctccacatcgccaccaccgtccaactccatgaccttggaacccttcatcttggagaacagccagggcttcacctctgccttgcagaggcagcgtttcgagcagtcatggatggcggaagcgagctagagcccaatggccaccttggtccaggtgacggtgacccggcaaggcttgccgcgcaggcgggccaggtaggcgcaccgcaccaagttctgcccacctgaagaagaggtgtgcgcaacctggacggcgccgtgactcaggcaagatgcaaaatccctcatcgtgacggctgctgcgatggtggcgagatgcaactccctcggtgcggcttttcaacgagcactacgcgggcaactgccctttattggcaggagaccggtttctgcgcttggattcaggacgcctgattcctcctccaaagaactcgtgggattggatccatcaaaatctcatctttgcagaagatatcccacgataacctgtagcggatgcgtgttgggcctgaaatctttccacgcgtaatcgagaatcaccagcaggcagtagcacgagcccaagtgcccatacggaggaagaaatcaccggatgg

SEQ ID NO: 36132 - DNA, 504 bp, Setaria italica
  Peptide Sequence Number=SeqID_102106
ctatcctaatttaaaatgatagaccagataggttccagtgtttcacaacaatatacactaaaattggatgacacaagtgagcagatgaaaatatacataacctttggctcttctagtttggcaagatactgaaggtatgattccaagttatcattaggagcatctacattcagagaatttggttgactttcagcactatcccaattgtcaccctgaaagaatactttacacaaagacttgtagtcctgtgggagattagcttcatcattctgttctacatgatattcatgcatcatccacccagttctcttgccacatgatgcttgaccttcataaaactccaaaataattttcatgcccaagatacctgtacttgttggtattctggatgactccacaggtttccagtatccattctttgcctttctaataccgttttcagcactatcatagggctgttgatcatctgaccagttcaagtaccacatgtctacagtgaagtcc

SEQ ID NO: 36133 - DNA, 477 bp, Setaria italica
  Peptide Sequence Number=SeqID_102107
caacacagtcacactcaccatcctcttaacaatttgttcacagcgcaggaaatcgacattttccatgctcttttacaaaagtacttccaagttgcttggtatgatagcaaaaactgctttcactggcatcattctgaccaagttcaccatctacacttgctacagaatgattccctaaccaacaggagtcctacccttggccttgagaagctcactcagagatttgggcccctcaaaatcatttgaggatgatctcccatgagccatgtgaacagtgggatgactaaaacttggcctggacctacacttctcttcttttatatgagcaagggacttcggaccagtaaaattttcaggatcatcaatgtgctttgcatttgcattagtatagtttgatgatctagcagaatgagcatagtgttgctttgttctacttttcttcttctgtcctctgaaggttgcacagacaagagaacg

SEQ ID NO: 36134 - DNA, 607 bp, Setaria italica
  Peptide Sequence Number=SeqID_102108
acgaccaccacctcccccgggcgccacctcgcgctcgtaggcggcgtcgatgaggtcgagcgcgcaggtctccgacgcgaacacgatggcgccgttggggcggcgccccatcaccagggggcggaagccgaacgggtcgcgcacggcgaagagcttgtcggccgtcaggaacagcagcgagtacgcgccggcgaggcgctcgcaggcgtcgcagatgcgcgagagcagcgggcgggagagcgaggtggcgatgaggtgcaggatgacctccgtgtccgacgaggtgttgaagatggagccctgcgcctccagcttgttgcgcagcgcctggtagttcacgaggttgccgttgtgcgccacggcgagctgcccgaacctgtacgcggcgaggaacggctgcacgttgcgcatcgaggaggcgccggccgtggagtagcgcacgtgcccgatggcggcgttgccggggagcttggcgaggcgcgtcgggtcgccgaagacgtccccgacgagcccgagccccgtcaccgatttgagcttgccatcggcgtccgaggcggcgatgcccgcgccctcctccccgcggtgctgcagcttctgcaggccgagg

SEQ ID NO: 36135 - DNA, 338 bp, Setaria italica
  Peptide Sequence Number=SeqID_102109
gcacaaccagcccaacggggggttccgtgtacgtcaggtcgaagaacaggacggtggagttctaccggcggtggcgggaggcgcgggcggagttcccggcggggaccaacgagcagtacatcctggcgaggacgcaggccacgctgacccggcggctcggcgtgcggatgcagttcctcgacacggccaactgcggcggcttctgccagctctccggcgacctgcgccgggtgtcgacgatgcacgccaactgctgcactggcctcgccaacaaggtgcacgacctccggaacgtgctccgggactggcgtaactacacggcggcgccgcgggaggta

SEQ ID NO: 36136 - DNA, 1382 bp, Setaria italica
  Peptide Sequence Number=SeqID_102110
ttttttttttaatgcgtgctaaaatttgcaagattgtttattcgttcctgtgcaagaattctgacaaattacatcaaacagcatctaagacaggtataactgacaatgccgtaatggtatcgtgtctgtcccccctacccttcctagcaaattgagcgggagaactcaaaagtaacaagaaatcagttgttacaggaaggctgcagctcctagcaaaaacaaggaaaaaaccttggcacccaaaggaaatggttattacaacgggttgaaaaatacaacattgcaagactgggttgagccatctcgggcccgtgcgtcttttcgattgatttctggccatgcaattcaacgccgaaaagggcatgtttgttcacttctatgccttcatctttctcttctttctcttgctcttgttcttcttggatttggccttggtggtgggcttgctcttgtagtcaggagctttgtactcaggcacatcgcgaagccccagctttgacagaacaaggcagtaagagtcccaatcggttcttctcaagtatttgaggtacttcttcctcctttggaccatctcttgaagcccctttctagaatgtttatccttcttgtgtagaacagctgacaaatgcttgattttcagagtcagttgggcaatttgaactcgtgcagaaccacagtcattctcggacatcttgaactcgtccctcaccctttggagctccagtttcatcttctcttcggatgacatatggtctggatggaaatacctctccaccaactcctcctgcggaggcagtcgcgtgtagtctggtgtcatctgccccccaaggctcagcattgtttgcaggtgtaccccctgaccctgaaccgttttttctggttgcttgagatttaagatgcttttccggattacagcgaacttcgcaccaagccgatgctcctgcttctccaactccacaagcttggcgatccgcccctgcagctcctcgagcgagaaccactccttaccgtccttgaccgcgcccgctggccgcaggtcccctagccttttcccaagatcctcgtagctgtagaccctcataagcgtggtgccagaatccttctcctcttcttccccagccttcccgcctctctctagctccttcttgaagatgtccgacttatgggacaaaaacggcgtcggctgaaggggctgcctctgctgcgccggcaaggcgcccttgaggctccctctgatgggataatagctgccgaaacaagaacaagtattgggacgctggttcttgagcaagtccatgaaggatggggtggctccgggagtggagggggaggctccgggagtggagggggaggtcaggccgccggatctgcggaaggactcg

SEQ ID NO: 36137 - DNA, 611 bp, Setaria italica
  Peptide Sequence Number=SeqID_102111
agcacagaatcttgcaaatcagcaggattctctcaaaattctgatgaaaactcgagaaagaaagatctggttccttccttgtacaggactcagaaattggaaatctggctgactgtttgaacttaaaggagaggggtgctgaagccaatccacacaaaacaaaccgcgagattctgaagcgaaacccgcagtctctggcgcccctctgccaaggctggagaagggagcgagtcgaggttgatgacgacgggagctcagaaccatggagcggcagagcaggcgacataaatcaacagcgcgcgcgtggcgtgcggcggcggctgctcctccagtcctgctcgcagaatactagcgtgggggccacggcgatctccgaagcccgaccggaggactggactgggtgaaagcggtgtagccggcggaatggggggcgagccgcccggaatccggatactggatcggatcggggagagtcctgcgcggggagaggagagatttgtgggctcttgatatttttgggggagagccgaagtggagagggcgcggggtttaatggtggtcttccggcggaagagcaggggaggaggggagatgaggagcggagcagggag

SEQ ID NO: 36138 - DNA, 247 bp, Setaria italica
  Peptide Sequence Number=SeqID_102112
ccgctaccaatggcggccgtcccgagctcgagctgagaatccagcagcaagagaggagacagtgcggaggcctcggacggatgggtccagcggcacgggagcggcggcggacgctgctgctagtgaacctcgcgtccatcatggagcgcgccgacgaggcgctcctgccggcggtgtaccgggaggtcggcgccgcgctgcacgccacgcccgcggggctcggcgccctcacgctgtgccgctccat

SEQ ID NO: 36139 - DNA, 668 bp, Setaria italica
  Peptide Sequence Number=SeqID_102113
gggacgaaggaggcggagaagggtcggcggaacagacagggtcgggcgagacggaaccggggtcgggcagataggaggggtcgtcttacagagaaggctggggcggaaggactaaggggcttgggacaacggcgaggatgtccggcggtgttccggtggcggcggtgcttcttgtggatcacagcaagctcttgggcggcactgaaagcagtggctggtggattggggaaagtggtgttgcgcggagatgagagttcctcagacttaggtggtggcgctgtgagctcgaacagggagcaagagagagggcaacgatggcaaaggggaactccggcggaactccagcatcccattttatagctgcgcggcagagggaagggggagcggcgcgaaggccagggaagaaacgatggagtgctctgccgggggtggcaattgagtgtcaagggcggtggagcaggacttcggggatgacaccggcggccattgggcactgacgtcagggcggcgcaggcgcaggtttgccggtggttgagatttggcggaggtggacgtcgtcgtgcggtggatctaatggaagtgaccggaaaaatagcgctggaaacaagggcgcacaggtgagaagacaggcggctggtggtcggttcgggcgagcacggagcaacaga

SEQ ID NO: 36140 - DNA, 298 bp, Setaria italica
  Peptide Sequence Number=SeqID_102114
tatatacagagaagaggaggcctaatccaaccattggagtggttgcagatgtcggaggagatgcccatgccatccaatagttgcttgctacctgaaatatttggaagaatgactgtgcggctattgttagtggcactaaggctccaccatgaactgccctcaggagttgcagtcttcaatctttgtctccaccatctgattttcttgaacagaaattgagccgatatactcatgatgaatatcagttgtatcagtgcaaaagtggtcatccagaagcaaggatcaggaaagcagaatt

SEQ ID NO: 36141 - DNA, 548 bp, Setaria italica
  Peptide Sequence Number=SeqID_102115
ggtccgccacaggtttagtacttgttcattcagttccgcgtgttttcatccttcatattttaactacgtattcgatggcgatgcggcggcgctccgtttgggactcgccggtgttccgctttcctgaagatccaccgcgaggcggggaagcctgtggaggtgtttgaggctgcgcgcgtcgagcggatgctgcggtcggggcagtcggccgacgcggagcattacctggagcgtttcctgccgcccatccccatcagggaccggagcccgctgtcgatcttgctccggttccacgtccgcgtcttcaggatcatctccaaggtcgccgccggtggcccatcaggtgcaaagatggccgcactcttcgcaaaccccagcgagtacattagtacatatgctccggagcccctacagcgctggatgtgtggagtcaaagaaagacattggggcatgcatgatgcagtggagcatgttcttgaagaacttttctgatgttagtagaccaatcagtgacacgagcaaggaccgagccaagacgcacagggcac

SEQ ID NO: 36142 - DNA, 3454 bp, Setaria italica
  Peptide Sequence Number=SeqID_102116
tttagtaccaactaaaccagtacttgttcattcagttctgcttgttttcatccaacttcatggttacttttcagtgcataatttacacggcatagctgccaatttcttgtttcttttttcaacatttccttgcatcaacagtaataataaactaacatcactccaattctctgaatcatcttaaactaagagctagtatggcagggccatcccttgtaaatccggcccgcgtagttttggtgcgtacttgtcacatttcgagatattgtgtggtagtcagtcaacttccatatcgagcttcaccatcttggcctcatgctgttcttgttgccgttcaactgtttgctgttccactgaagccatgtgatcgccgcgagtactcctttatgagtctggagaattcagagctctcattctccagtaattttgatggcgtgtcgtattctataattcttccttcactgaaaacaagaatgagatcactatcaattacagtgtggattctgtgagctattgtcaagaccgtgcaattcccgaattcctcgcggattgtttcttggataaccgcatcagtagaggagtcaactgaagcagttgcctcatcgagcacaagaacgttgcttcgctttagcagaacccttccaaggcaaaacagctgcctctgtccaacactccagttctccccattctcaacaactgtcgagtccagcttctttgggctttgccgaactatgtcaccaagctggcatttgtccaaaatctcccacacgcgatgatcagaatactcgtttaggggatccagattccctctgactgttccctcaaacatagttggatcctgtgggatgatgctaagtctgccacgtaaatcatgcagccctattttgcagatgtcaacattgtcgatttcaattgttccttcccttggttcgacgatcctgaaaagtgcttggataaatgtggactttccactaccagtgcgtcctacaattcctaccttcttccttcctggaattgtgcatgatatgtttctcaaaacagatgggagatgctccgcatatcgaacctccaaggatcttatattgatagttccagcttctggccagctgtttggtgggcggtagtggtcaactgtgagaggtgcctcgctagggatcctggagtattgcattattctttcaacagatatcattttgttttctgtgttgcaaatgttccaaattatggatgccagctgagaattgaggttcaatgcataagtcactgcaagtccagcaatgcttgggtttataaaaccttcaggaaggctcactagcagagttaaagaaaaggcaaagacaaagttggatagcatgtttagcctgaaagaaagccactccattgaagagatgttatggaaccatggcctggagtggttgtcaacaagaccaaggtttgcttttctgaaacgatctttctgcccaaatgctctaatacttgatgctcctgctagcgattctgcaaaatgatgtaggattggagccctttgaatttgtgataaacgagccaactctcttgctgttggtatgtagtagcgttgacacaggaaacagaccacggtcactggaacaaagatagcaaaaactggccatgcaacttgtgacataacaccaatggttcccagaatttgtatgattgaaaacacacaccagccaagcttgtttgctatttccagatctagaacactttggtcattagaggccctgttcaaaattctgcctgtaggtgtggagtcaaagaaagacattggggcatgcatgatgcagtggagcatgttcttgaagaacttttctgatgttagtagaccaatcagtgacacgagcaaggaccgagccaagacgcacagggcacttcccatagatagtgctatatatacagagaagaggaggcctaatccaaccattggagtggttgcagatgtcggaggagatgcccatgccatccaatagttgcttgctacctgaaatatttggaagaatgactgtgcggctattgttagtggcactaaggctccaccatgaactgccctcaggtatgcccagtagaccttcttgccaatgcctcccttttctcgttcttcttcttgcgtcaacctccccttctcactgatgtcttgtgagacatcatgtgcagactcttgctttgttatgccctgaagttgatcgtccatttcattttctgtatcaagctcatcctcactgtctgctgattttcggttgtctgacagcattctgctggaactctcagcattcataacagattcaagagcctggctatgggctcctactatagcttcaaatcctatattctgttgaaggagctcatcaaatttccctttctgcacgatttttccatcttgcatgaccagtataaggtctgcggctggaaggaattcgacttgatgggtcacgtacaatactgttttgtctttaagaattcccattacacaatccttgaaaagctggcttccagtgtgagcatctactgcactaaaaggatcatcaaagaggtaaatatctgcatcctcatacaccgaccttgcaatctgaattctctgtttctgtccaccactcatgttaattcctctttcaccaatctcagtcaaatccccatttgcaaacaactcaaggtcttttgtcagtgcacaggcttttatgatcttttcatacttgtccttgtcatatggttttccaaacagaatgttttccctgatgttcccagacaggatccaggcagtttgaggaacatatgctttgctaccactgaccctgacagtaccatctagctttggcatctccccaagtatgcatgataatagactggactttccagagccgaccattccacagatagccactttcatccctctctttacagttaaatcaacatctgtcagagttggagaagtcgtctccagttcccagctgaatattccatgatcaatctccacatcatagtctgtttcatttcttggtacttctataactgcatcacatttcaattcttcttcctcgaggtattttgccactctatcagctgaaacttttccctgagcaaacactgaaagcaagtcaggaagtgtgaaaattggatcttgtagcatacggaatgttgcaagagctgacaaaacagttccagccgtcagaggaatccccatcaatatacatgacccaaatgttatggaggaaatgaatgcaggcgacccccaaaatatgaatgttgttagagctgacaacctcacagatttccatagccaattgtactcttcacctcgtaaagcttccaacttttgaagatacttaatatcccatgcttgaagtttcagtattttcatgcttctaaggacttccgttgttgccttcattctattgtctttggcaaccatgatcttgccttgcaacctcttttgcattct

SEQ ID NO: 36143 - DNA, 716 bp, Setaria italica
  Peptide Sequence Number=SeqID_102117
ctatggacatgcccttttggcttcagcctgttgtcccacagatggactcaatagtggctctgttatgttgctgtatgtaaatgtgattcctgttttccctctggctgaaattgcaaacagataagtgcaaacaacaagcatgaatagatcgatcccttcttcaaatcctatatcttcattaactgtcaaaattgacctgagatcaagtgtcacaatggtgactgattgcagaaagttaaatatccaccaggaccgaattatcaatggaagttttgcagattttgttttctgaaaaccgaatactgctaatgctaatattagccatgatagcacctgcaaaccttcacaaagaataaaggggggatacttgcaatcacttattttttcatgtaactgtggaaatactgtcctcacaacatgagcggctaatagaagcaggcaacaagctttgcatgctttatatgagatacccagctttatgtctgtaatttcgtgttcctgatgctgtttattgctgtcaggagttgcagtcttcaatctttgtctccaccatctgattttcttgaacagaaattgagccgatatactcatgatgaatatcagttgtatcagtgcaaaagtggtcatccagaagcaaggtgaatatagctcctgccactcttgcatatagggcaatgtagtataatctgaggaatcatcgagcaagcccccgcgga

SEQ ID NO: 36144 - DNA, 505 bp, Setaria italica
  Peptide Sequence Number=SeqID_102118
cgatggagaggatccagctctgcatgcagctgcaggagctgcagaacccgctcggcgcacaccacagccccatggcgtggcctggcaccctgagcaacaacagcttcaacagcaacagcagcagtgtgacagtggctgaacaagggcagtccagctccatgaacgagcacctgatgaatgcgcagctggagggcgctgccatggacggcctcggctcgccgtcgagcgcggagaactcgaacgtgatcagcatggaggctgagcttgaagagctgctctatggagaggggaaccgagggaaggccggtgcggtcgacggcggtgtccagcaaggggatgtggactggtggagctatgaccaggggaagttacctatgggttcctgggacttcaccccggaagcaaacgcagtgttccaggactacacatctgtttacgacatttgaagagtgaagtgaacaagctgtggattaagatagagaggtgataggagttgtccagagcc

SEQ ID NO: 36145 - DNA, 434 bp, Setaria italica
  Peptide Sequence Number=SeqID_102119
ctcgaggtggagcaaaacagtgtgcttcttgtgtcagttgtactcctagattgcatgcctttattgttcagtcactagagccattgaccaacttaactttagcctgattagctgaccatttcctatccatgatgcctgtgagtcttatggctagcaacaataggcctgcagagagcttccttatgccatctgctcactgaatctctatcgcttagtaccccgatgggatgatgatgctttggttttacttcacacgaaaacattcgcaagcccaaaacagttgctaatcagaaagtactaacttgaagcccactactaatcaagtaaacatcatcctagcctctgcttcttgacgaatgcaaactgtgtattccaactgcgaataagcaccagtgactaactggagtcttgaggcagcagaaaagaccatgaac

SEQ ID NO: 36146 - DNA, 1390 bp, Setaria italica
  Peptide Sequence Number=SeqID_102120
ttctttacttcagggaggactctctttactttattcaacaggtggaatgacatgttattcgacagtgcgaatacagaaattaaaggaggtacaaatcgtactcatgaagccctcaatggcattatcaccaagaagacgcatggtttattggaaagctcacgagctcttgttcaacacaacaactggtaaaaacgtagtgcatgtccctactacttggtaaactcaagagcgtaaatgttgcagaagatgtaggtcgactggaagccaccagtaaatccagcatccctgccaagcttggcgtactcctgctccgtcctctccttccctcccttaaagtttacaagaatgatcatatccatggtgaacgagtcccgggaagccggagtcgactccggggtctccggcaggacgctctgaatgacgatcaccttcccgttatccgggagagctttgtggcagttcttcaagatcatcatgcactcctcgtcgctctgcatgtggagcatccacttcatcaaaactgcgtctccagagggtacgctttcaaacatatcgccagccacatgctccactccttcaagagacggagcctcagagatgacatgagcaagatccatgttgatgcccttgatgtgcttgtaccggcccctgatcaacgctagggttgctccggtgcccccaccaacgtccacgatcaccccaacgccgtcgaacaccttcgggtgctcgagcagcttcctgatcaccagcaatgactgatgagccatggcctggtcgaagagcgtgctcagacgcgggttcttcccgaagtagtcgtacgccggcgtccccccgtgggctatctggaacggcgtctgcttgccgccgccggccactgcgtccgctatgtgatgccaggacgagaagttgtcctcgtcgacgtcgaacacggccatggggccaagcgagccctcgccgttgttcatggtgagccaccggcacgccggcgccggcgagtaccgccagaggacggcaccgtcgggacctttctcggcagagcacctcacgacgtcgaaggacgcgaggaacctgaggatgcggccgatcaaggcggccgactcggccttgtcctctgccttgacaaccttcgcggcgagctcgtcggcggtcagggcacggccgtcggccgcgccgagcgcgtcgatgaggccgagcttgactgccgcgtggacggccatggtgacgttgtaggcgtacaccagcgtttgtgcgtgcaggcaagtcgcgtcgtcgtcgtcgacgacgacgccggcaccattggcatacccagtgctgcccatggctgataacagttagccctaagcttgcctcttcttactaaatgtaacttgacaaaactttagtactttta

SEQ ID NO: 36147 - DNA, 647 bp, Setaria italica
  Peptide Sequence Number=SeqID_102121
cgaaatacattggggacaaattcagctaaaataaaaaagatgcaggaaagttgagctccagagaccaagaccaagagacaggcaattgatccaagataggatgaagggattgagggagctcattccaaatgcatcaaagtgcagcattgatgctctactggacaaaaccatagcatacatgctgttcctccagagtgtatccgagaaagctgagaagattcagaatacattggaagacaaggagtcccgcgatgagacaaagaaacaacttgaaagctgccctctgagagttgaagagctcgatatgcctgaccatcttctcattgagatgatgtgcgaggattatgaagtctttcttgagatggcgcatgtgctgaagggccttgaggtgagcatactaaaaggagtgctggagcatcgttccgacaagctctgggctcgcgttgtcgtcgaggcatcgggaggtttcagccagacgcagattctgtgcccactgatgcatctcctgcacaggagatggagttagcatggcttgtccttgaaatgttgtggttcattttggattggttgatgcagtctgttcgcttggtactttactactatgtacttacagccaaataatggattcacaatgcattcacatcaac

SEQ ID NO: 36148 - DNA, 418 bp, Setaria italica
  Peptide Sequence Number=SeqID_102122
taattggttaaattattcgtaaaaatagaaaagtttaaatgcgcatgccttgggagtatccgtcctgtttttacttttggtaagaggagtgctgccattgtgttgcgaaagcataagcatcgtctcgacgcaggataaaagaagtggtccttgttgtgacagatctgatccatgcttctgtccagtacagatcaccggttagcttgcgttgacatcctcgtccatgagctaagggatggatgagagcggcaagaagcgtcgtcaccacttcgtgctggtgcacggtctctgccacggcgcgtggtgctggtacaaggtggccaccgcactggaatccgccggccaccgcgtgaccgcgctcgacctgcccgcgtgcggcgccagctccctgcgcgccgacgaggtgcgctcgttcgag

SEQ ID NO: 36149 - DNA, 356 bp, Setaria italica
  Peptide Sequence Number=SeqID_102123
gacgccacggtgcggcggcatcctggttgcgccctcggcgtgcacttcttcaaccacctgacgggcatcgaggcggtgctgctctacagcccgcgcatcttcaaggccgccgggatcgcgacccgcgacgaggtcctcgcggcgaccgtcggcgtgggcgtgacgaagacggtgttcatcctggtcgccatcctgctcgtggaccgaatcggccggcggcggctctacctgtccagcctggcgggcatcatcgcctcgctggcgtgcctggggctcgggctcaccgtcgtcgagcgctcggcgccccaccacgcggcgcggtgggcggtggggctggccatccaccacgggtgttt

SEQ ID NO: 36150 - DNA, 945 bp, Setaria italica
  Peptide Sequence Number=SeqID_102124
cctgagcaggtcattgcagcaaaacacgtcagggaggccatatttggagagagctctgaagctatcttctgcagcagccatgtcttcctttgcaacatagcatcggagaagagcactgtaagaaaagtgcgaaggcttcacattcctcaccttcatagattctaacacctccagtgctctatcgtaatgtccaacattcatgtgaacttgagccattgccacataagtctgctcgtcgctcagaagatccgccttcccaatctccgcaaatgtgcgatgcgcgtcctcataaagcccaagcttaccgtaaatcctgataagaattccatagatgacttcatcaggaacaatcttgttatcttccatctctgaaaatagggaaagtgcctttgagtagtcctcattcttataatacagtgacaagagagatgcacatgtgtagttactggggacaattccctgaaccctcatctcttcaaagagccgcaacgcctgttctcctctaccatgtttggagctcaagctagatcaaaaggctgtaagttgcctcctccggaataaatttgcgccgcttcatctcaccgaacacatccatggcctcctccaagagatcttccttgacaaaggagctgatgatgacagtatatgtgaactgattcggcgcgacaccagcttccagcatctgcttccacacctggataactttccgtgcagcttctgcttctggccagtgcgcacaagagggttccacatgccactgcatcaggctcacagccaacctcgagcatctcaagaaatgtctcttcagcaagcttgatcttcccaacccggccatacaacctcagaaggatggtgtaggctacaacgcttggttcatagcacagctggagcttcatccatgcgaagaagtcgcgcgcctggcgccagccgcgctgctcgcggagg

SEQ ID NO: 36151 - DNA, 294 bp, Setaria italica
  Peptide Sequence Number=SeqID_102125
acaaattaacaaactcattctaatcaagcaagtgggaaggataatggcgcagcgtgagacgatcaaataaaaccaaggcaggaaactaaacaagaatgctgcgctgaataatggcggccgggtcgatctggatcagttgaacctgttgcagaccttgcggatctccccctgcatgccggtgagcacgccgacctcgctgagcttgatgagcgcctgcgggaaggccgaggtgaagaggccgtcgttgttggcgagcaggtccacgatccacctcgtggagccgtcgttgtacta

SEQ ID NO: 36152 - DNA, 427 bp, Setaria italica
  Peptide Sequence Number=SeqID_102126
agcgccgtggaagcagtgggacgagctgtggttgaggtaggtcgcgggcgggacgctgcagttgttggtgcgcgcggcgaggttgcacgagctcacgaggagcgtgttctggggaccgggcgcgtagttttccgagaagagctccttgacggaggcgttgagccggcgggagcagtccgggaggagggcgaggaagagcgcgcgcgccgtgacgttggacacgagcaggcccaggcctcgctcggccccgagccacgcggtgccggtgccgttcttctggtcgtcgcaccccagcggtatctcgcagccgggggagaagccgaacgggtactgcaccgtcaagcccccgcagctccgcgcgcagctcccgttgcccgcggctgccgcatgcagcgcagcacccaggcagggaggaccatcagcgctg

SEQ ID NO: 36153 - DNA, 411 bp, Setaria italica
  Peptide Sequence Number=SeqID_102127
tctgtcaaacataatagaggaggaaacctcgagcacaccaattgcccgtggcacgccggccctggcgagccagcgcatggcgtcgggctcgaacatgagctccacggcctccttgaaggcctccaggttgtccaccccatccacctcgatcctcttgccccctcctccggaggcgcccggcaccatgtcggcgaagaaggcgctgctctcgcgcagcacggcggagtcgagctccataacgacgcacctcccgtccctcccgcgcagggacagcctcagatccagcccgccccctccctcctcctcgtcctcccgcacgccacgaacggtgccgccgccgcggcctggtccctcgcggagcggcggctcctccttccctccgccttccgtcgtcacgaccggagagccctc

SEQ ID NO: 36154 - DNA, 1203 bp, Setaria italica
  Peptide Sequence Number=SeqID_102128
accctacctagggcccgcgcgtcctcctccccggggggaggctccagatccaatgggcgcggcgccgtcgacgccgaggctgggcgcgccgccgtcgcccggcgccgcggagcagatgttcgcggcgctggtcggcgggaaggcctacccgatctcctccgagttctggaaccagctgctcgagctgcccctcaccctgcagtggccgcgcgaccgcgtgctgcaggcgtgccacgccttcgcccagaacaactaccaaaccaagcatcttgcaaagattttgattcatttggtttggtgcttgcaagagtgcacctcaacaacttctgtatcatctgttgtatatcgaagggctatcaatgctgcatatatctcatccatatttctcaagttcatcattgaaaatgcaaaagctgataattggcaagagctatgccttgacattgacaagaatgagaaggggatggaaaattttcctgcagaaagcactgtggagtattttctgatgagaggcgtgctgaactacattggtaatgtagatgtaagctcggaatcatgctacctacatcatgaacttctgaacttgatgctagttcttatgtcaactcagttatgttctggaccatctccagaaccaaaagatgtgcatcctttcattgatgcagctatgcttcaggacagctccatagtagtctcagtggtgcgaaagttattgctcaattttgtagcgcggccaaaatttcctccaaatggttcacatcctgttttttctgatgatggtaggcctggtgttctgcagcgagttggctcagcagctgcaaattttgtcttactgccatattatacgttcacctaccttgtaagctcaactcctgagggtgcaacaagtcaattggcagataacagtttgcttgttctgcttgttatgatccactaccggaagtgcatttcaactaatgagtccattccaagcaacaatttatacacgggttcagataccaatgacaaggaagcacaggtttttcatgagaatccttattgcaaagcattaaacaatgctaaggacattcaatatgatcgtgctgatgttgaaggaaatgctcaagatggacctgttgccaggttgtcttttgcatcgttgtttgacgctcttggaagatgcttaaacgacgagagctcggttctgttgctctattctttggt

SEQ ID NO: 36155 - DNA, 200 bp, Setaria italica
  Peptide Sequence Number=SeqID_102129
cttctgcagctagatcattctcaccggctcccaccatggccacgccgtcccctcccagaccctaagcagcgcgtacagccttcgagaatcgccggtggctaccttgtccggccgcccatgccatggcgctgccgcgccagctcttcctccctctcctcgcggtctcctgtccgcagcggcgtgcctccgccgcagcgcag

SEQ ID NO: 36156 - DNA, 899 bp, Setaria italica
  misc_feature (1)..(18): n is a, c, g, or t
  Peptide Sequence Number=SeqID_102130
nnnnnnnnnnnnnnnnnntaaaaaaataaataaatttagaatttcaaacaagaagcactccatgttttgagctgaaataacaggcagtcacaaataactaaataagcatccaggtttgcacccctgaagttaacaacagacacgatgttcaaatagcggaagcagttccaggaaagcgttacatggaaggatcactttaaacctgacagcttaactaagacctacataacgaccaggacttacaacacaggagcgcacaaaagtccagtttaaactaagatgcacatcatctctagcccctcactccttggaggacttgttgatcagggacttatggatgtgcgggatgacacctccaccggcgatggtgcccttgatgagggtgtcgagctcctcatctcctcggatggccagctgaaggtggcgaggggtgatacgcttcaccttcaggtccttgctagcattcccagccagctccagaacctcagcggtcaggtactccaggatggcagcagagtagactgcagcagtggcaccaacacgaccgtttgcctgggtcctctgcttcagttggcggtggatacggccaacagggaactgcaggccggcgcgggaggagcgggagacgggtgccttcttccccttgtccttctccgccgacttggccgccgtcgtcttggccgcgagcagccccttgcctcccttcccggccatctcctccgctccgagtggaaacccgagtccctttcgcgagttttggcttccctccgactcctcctcacgccacgcgaaacgaaagcgagatttttttttacgaaagaacgaataggtagaaccctttaagtaaattaagtaaagggttaagttaacgtaaagtaacttaaccttaactaaattaa

SEQ ID NO: 36157 - DNA, 400 bp, Setaria italica
  Peptide Sequence Number=SeqID_102131
tccggtctggtcctaataactatgcaattatgcgctattaagaattcttaggttggctgttattcttgttcatgaactgcgaccagcatatgttcacattacaatggaggttcctgctgcaacatttgctttgcatttccgtggataaggtgatgtgtatgcccattaatcagacatggtacaaccagttcttattatatgcctacagctagtctgacaaatattattagttcacacattccaaaaatctgatggataagccaagatcataaagctgttccaacacatcatactacatcataaaaggaaatgatagtacaacatttacaaatcaccttgtagacagtataccggcacaaatagtttaacaacccttaaggatggttttcttaaactacat

SEQ ID NO: 36158 - DNA, 587 bp, Setaria italica
  Peptide Sequence Number=SeqID_102132
aatcctttattagccttactaaatgatgcaagaaggtattttcttttgcttgcaattaaaattagcggtaacgctattctcctctcatcagggacctcccttggggctgtgcttggctatcaccagcattcatcctcgcctgagctgcagaacttaccatctatcaatgcatcacaaatgtggtttgcatcagcaaggtagtttggtgtgccactgcccagcagcccagaatcaagcactaatggaaacataaggaccaaacaatgtcccatgagatggatcgacttcagtatgccgaggaaccctaccacatcgatgtcaaattggggttaccttggagattctcagatatttgttcagttcacgccaaaaatcaaggttgcaagcacgaggttctctgattatcattttagaaatgcattggcagagaggctagcgcgatggatggagaatggagacagtgagggggagctgcagctgcagcgcagaaataagtctagaccatcacccagatcatgcattttgcatattgtcgagattgctaaattgatagttgcggtatataattaacaaggatcagtgagaac

SEQ ID NO: 36159 - DNA, 2372 bp, Setaria italica
  misc_feature (2313)..(2372): n is a, c, g, or t
  Peptide Sequence Number=SeqID_102133
tacaagggaacctaccctttaggggactagtagacttaggactatcaccagcattcatcctcgcctgagctgcagaacttaccatctatcaatgcatcacaaatgtggtttgcatcagcaaggtagtttggtgtgccactgcccagcagcccaggtgacatgtgaaggatgacaacgtgtttggtttcaccaactagggcatacgtattagaagtttcgaagtcaatgatcaatccatatatcactctttaggatgccttccgattttccctgactttttatgccaaccatatctgatatgctattttaagcacaaccttactttgttaagagtttattttcttgtgaatcacttaattatccctggagtgataattattactcacattggacaagcagaatcaagcactaatggaaacataaggaccaaacaatgtcccatgagatggatcgacttcagtatgccgaggaaccctaccacatcgatgtcaaattggagctaagcattaccttgacctacatagcactgaccacttgagctgcatatgaagcttaaaagtaggaaatgggattcaagcttcgtaaaaatttttagcgttcttcgttcaagtagtgtggagtctgtaccattttcctttactccaagatagaatattggacttaaaatgcaccactattcaagtagtgatcacttgaacccatcaaatcttgatcacctaagcaaaaactgtaatgtggtttcaatttggtcgatggacagcacaaagttgtcagctccagtttgggcagcttcaactgtgcctgtaacagtaagaatgcgagtacatggggacccattcatcttgattaagtagggaaccctggaacaggggatctcgacatctgaacccatgacttcaggtcagtcaccacaaacatgtgtttttactatgaatcaagttaggatttgcaggactcttcagtttcatcagcagtaaaccatccatggtctgacattgccctttcaagaatcttcaaagaataagagaaaagaatgagaaggctacatggcaaagttgggattctaataatttctcctttgtctccaaaggctcaaaatagtagcgaaataaagatccgtagaaattttggataactgacaagaagtgaaggtattagagaattgaaagtttactcaaatgaaggctagagtttcaaccatatttacatagtatctagctgttttgtcattcctaaatctaattaaaagaaagagaaaaaaatcgatcagggtttcctatagctataagattgttgatttactatcacctgttcattgtattttgtcactaacctcactcagttttgcccgttgctattcagattctcagatatttgttcagttcacgccaaaaatcaaggttgcaagcacgaggttctctgattatcattttagaaatgcattggcaggtaaactcctcactttctgttccccccatttttaaataaaattaaagcagaaacaaagcagtacatggtgcagcactcctgcttaaatctcattttgtaatttgagcaccaaatagttgctcagtttgcagtaagctcagctctttttttcattgacaaattgctgctgtttgtgattatgggcttcaaatctatccaatttattcacatccatactcattttaggtagattcaaggaatgtgtttgtttgagaatttttcctttttggatataggatgctgcacgaagatagatttaagcaggaagctgcttgtctccctggtggttcatttctgttgatttgtttctatatttgaataaaatatgttaatactacagtctacggtaaagagttaaatgccaccttagcagagaggctagcgcgatggatggagaatggagacagtgagggggagctgcagctgcagcgcagaaataagtctagaccatcacccagatcatgcattttgcatattgtcgagattgctaaattgatagttgcggtatataattaacaaggatcagtgagaacagtgaaggaaatagaagcaagcgatcgtttctgtcttcatgtcttgccactggcttatcgtggtactgaacatacccgtgtggacagttctacaccgttcctacatctatattatcaataatttatacatcaatcttagcaccagacatgtatgctgacaaaataaggggcatacaaagaagtgtatgaaccttggtgcgcttccagtttgatatgagaaacttactctttacatgatactccaccagttttcaagcatactgacatagatccgatatttgctgccttaacnnnnnnnnnnnnnnnnnnnnnnnnnnnnnnnnnnnnnnnnnnnnnnnnnnnnnnnnnnnn

SEQ ID NO: 36160 - DNA, 506 bp, Setaria italica
  Peptide Sequence Number=SeqID_102134
tcagcagtagaggcgttgttgtacctccagcgttgaggcctccctaacacccataatcttcgcagagaaacgttatgttccgtggattcgtggatgtgtgatcggctttggttccattacatttgtacccacggctacagattgagatttaaattcaatgattgaagaaacgagggacctatggatggacagctctatgcccgtgctgtatcgtccaagtttgccctcggataggattagcaacttggtcccaaaaatcttgcacaacctatttctgtttgtgagatggcagtaccatttgcgactatttgttaaagaaaaatgatttaatcttcttttgaccttcacatttgcattcgatgtgtttttattttccccatggatttatacctgattctaaattgcaattgtcactagcaattcgaattgtgtgaaaggacagtttttgaaatgacgtcaatccgaactgtgttggataaattgacagtgtccgcacattgctacta

SEQ ID NO: 36161 - DNA, 652 bp, Setaria italica
  Peptide Sequence Number=SeqID_102135
agccactcggcagcgcgtccccgaggtgcgaaggctggtggggacgcgacctgacggcctggaggtccggcaaggcggctggtggagggagtgactcggggacgtggtgctgcgggaggcggctgccggcgttatgcgggcatgaccagtgcgcgtgaggagctacggtcctcgacgaggagggggcgaccaagggtgccgctgacgcggtctcacccgtgcctgccatcgccaagctgggctccttcgacgtgagacgtgccggctgcgtggcctcctgccttcaacggtggcggcgtggtctcgcggccgggtggtccgcgcaaggcgtgtcagcgacgccatggaagcacgacagggatgcctggcacagaggcgcgctggtggcaccgaggtggtgttgtgggcgtcgtcgggccacctttctcctcggctgaggagttgcggaggtagtgacgggagagggaggcggctgggtgctgcgcggccgggggagcacgcggtggcaaggaggagtgcggtggccgggaggagcacggcaagcggccgcgcggtgtcggtaaggaggtgcaggcggtggagggcgctgtgtgtgggcagcgatggagggcagcgatagaaacggaggtggaggtacggtggcacggtgagg

SEQ ID NO: 36162 - DNA, 929 bp, Setaria italica
  Peptide Sequence Number=SeqID_102136
ccgccgcggactccttcgcctccaagtttcgcggggagggtgtagtcagaggcggagcagttgccgtgcgcggcggcacggcgacgcgggggatggagtaccgcgacaagctggtgctcgcgcccatggtccgcgtgggcaccttgccatttaggctactggctgctgaatatggtgctgatattacttatggggaagaaataattgatcacaaattcttgaaatgcgagcgcattataaatgaatctcttgggactactgattttgtggagaaagggactgacaatgtagttttccgtacatgcccacaagaaaggggtagggttgtattccaaatgggcacatcacatgctgtgagggcacttaaagctgctgagattgtgtaagttttgtttctgagacctttttagtatccaagttctgaagtaagctaacataaatgccgtgtttgttccaggtttggtacataaacttgtttgatgtgatagcattatatttgttatcctcttgtgctttgcatatttctttaaccatagtattttatccacaccaggtgccatgatgttgctgctatagatatcaacatgggttgtccaaagtctttctctcttagtggagggatgggtgctgcattactctccaaacctgagcttatacatgatgtacttgtcttaattgttccttttgcttttttccacaccccatatatccacttcgcttactcaggctattcatagtatacaatgtagattttgacaacattgcggaggaacttggacacaacagtgacatgtaaaatccgtcttctgaacacacctaaggacactgtggaattggcacgaaggattgaaaaagctaggtgttcctgctcttgctgtgcatggaaggtaatgacacgtagaattctactttgagttgtggtagtctgg

SEQ ID NO: 36163 - DNA, 539 bp, Setaria italica
  Peptide Sequence Number=SeqID_102137
tgaacaataccagcacccgctttagcatgggtcatgtactcatgttgtacatctcatgcctttgaagttttggacttatctagtctgtgtgcttgaattttctttccaaacttactctttgccgccttatttttgttatttatctttgcagggcaccttgccatttaggctactggctgctgaatatggtgctgatattacttatggggaagaaataattgatcacaaattcttgaaatgcgagcgcattataaatgaatctcttgggactactgattttgtggagaaagggactgacaatgtagttttccgtacatgcccacaagaaaggggtagggttgtattccaaatgggcacatcacatgctgtgagggcacttaaagctgctgagattgtgtgccatgatgttgctgctatagatatcaacatgggttgtccaaagtctttctctcttagtggagggatgggtgctgcattactctccaaacctgagcttatacatgatattttgacaacattgcggaggaacttggacacaa

SEQ ID NO: 36164 - DNA, 325 bp, Setaria italica
  Peptide Sequence Number=SeqID_102138
agagattaatattatgatcattgtagtgtcctatggcaaagaacagcacttttgtaatggggtaccaggcaaattttgccgtttgcggtgtgaattggttaattcccacagcaaaatttgccttcttatatgcaatgccacccagctccacctggcatttttttagttggtcaagtatttttgcgtgtgctcaatccaaacagcagataaagtttgtttgattctttttcctaccccagtaccgtcatgtgttttttagtattatattataattactgatctttagtctacggcttcatcacttggttttgttttctctttctag

SEQ ID NO: 36165 - DNA, 853 bp, Setaria italica
  Peptide Sequence Number=SeqID_102139
cgacctcaaccgcgtgtgcccgcagggtctcgccgtccgcggcggcgacgggaaccgcgtcgtcgggtgccgcagcgcctgcgccgcgtacggcgcgccgcagtactgctgcacgggcaacttcgggacaccgcagcagtgcaagcccacggcgtactcgaggctgttcaagtcggcgtgccccaaggcgtactcgtacgcctacgacgacccgacgtccatcctcacctgctccgccggcgcgtcctacgtcgtcaccttctgcccccaccgccgctgaagacgaaccccagcagaggagacggagccggtgcgtgcgtgctctgctcccgttccatcaacatgaatcaatggcgttcacgaggagacaccttgtttagctgtagtgcgttgctgttctctaaaaaaacttcctttctgccaccgttgcattgcatcttgtagaattgatccgtgtgtgatgagatccggtggcctaccgctggtaggccggagatgatggggggtatatcagtatatgggtatatgctactagcactgcattttcacgccacgggcggacgcgcaccagggcgtcccttcaccgccacggcatgttggactccgcctcctgcctcttgtgcgccggcgcggaagaggacgtcgaccacctcttcgcttcctgcccccacctctgcgcgttctgggcgctggtgctcccagggcgatcccctccgggcacggcgcgggatggagcggaatccgtcgtcgggctcttctccctccatgcgccggcggtggggcacacggcggccctgggggtcccctggatttttgcttgcttatttgcttgttgtattttgggttcgcccta

SEQ ID NO: 36166 - DNA, 293 bp, Setaria italica
  Peptide Sequence Number=SeqID_102140
gcatcgcctcgcctccttcgtcgccgcgctgcgtctctccgcgctggtctcgtcgcggcgtttccccatgccgtgctgtggcagctcccacaggccgcagctgctcccctatcgctccaagccaggtcgatcgatggcggcgctctcgctctagccatggaaagggacggcgagtcccagctgccggcaagcctccaaccttcaggtacgacgcgactcacgactttgggtggcaatttttggtgtgattttcaccaaattgatgggcagttcggtaatagcaaggttggggg

SEQ ID NO: 36167 - DNA, 368 bp, Setaria italica
  Peptide Sequence Number=SeqID_102141
acatcacaaattatacctatttgtagaatttgaaattgcaaacattgagcaaccacacaaataggcacttatatcctgataaaaaaataatctaaaccttgctacccctatcaacacaggaagctcaaaatcccctttccctgatcttaccaaaccattaactgactcgcatacacaattgccatcaatttacagcttcaatttaaaacaaatcttcacaagtacatttcaatgcatcaatatttcaatccttcagtttacaatttcaatcaagtgcctggaaaggctccacatgccagaattgataggcaccggcatgattcacccatcaagcccaagctgcaatgcagcaacgcggcaccatcaag

SEQ ID NO: 36168 - DNA, 335 bp, Setaria italica
  misc_feature (282)..(282): n is a, c, g, or t
  Peptide Sequence Number=SeqID_102142
cctacgccttcaacagctacttccaaaagaacccgtcgccggcaagctgcgacttcggaggcgccggcatgctcgtcaacgtcaacccaggttcaggaacttgcatgtaccagacatcatcatcaggtttcggcgccggttacagcccgggagcgacaggcaccgtgcccaccggctacaccccagggatgtcgggcgccgtgcccaccggttacagcccggggtggcaagggggtgtgggcgggggatccggctcgacggtgctgaacgccaacacccggnggaactccatgtacggcggctccgacaacccgcgggcttgaccgccggcgcgg

SEQ ID NO: 36169 - DNA, 1003 bp, Setaria italica
  Peptide Sequence Number=SeqID_102143
tcgtctagtaggtattgtcttctttcttccttctaattattcattgcttctttgagctgctgtgtgttctgctatatgcttttatcttccctaagttgccaattgttaagtactatcgttcaaaagcagcttcagagggatctctaacagtctctgctgatcttgctgctggtggaatccaaaatcgcccaaatccaaagtctgaagaggaccctgcatgtgttgagcgattgagcaccaagcagctgctactgcagaacatagactatgcattggacatgttcttgatctatatattgactttgtccatcttcccggggtttttagccgaagatactggttcacacagcttgggctcttggtatgcacttgtcttgattgcgagctacaacgtgtgggatctgatcggaagatatgtacctctgattgaacagatcaagctgagatctcggaaggggcttctagtcgctgtggtttcacggttattgctcatccctgcattctactacaccgcaaagtatggcgatcagggctggatgatcatgctaacgtcacttctgggtttgagcaacgggtatctcaccgtgtgcatcctcactgaggcacccaaagggtacaagggaccagaacaaaacgctttgggcaacttgcttgtgctgtgcctcttgggaggcatcttctgcggggccgtcctcgattgggtgtggctcataggcaaagggtggtgatcagatcatgtagcgagttcttcctgtcggtgccctccggtgtgtggtttcaatcaacagccaagcagcatttggatcatcttctgccaacgatttcacttcatatcgcgcacatttctcacgagttcagatctgcacaaaaaggggaagggaagaagtaatggaaagacaagctgaagtgtaaagcttcatgaactatactgtcgtggtgtgatatcacttatgttcctttttttgtgcatcaatttgtacatccttttcccggttccgttgag

SEQ ID NO: 36170 - DNA, 410 bp, Setaria italica
  Peptide Sequence Number=SeqID_102144
agccggtggccttcttgtccgggtaggatgacgacgccggtgagcgtgccgccgtagtcgggcacgccgaagttgccgatggccgcgtcgtggtgcccccggatgtgctccggcgccagcacccgcacgctgctcttctccaccacgaaccgcccccgcacagccacgatcagcaacagtagctgcgccgccacgacgctggcgagccacggcgcgcgcctcgccattattgccgggcgcgggatcaatcaatcaatcaaccgccaccggccaatccccctcctctccccggcaacgatcgagaggagggacgaagaagaagaggaggaggaggaggaggaggaggaagaagcagacttgaagcaaggaattgtgggcaatgagtcgagtttggtgggcaacaagcgggg

SEQ ID NO: 36171 - DNA, 701 bp, Setaria italica
  misc_feature (665)..(701): n is a, c, g, or t
  Peptide Sequence Number=SeqID_102145
ttggagctgaaacctgttgggggctggcctctgttctgaaggactccatggcgaggttcgattcggccggggctaagctgatcgccatcggcgtcggcactcccgataaagctcgcattctcgccgacgggctgccatttcctgtcgactccttgtacgccgaccccgagcgcaaggcttacaacgtgctgggactgtaccatggtttgggtcggacgctcttcagtccagctagtgctaaaatatactcgaggctcgactacatcaagaaggcgacgaagaactacacgctggaaggcaccccgggcgacctgaccggtgtcctgcagcagggtgggatgttcgtgttcagagggaaggagctgctgtactcatggagagacgaaggcaccggcgaccatgctcctatggacgatgtgctcagcgcctgccgcaaagttccagtcgcttgacacttgctttcttttagcagccgaatgtgtaaggctaaacgttctgtgtatgtgccggatactagctagactgaagcccgggtctgttcattcgtcaggaagagtcttgaagttccaccgaattgaaacagatactatatgctacgagaatcaaatcatgcgaaacatgtgtcctcaaatgatgaaatgaaataaacttgtttggtcactacnnnnnnnnnnnnnnnnnnnnnnnnnnnnnnnnnnnnn

SEQ ID NO: 36172 - DNA, 467 bp, Setaria italica
  Peptide Sequence Number=SeqID_102146
caaggcgtttctggtctgcaatgcaacttcttttgctggatccattgtgatcatcatcatgctcctcagtaatacagcagtggatcatgtcgtcaagtcaaatgctctgcggctgtgtgttctagtcagcctcttcgggcttatgggggcttatgctgctgggagttgcagggaggtccttacatctatctatgtcttctcccttgttggaggagttttgctctaccttatccttcagtggattgaacctattgtgacaaagccagagtctgtagagaagtccattggatggatgagaaataagaagactgaactgctcaagaaactgagctctttcattatgaaggggagtgggaatccagatgatgacaagcataataccctgtcagggcccaatagacagctgcctaaactaaaaacttttcaagcaattttggtgatcctaaggatgatttacagaaactgcg

SEQ ID NO: 36173 - DNA, 451 bp, Setaria italica
  Peptide Sequence Number=SeqID_102147
ccgttttcaaaatgtaggtcattttgacttttctaggtacatagattttgctatgtacctagacataaccttatatttaggtgcatagctaaacctatgtatctagaaaagctaaaacaacctacattttggaacggagggagtgattctgtaagaggcagtttgaatagtacgaataaatgattgtgtatgaggtggtttgaactctgaccaaagacatcatgtaaacaatgctgcaaacttcttaatggaagactgtgcatcattcttgcttgtttggcatggagattgggccattgatccatttgacaccgaatggaaccacatggcatgaagaattcttcaaaaggattatctggtgaagaaggaataaacctttaactaattgtaaaattaagacaaactacttggaagataatcattccttcgaaggttccgcttattctcagcc

SEQ ID NO: 36174 - DNA, 719 bp, Setaria italica
  misc_feature (1)..(22): n is a, c, g, or t
  Peptide Sequence Number=SeqID_102148
nnnnnnnnnnnnnnnnnnnnnntaccttgggaacgctgcattgcaagcaaatgttttccctccaggctttggtagcaacagaaggtacagaaatagttgagaaagttatgaggaacagttggaaggataggccgtcttccccatttaaaggcactgccatcctttctgcagccccatgacaagctaccacacacaggcacaagcaacgccttgcaaagctcttagcctcacacaattcaacccctcttctccattgccttccctgagagggcagagattgtctcaggcttcagtgctcttctcaggctgcaatgttggattgtccgggtgttctgaagaagcattaggtgtgtgtgttggattgtcgggtgttctgaagaagcattaggtcttccttcagctctttttgtagtttcatcttccttccactgtgttgtctttggcctctctttctgtgtctctacacgctagtgttatggatggatagtgatgatgccgaaaccaatggcagtgaagggagtaatgttagcagtggccgcagcaatggtagaagcaaaaaacaccgacgcagattatgattccttggcttctgatgcttccacaggaccagctcaagtgaagatgcgtgatggcaaagaaaagaaaagtcaggataaaaatgacagtatcagatatgaacacggtaatgacagctgatcgtgagcttggtatgtatctcc

SEQ ID NO: 36175 - DNA, 423 bp, Setaria italica
  Peptide Sequence Number=SeqID_102149
ccacccaacagctctcatcgctcgctcgctcgccatggacgcagccgtcgccgggcagcagtcgaggcgtcggatccggccgcctgagccgctcgtgatggccgcggcgccgcccacgccggccgcgttccgttgcccgatctcgctggaggtgatgcggtcgccggtcagcctccccaccggcgccacgtacgaccgcgcctccatacagcggtggctcgattccggccaccgcacctgccccgccacgcggctgccgctagcgtcgacggacctggtcccgaacctgctcctgcgccgtctcatccacctgcacgcggccacgctaccgccttcgccgtcgcccgagcaggtgctgtcgcagctcgcggccgcggacggggagcccgcggccgcggagaaggctgtgcgctcgctcgcggc

SEQ ID NO: 36176 - DNA, 407 bp, Setaria italica
  Peptide Sequence Number=SeqID_102150
cccgagcagatgaaggcggcggcgagcaccatggacggcatcatcgacacggtgtcggcggagcacccggtcgaggcgctgctggagctgctgaagccgatggggcagatggtgatcgtcggcttgccggccaagcctctcgaggtgcccgccttcagcctcgtcgccggagggaaacgagtcgccgggagcggcggcggcggcatcgcggagtgccaggcgatgctggactttgcgggcgagcacggcatcaccgcagatgtcgaggtcgtcgggatggactacgttaacacggcgatccagcgccttgagaggaatgatgtgaggtaccgcttcgttgtcgacgtcgccggcagcaacctgggcgttttctgattaggcgccaaggattgttccttgttcggccg

SEQ ID NO: 36177 - DNA, 1579 bp, Setaria italica
  misc_feature (1481)..(1579): n is a, c, g, or t
  Peptide Sequence Number=SeqID_102151
ttcgccctccttgagcccacacgcggaacagcaccacgagagggggagagagagagagagcagttatgtcacatcattttcgcgccctcatccacagcccatctcttcccgtgcctttctcccacggagtcggagtcagtgcagcgtcgccctcgagagctccgcggcttccgagggcgagggcgtccgtggagaagagagagcaggcgatggaggagccaggcggcgcggcggcgctcggctgggcggccagggacgccaccggtgtcctctcaccctacaacttctccagaagggttccgagagacgacgatgtcacgatcaagattctctactgcgggatctgccacaccgaccttcacatcatcaagaaccactggggcaactccatgtaccccgtcgtccccgggcacgagatcgtcggcgtggtgaccggcgtcggcggcggcgtgacgaggttcaagcccggcgacacggtgggcgtgggctacttcgtcgggtcctgccgctcctgcgacagctgcgggaaggggaacgagaactactgcgccggggtcgtgctcacctccaacggcgtcgaccgcgcgcacggcggcgccgccacgaaggggggcttctccgacgtcatcgtcgtgaacgagcactacgtgctccgcgtcccggacagcctgccgctggaccgcaccgcgccgctgctctgcgccggcgtgaccgtgtacagccccatgatgcgccacggcctgaacgagcccggcaagcacctgggcgtcgtgggcctcggcggcctcggccacgtcgccgtcaaggtcggcaaggcgttcgggatgaaggtcaccgtcatcagcacgtccccgagcaagcgccaggaggccgtcgagcacctcggcgccgacgagtttctggtcagccgcgaccccgagcagatgaaggcggcgacgggcacgatggacggcatcatcgacacggtgtcggcgtggcacccgatcacgccgctgctggcgctgctgaagccgctggggcagatggtggtcgtgggcgtgccgaacaagccgctggagctgccggtgtacgccatcgtgcccggcgggaagggcgtcgccgggaacagcgtcggcagcgtcggggactgccaggccatgctcgagttcgcggggaaggcacggcatcggcgccgaggtggaggtgatcaagatggactacgtcaacacggcgatcgagcggctcgagaagaacgacgtccgctaccgcttcgtcatcgatgtcgccggcagcagccttggctccgccacctacgtgtaactgcagaaggtcgaatcagagcccccccaataattaactaatggatgatcatttccgcttgttgataagttcatgtgcttattgtgggtttgtggctctgatggtttggtgtgtacaaataagagagacatggtgttcaaatctttgcttaagtacatggagagaaggttgaagtcaaaaannnnnnnnnnnnnnnnnnnnnnnnnnnnnnnnnnnnnnnnnnnnnnnnnnnnnnnnnnnnnnnnnnnnnnnnnnnnnnnnnnnnnnnnnnnnnnnnnnn

SEQ ID NO: 36178 - DNA, 312 bp, Setaria italica
  Peptide Sequence Number=SeqID_102152
gaggcggggaggagggtttggagcagaacggccgcgaggagcaccagggcgacgctgcgggttcccatggtcgcgatcagaattccggatgcaggagggaagggagcgagcactactgcggctcgggcgctgtgcgctccctatataacgcagagtggggggaccggggagtggccgcgcgccctgcggcccgtcggatccgtggtcggtttcgagtcaggcgttggatgaggatagaggcatcgggtccacagcaaaaatcgctagagctacccgggaaagcgccggagacccgtgcgtggaggttgcaag

SEQ ID NO: 36179 - DNA, 1661 bp, Setaria italica
  misc_feature (46)..(46): n is a, c, g, or t
  Peptide Sequence Number=SeqID_102153
cattagatactaaccctagaagcaaagagaaggaaaaaattctgcnctaaattgcttaccatctcagctacagtgaaaaactatacaaatagctgagaaaggcagcccatgtgcctattgccagctttcactctagttatgtgagaaccagaagcaaatccaggagcatcgtccaacatttcttctcatcagatatgtaagccttaaaattccctgcagcagaaaatggagcatcccagagggcaaatctggctcatggagaaacagctgctccagcttcatctctcaccagttgaatcgacgacatacataacaacaagcatggtgcttcatccttctaacacatggggtctatgattatactgtagaaactgaggcctgttgaccaattggaacctagaggggattccaacggtcaaagatgatccggccacctcgcccgatcctgccctggcaccggaatggctgtgcagtggctccaccatcaatagatggagctggtggtggcctgatgccagctatctccaacttaccaggatcaagcggtcttgtgaacagcattactggctcctcaggatcccttttgaataaccaggcagtctgctgcaaccttctcttcaactcatgttcatgctttaaacgtactgatgagatgaccgatagctttttatcagggagccgaaggtgaaaagcaaatggttgtaaatttggttgctcagtacttgtatcatctgaatccgaataatcttcacttgatccatattgagtagaaacttgctgaaggcctgatagtgcaatcccgtcatcaagaagttgcgcttcatgcttgtatttcatttgtatacgtcgaaggtggacctcacagtccatggcctcacgtttcttctcttccctcttaatcaaagcctccactagtaccttagcttgctttaggtttcgcctcaccaggcggagtctttcgaatgattgggcactattttctcgacgttgcatccttcttgtgtgaagacgatgagccttctctcttggtctgaagacattgtatggatttgtatcacttggtggtggaggcggctgcaaatgcctcaaaataggttttgccaccgctctctctttgccttccaatagctgtatgcagcctggaatacagcataccagacagataagtactgcaaagcctcaaaggcagaatcaagctgcaaaatgactggaattggtccaatcatggtaggtgttatgatgcctgctctttctcgagctttgtggtccaaaatttccagcttaaataggagggcctccaacatttcagcattaagatttttccgctcattgttataaccttcaagccaatcttcatcttcattatccaggtcatactcaataaaatcaccaacttcagctcgggctcctcttccacgtatgtatgttgtgggttgtgcaaaggtacgcgtatagtccctttcgtatgtatcaacaacatcatactggggtgtgggtatttcttgggcattcttcttgttaggtgctggatgcgcctcgccgtcagccgccggctccggtgcagagtaccgaagcaggggaggcgcggcccggagcgcgaacgtggggtcatcgtcctcgagctcccgcgcgaaccggacgatgggagcctcctgttggta

SEQ ID NO: 36180 - DNA, 870 bp, Setaria italica
  misc_feature (814)..(870): n is a, c, g, or t
  Peptide Sequence Number=SeqID_102154
ccttctctccaccgtccgctcgtgccgccgctgccttcaccggccgccatgtggaagcgcgccacctccctcctcctccgccaccaccgctccgccctgctcccccgatccccggcggtctccgctgccaccgtgcctggtctccgccgtactccggcgccccttttcttctccactctcgatgcggcccggacgaggactagggttgaggacgtgatgccgatcgctacggggctcgagcgcgaggagatcgaggccgagctccagggaaagaagagattcgacatggacgcccccgtcggtccctttggcaccaaggaagctcctgctgtgattcagtcatactacaacaaaaggattgttggttgtcctggcggtgaaggagaagatgagcatgatgtggtgtggttttggttggagagaggcaagccacatgaatgcccggtctgtactcaatatttcacgcttaatgtgattggagaaggaggatcacctgatggacatgatgacgacgacgaccaccatcagtaaggttctgtaggacatggcaataaatggggtgcctgatacagtttttgtcgcagcgttgtgaagctgtggaaaacttcagcctttgggccttatagagttcagtagaccatgtcaacctgattatcccatagcttggaagctggagtaatcacttaagaaactcggctatacaaataatggaattcgttacgcaacaatgtactttgctattcaatcagatgttgtgctgaatcaagataaaaaaaggcatatttgtctggttgatttaacgttccccgttcgnnnnnnnnnnnnnnnnnnnnnnnnnnnnnnnnnnnnnnnnnnnnnnnnnnnnnnnnn

SEQ ID NO: 36181 - DNA, 411 bp, Setaria italica
  Peptide Sequence Number=SeqID_102155
tgtgctcttccgtgcccaatgcttattggatctttttcgagatgacgcgagcaaggcggtcctctttggttggtcggttcagagctcccaggcatcgacagcgagagaaccgatcaaccaccggtctgcctccctgaggaacaggctaaccgaagacatccgtggcattgccgcgccggaggcgaaaacggccaaacatatatgttgcctccagggcaggatgaccgaccacctaacatcatgtctgacaaaggttgacaaactactcgatgtcatggcctaaaacttttctcaggaaccagattaggagcttatagttgtatgatgttgtgaggataatcttaattaccacttagtcaattagtccgaccaattgtgcagcctaacgagtacagaggaccacccagttcc

SEQ ID NO: 36182 - DNA, 256 bp, Setaria italica
  Peptide Sequence Number=SeqID_102156
gccgcaccttgaccattttaatcatctctgtgaaagcgagctcatcgttccgatttctcacttcagggaagtatctgatgtcgcggaacgagtccaagtaccaatccctcacccataagtgaaccacgtttccagaattatattcggaattaaaattctgcttatattcggaatcgaagtccatcccagatgaacagaggtgcaccaagcctgtcaaatcacccacgagcttgaggatggcgggcttgttggagac

SEQ ID NO: 36183 - DNA, 413 bp, Setaria italica
  Peptide Sequence Number=SeqID_102157
atctttatcagaattcatatatcgttcttgcactgcacgaagggagttcttcaccaattcaaataacatcagatgtaggtgtaatgccacatatggaaatgtaaaatttggatcgccataaatgttaatatcaggagctgatccatattcccttaaacaaatagcacgggcgtcttcgctggcagcttgagccacctgtacgggggacaattttgtattgatgaggcctatgacgccaggctctggttcaggatcatgcaaagccacatgctgcccttgaggatggcgggcttgttggagagcccgaagggcagggactcgagctcgagcgcgcggcgtgcgatgcggatggggagctccctctgcaggaactgcgcggagaggagcaggttgcgcggggtggggcgcgagcc

SEQ ID NO: 36184 - DNA, 241 bp, Setaria italica
  Peptide Sequence Number=SeqID_102158
atcatctctgtgaaagcgagctcatcgttccgatttctcacttcagggaagtatctgatgtcgcggaacgagtccaagtaccaatccctcacgagcttgaggatggcgggcttgttggagagcccgaagggcagggactcgagctcgagcgcgcggcgtgcgatgcggatggggagctccctctgcaggaactgcgcggagaggagcaggttgcgcggggtggggcgcgagccgaactcca

SEQ ID NO: 36185 - DNA, 213 bp, Setaria italica
  Peptide Sequence Number=SeqID_102159
tcttcgctggcagcttgagccacctgtacgggggacgaattttgtattgatgaggcctatgacgccaggctctggttcaggatcatgcaaagccacatgctgccctgaaattaagcaagcacgaataactcaggccacgcatctaataacaacagagactcgattcctgttaattatttgatttagacctacgcatggggccaataatatgct

SEQ ID NO: 36186 - DNA, 193 bp, Setaria italica
  Peptide Sequence Number=SeqID_102160
tacgggggacaattttgtattgatgaggcctatgacgccaggctctggttcaggatcatgcaaagccacatgctatcagcatgcggatgccaatccttgacatgtagaatcgatcaaggaactcatggatctcatcaaatccaaagggaatatttcctttgcgacggactaactaaggttaggttagtactta

SEQ ID NO: 36187 - DNA, 395 bp, Setaria italica
  Peptide Sequence Number=SeqID_102161
caattttgtattgatgaggcctatgacgccaggctctggttcaggatcatgcaaagccacatgctgccctatcagcatgcggatgccaatccttgacatgtagaatcgatcaaggaactcatggatctcatcaaatccaaagggaatattccttgcgcggcacaggtggctcaagctgccagcgaagacgcccgtgctatttgtttaagggaatatggatcagctcctgatattaacatttatggcgatccaaattttacatttccatatgtggcattacacctacatctgatgttatttgaattggtgaagaactcccttcgtgcagtgcaagaacgatatatgaattctgataaagatgttcccccagttagaattatagttgctgatggaga

SEQ ID NO: 36188 - DNA, 471 bp, Setaria italica
  Peptide Sequence Number=SeqID_102162
tgaactgcactttgcgatcagcatcaacgctccaagggcccatttataatgctaatttctgggaggccactgctaacaatgctgattgatggactattttttctgaaacccggcagagggatcatactaataacagaagtatgagtgcctctgctcccaatgcagcagagctgaacgatggaatcgaggggactagaagatagcaaccagctatagctataggtggctggcccgtcaggacaatatttgcagaccagcaccggattgtattacaagaagaagaacatcctaattacaggaagatcaggacatcaaatcgagtcgtcaaggcaagggctcctctgaatctcccagccgtgacaaatggaggtaagcatcagtacctacaacaacgaaacaatactgctgtagcacatgaactgcggataaacatggttaatcgtgctgactgaatatgagtcgaccaagtgg

SEQ ID NO: 36189 - DNA, 524 bp, Setaria italica
  Peptide Sequence Number=SeqID_102163
tcaaatccaaagggaatattccttgcgcggcacaggtggtgcttcagctgctgcacccccaaagccattgttggaaccacattattatgccgcaccttgaccattttaatcatctctgtgaaagcgagctcatcgttccgatttctcacttcagggaagtatctgatgtcgcggaacgagtccaagtaccaatccctcacccataagtgaaccacgtttccagaattatattcggaattaaaattctgcttatattcggaatcgaagtcctgctaagaatcccaaaaaagctacttcagttacttgggaactaaaccgaaagccaaccacagtgaatgaaagatgctagtctgaaaaacaaatttccatcccagatgaacagaggtgcaccaagcctgtcaaatcacccacgagcttgaggatggcgggcttgttggagagcccgaagggcagggactcgagctcgagcgcgcggcgtgcgatgcggatgggggagctccctctgcaggaactgcgcggagagg

SEQ ID NO: 36190 - DNA, 790 bp, Setaria italica
  Peptide Sequence Number=SeqID_102164
ttttttttttgtttttttttatttttttcttttttccttttgttaatttaggatgttcttcttcttgtaatacaatccggtgctggtctgcaaatcgagtcgtcaaggcaagggctcctctgaatctcccagccgtgacaaatggaggtaagcatcagtaccatatccttccatagagatgatttgcaagtcgccaccaaagtactgagcataaaggcggctgattgggagcccgaaaccatatccggccatagttgctccttcattaggtccatctagatcaggtggattctttgcagtggtatacagatatgtgaaaatttttgggaggccacttctcgctatcccaccaccttcatcactaacctgcattagcaaagcgttcaagcttaaacatcacattgtgaacatcatatttagttttccatatgcagaaatacgtattgccttggtccacaaacaagtttagaaaaaaatagctgtcacataaaagagaattatatctagcacttgactttgtataagttacaattaagttgattggtatattattgcactttgcattaaatttcagcgaaatgccagtggaagttccatcaattttagataagtttacaggtttctatgaagttgctaaatatagtattgcaatgaaaaatatcctgaaatttactaattttccagactagctttcatcagtaaatagctgtaccaacagttcatgcatgataggtgatgtcagactactaccttgatagtaacatcctcttctccatcagcaactataatt

SEQ ID NO: 36191 - DNA, 1622 bp, Setaria italica
  Peptide Sequence Number=SeqID_102165
cagcattcaccattagatttcagtggaataagatcattcctcaatcctcatactatgtcgcacaaggatgtgatcagttcacactcctggaactgaaaatttgctaggtttgcagttacggacttatggccatatgatgaatcccattactcaaactaaatgcctcgggtgctcgagggcaactatttttggaggtttaacaattataacaggagaagaaaacagaaacaggatgcttccgagtacaacaacacgaacagatgaactatatagagctggctggccttcggaactatatttgcataccagcgcagcaattgcgaaagcaatagagtcctaattacagaaatggcttcttcccgattgattaaggcaatggttcctctgaatctcccagccgtgataggtggaggtaagcatcggttccatatccttccatagagatgatctgcaagtccccgccgaaatatcgagcataaagtcgactaatcgggatcccataaccatatccagccatagttactccttcgttatgttcatccaggtcaggagggttttctgctgtactatagagataagtaaaaattcttgagaggccactccttggtattccaccaccttcatcactaatcttaatagttacatcctctgctccatcagcaactatgattcgaactggtggtgcatgcttatcagagttcatgtaccgttcctgtactgcacgaagggagttcttcaccaattcgaaaatcatgagatgtagatgtggtgtaacatatggaaatgtaaaatccggatctccgtatatgtcgacatcaggagctgatccatactcccgcatgcaaatagcacgtgcatcttcactagcaattcgagctactgtcataggtgacatttttgtgtttataagtcctatcacaccaggctctggatcaggatcgtgcaaagcaacatgctgccctatcagcatccggatcccgatccttgacaggtagaagcgatcaaggaattgatggatctcatcgattccaggggggaatgccttcgaaccgcccaagtccttcttcagctgctgcacacccaatgcaattgtgggcaccacattggtgtgccgcaccctaatcattttgatcatctgggtgaatgcgagctcatcttcctggcttctcacctcccggaaggaccggatgtcacggaatgaatccacgtaccaatctctcaccttgaggatggcgggcttgctggagaggccgaaggggagcgactcgaggtcgagcgcgcggcgcgcgatgcggatggggagctccttgtgcaggaactgcgcggcgagcaggagggtccgctccgtgggccgcgccccgaactccatcatgtagcgcaggctgaccccggtctggcgcatcgccccccaccgcgccacctcctcggccaccgcccgcgccacgggctccgacgccatgctccccgtctctgtctcacctgcgattggtgggggcggggggaaaatggcggacgggcgggcggcctacggcggcacgacgacggcgacgatggcggtgccaccggagcggcgcatcggcttggggtataaatagcgggggcgcaggaggaggaggagggag

SEQ ID NO: 36192 - DNA, 936 bp, Setaria italica
  Peptide Sequence Number=SeqID_102166
tccatcagcaactataattctaactgggggaacgatcttttattcagaattcatatatcgttcttgcactgcacgaagggagttcttcaccaattcaaataacatcagatgtaggtgtaatgccacatatggaaatgtaaaatttggatcgccataaatgttaatatcaggagctgatccatattcccttaaacaaatagcacgggcgtcttcgctggcagcttgagccacctgtacgggggacaattttgtattgatgaggcctatgacgccaggctctggttcaggatcatgcaaagccacatgctgccctatcagcatgcggatgccaatccttgacatgtagaatcgatcaaggaactcatggatctcatcaaatccaaagggaatattccttgcgcggcacaggtggtgcttcagctgctgcacccccaaagccattgttggaaccacattattatgccgcaccttgaccattttaatcatctctgtgaaagcgagctcatcgttccgatttctcacttcagggaagtatctgatgtcgcggaacgagtccaagtaccaatccctcaccttgaggatggcgggcttgttggagagcccgaagggcagggactcgagctcgagcgcgcggcgtgcgatgcggatggggagctccctctgcaggaactgcgcggagaggagcaggttgcgcggggtgggggcgcgagccgaactccatcatgtagcgcaggctgacccccgtctgcttcatgctcccccaccgcaccacctcctccgccaccgccctcgccagcggctccgacgccatcgcaccccgaaccacgccgccgctcgccgccatcttaaccagccagtaaccgcccaatctcaccggtgggattagcgagcgagcgaggccggccattcaaggcaggcgggacgaggacaacagac

SEQ ID NO: 36193 - DNA, 797 bp, Setaria italica
  Peptide Sequence Number=SeqID_102167
cctgtgaaaaataacccaaccagcaccctgtatccttcctgtattttcctctgcctgtgtcctatctaaactggtacaaagagaaccaacaatcctagcctgtaatttgtagtacgtgctgcacttcctgttcctttacagtgtagatgaatttacattatgttagtgtacattgcaatcagggaagaagcatcccctcactgccatcagatcaccacaccaagtggtcatctctcgtcgtcctgcaggaccgtgaagtggaactcgatctgcagccgctggtgcggcgcgccaacgctgccggcgcccttcttctcgatctcaagctcctcccggagcgggatggcggccaagaacctcttgatgaactccctgcagcactccttcccggtgacgatcacctcctcctccttgccgtcgtccactgccggcgtcgacagcgcgtgcatctccgacgagccgtcgaacctgagcatgtaggccctgtcgcagccctcgtgcagccgctcgccgagcgtgtcgatgatgtagtagcagtcgctctccaccttgagcacgaagaagtggtcgttccagctgacgatgtacacgtccgcgcgccccggctcgcgctcgccgccggcgatctcgcgccagacgtcgtcgaacgacatggcgccggagagcgacgcgaagctctccggctggaagaagccgacgaaggtcctgtcgtgctgcacggcgatgggccgcgtccgggcggcgaggacggtctcgaggtcgaagtgccggttcgggaaccgcgccatgtgggcttc

SEQ ID NO: 36194 - DNA, 1479 bp, Setaria italica
  Peptide Sequence Number=SeqID_102168
caggattcccgcagcgaagccgacctcctccctcccttccttgcttgctatatatcctagggaaacccaaatctccccataaacaccctccattccgttcatcatctccttcctgagctgcgcccgcgcccgcgcctcgtcggaaaactaaatctgaacgcaatggactacgacggcaggtacaacaaggatcagagcctcaagtgtgactgcctcctcttcgacctcgatgatacgctgtacccgttcgcctccggcattgctgccgacatcgccaagaacatcaaagattacatggtgcacaaactcggtgttgatgagagcgttagcttggaactatgcatcctcctctacaagcagtatggaaccaccatggctggtttgagggctgttggctaccagtttgattacgatgatttccacagctttgttcatggaagactggcctacgacaagatcaagcctgatccagtgcttaggaacattctgctcagcttacccctacgcaaaattgtgtttacaaatggtgatagaatccatgcttcaagggccctaaagaggcttggaattgaggactgtttcgaaagagttgtgtgttttgaaacactgaacccaacatctcctgcgctgtctgacaagcttgaaatctttgacattatgaagcatctggctcatccacaacccggggtggagctaccaaaatcaccaatcctgtgcaagccatcaagagaggcaatgctgcaggccctcgaggtcgcctccattaatccacacacaactatattgtttgatgacagcttcaggaacatcgaagctgcaaagcagatcggaatgcgaaccgtcctggttggaacgtctgagagaaagaaaggtgctgactatgccttggcaagcctccacaacatgaaggaagcgctgcctgagctgtgggaggaagctgagaaggatgaagatgtgaggaattcgagcaaagtcggaatagagacatctgtgattgcataatatcttcttgcgcagcccttttgtttgccgtggagttgagcacctttttttggggtagcccacctctgcacaatcttttgtctgaaaaagagctaccgatgagaggacaagaaaaccatctcctcaagggttggggactgactgatactataactgatgttacgtcccacgtcccatataccatccagtaaggaataaaatgtttccttgaggtactgcaatagcaatactactacttgtctatcaatgaaataccgcagaaatactttattccttactggttggaacgtctgagagaaagaaaggtgctgactatgccttggcaagcctccacaacatgaaggaagcgctgcctgagctgtgggaggaagctgagaaggatgaagatgtgaggaattcgagcaaagtcggaatagagacatctgtgattgcataatatcttcttgctcaactccacggcaaacaaaagggctgcgc

SEQ ID NO: 36195 - DNA, 398 bp, Setaria italica
  Peptide Sequence Number=SeqID_102169
ggtccatcgtcttggccttacttttgttagtccccaacctaatggagaattcatctttaaggccatctttaaggccccatcaaattgtaatcttctttgacagaaaggtcgtttcgcccttagcttcaatcttgaagaatctcacttgcaggctcttgtgtatatcagtctcgacaaatttgatgtaattgacaattagattacaaaaggaaatatgttgtttgtacttaaaatcatcattcttttaggggggagagatgttgagcctctcttctttccttctttttattttgttttttcttttgtagttttgaggactcttttatttgttggtgtacaacagatggcatatttagggtagatcactaactgaagaaactaaaaaaaaaaaaaaaaaa

SEQ ID NO: 36196 - DNA, 769 bp, Setaria italica
  Peptide Sequence Number=SeqID_102170
gttcagcttagcagaagcgatcctcaattaaacataaccaattcagaagttgaagatgcaaacgggctacataagaataaaagttatgcttcatctagaatgaagccaagggttatgagatgctaccaaaacagtagcattttcaggttgccacaccaggcgctaagactgatgagatgaaatcctagaccaacgcaatgctgctctcgccaccaggaggcttccggacgccgccaaagtagtctcgggaagccacttttccatcggcgaagatgttgttgccactcatttccctcaatttcgccgtgctcagggccttctctcctgcaccagggggcgcatcttctttgaagatgttgtttccagtcagctcgtggaatttctgatcgtgaatcttttttgctgtcttgaccactggttcctcaccgaaaacgatgttgctccgacctccagcaggattggatactttaactgacgtgtgaatgcttcttggctgaggtagtgcaaaatccaagtttcctcgcagttccagattgcgagcagccaagggcctagcaggaacctcagggggtggtccaaatatatcactcccactcagctccttgctctttgattctgagatctgcttcgccgttttagaatcagcttcactctccagcgtgccactaagctctcgttgcttcgccacctcaggcaatgaggatagcttcttgggggacacacttccctctgcgctaaatgttatctgactcatgccagtgacagtctg

SEQ ID NO: 36197 - DNA, 420 bp, Setaria italica
  Peptide Sequence Number=SeqID_102171
ggcgccccggcggcgcactgcggcgccacgcgcgccatggacttgccgccgccgccgcgcttgacggcgtacacgggccgccgcgcctcctcgcccgcgaagatgagccactgctcgccagacaggctgaggcgcttgcggcgcacggtgaaggccgggcggccggcggggtccatgagcacgacctcggcctcggcgtcgtcgtagctgtcgacgcggtaggcgaggtcgcccttggcgtcgaacaccgtgaaccccctgcagttgaacagcagcgacttgcgccacaccgtcagcgacgtcggctcctcctcgcccgccgccgcggctctctcggccggcgacggcagcacgttggggtggaccttcgccatcgcgcgcgcgctggctggctagctgtttgtagctcggcgatcgatc

SEQ ID NO: 36198 - DNA, 264 bp, Setaria italica
  Peptide Sequence Number=SeqID_102172
ggaaaggaagaaacctctctccttcctcgataccgacgacaccgaccgccgcggcgatggaatactccggcggcggcggcggcggcgcgacgctgtcagagatgtaccagagcgcgcggcggctgctgctctcggcacgcgacggcgtggcccgcgtcgagcgcctcgcctcggcgcccacctcgtcctcctactcctcggcgcctctcgtcggcggcggcgccccggggaccctgcggtcgccgagggggtgcggcgggaggt

SEQ ID NO: 36199 - DNA, 1330 bp, Setaria italica
  Peptide Sequence Number=SeqID_102173
cattagaagatcagtctatatcaaaagcttcatgtgcaattaatgctgcacgttactgtgaaagtgtgcttcgggaatgggatgaagatactgccttcttggatatggatcctcaagggtccctgtttgcaggtgaaaccagctttttggttaaattagggaccaattatctcgaacagatactgtctgccattctgcttgagtttgaagatatgtcatgggaatatgtccagaacattggatcgtggagtgggcaaaccgccctagatgatcagatcctggatgaagaaaacacaggagtatcccctggttttctaggtagtctagatgttctgacagacaggaccactaagctgaagctatatcttaattccaaggatttccttgatctttggaggagtatagcagaaggcctcgattacttcatctacagcagcatacggtggggtgaagtaagtttctccgacacaggagtaattcagttaagagttgacacaaaagctcttctccacatctttaggcccttctgtgcgagacctgaagcttttctccctttcctaagtgaatccctgaggctgttaaccatgaagaagtcagatgcacaatacctgctggaaatgttaatgaatgacacgagcagcgacaattgcctaaagcatcaaggattgcaccatgtaaatgctagacaggctgcaaagatcttaagaagccggaagtttggtggttgatcttattaggacaaagtgtagcggaaaattattagaaatctaatgttgccatgctgatgcagattgcttggtatatttgtatgaattcatacttggagagtaaggattacaggcggctggaaagacagagatgtgcactaaccaaggatacttaagagatgcttcaccaggctattggcacgtatggcagtatggcacgcagcagtgctttccaataataacaggatttttaacagtaccgcctgcttcctggaattctttaggtgacaacatggaaatggccgttcacggagtacacttaatcatattcgcgcatagcagccatggaattctttaggaaaccatattcgcgcaccgcagccatggaattctttaggaaaccgtgtaatatttgtatccaaacaaagttgacatgtagcaaaacttttatatctgcctcgagataacaaaccgcagatggccacagctcacacaaggtcaaccttatgtctgtactactttgattggcttgatgaattgcatccattctattcatcttgcacgaaagagataccataaagctcaaacgcttatgttattgttgtgatgtcatatgcttaaat

SEQ ID NO: 36200 - DNA, 1656 bp, Setaria italica
  Peptide Sequence Number=SeqID_102174
aagaacatatgtatctaatcatatgaagcacataatccaaatcttacaacatgagaaaaacaataaaagagttgacatggtaatatctaacaactaacaacagcaaaactaatgagatatcaggaaaggtgctcatttgtttgttcttagttgccttagaccttgccaaacctgagatcttaagagtcatgaaactgtaaccaatcactagtatgacagaaatcttacagccatgaaactgcaacaagcactactatgttccattgttcctgcacggtatctgatatatgcttacaatgcttacacattgtagccagattctagcagcctccatccataaaaccactctgggtaacatttgtgcaaatcatgaaattttataccattgccaggcaccggacatccaataaacataaatgcattctgcagtatccacatgaatccatgttttattaggctcttcctttggttcgtcataatcgaaacattccttgtaagtagcatctgataccatgtacagctcatgtccgtgaaagtacatatctcgcattcatacatctctcaacaaagtacactccaagcacatgcattgaatctccaattggcaagaaataattcttttttctccacaatatgagcattttctataccgagtgcaccatgctgaacaattagaccgccactaagcaatctgcatgaccaaatacacaggttgaaactctgatctgtgtaactcatgacatggaatccaaatcagagaaagatttgtgacatccacaagagtcaccatgcttttcatacgaatccatgtagataggtttaatgctggcagttacaggccttcacgcaggcaggtattgggtatgataggaccaacaagcagatgatggttcaacacatcatcagaccaaacatgttcagcaactcataaagctcaagatataagactgcccaatacataaaagatagacctcctgagaaatctgtaactgcatgccctcgcagctgatacttgattatcaccacaagcttgctccttcaagttttcgtttcaaatatgctactgaaccattcctgagaaaacagttcttccaatgacactttaaactttaactcatgtatgtctgtaagtttcaagtattcaaatcattcaacaaagggtgacagccgcaatctggcagagtactttaccaatactttgggtatacctcaaaagaatgcctgactttccatgaattttgttcgcacggatggatatcaatgtatgggtcagtcaacttttccatctttagggcatttctgtcgtgattgtctccttttgcttggatctgacgaacacattcagcaaccaaacactaaactttggggtgaccttgcctgtaaggggtgggttaaagccaaccttcctataagcttgtgtaatgctcttctgacttctttgcaagtgaatattgcagaacgagggagctgcagactttatgattggcctgccacaggtgacaagcccaccctgtaccccactcttggttatgtaggcgcagggtttgtagagcacctgtttgggatcggacaggatgtgggagtggcagaaccgggtcgtcgccatggcccgcaccttgcaccccgtgaacccgcacttcttccttctcggcaccg

SEQ ID NO: 36201 - DNA, 411 bp, Setaria italica
  Peptide Sequence Number=SeqID_102175
gcagcgtcggcacgggcgacgagggctggaccgctgccgcagacgccgccgcttcttgcctcccctgcgcacccccttccgatgggacgggggcggccaccgctgaaggcgcgacggtggctatgaggcggcgcagcgcgtggttggggatgagcggcggggagggcggcagcgggaggttggtggacggggcaggtgaggtgccccccgtcgagccagcgctggatgctgcggcgctcgaaggtgtggccggaggggaggatgacggggtccgtcatgacctccagcgtgatggggcaccggaagtcgtccggccacgcctccattcctggcggcaggatccgcggcgccggcgcgttcacgcggaaggggaagagtggaatgggaagcgtgtgggactctggtctggag

SEQ ID NO: 36202 - DNA, 485 bp, Setaria italica
  Peptide Sequence Number=SeqID_102176
gtcagcgtacattttaaagcaggacagtttgccatcatcgtataaatcatttctaaataagcatggtggaaaagatcttactagtttgcaaggtgtgaaggatatagtcaaccacactgctatcagtaacttagcgggtatcgagaagtactacaaatctgttggtgttgatataaagttagatccaaacatgaaagtgccttgcccaattgtgcatggtaatcaatcatgtacaggacatgtcttttcatttttgttacaagcatatggaagagcagttcctgtatatgttcctgtatacttagttccagcactagtagttcatcggcagcatctcatgaaaagtccttccacaattttagggaagagtcttctagggatagcaagatctagcctgtttctctcagtatactgtgcatccgcatgggcttggacctgcctgcttttagaaccttccagagtgcaaataccctcttgttatactt

SEQ ID NO: 36203 - DNA, 328 bp, Setaria italica
  Peptide Sequence Number=SeqID_102177
tttctgctacaccacatatcattttaatgtagacagaagacattttttaacgttagtaggttcatcgtagtttgctcttctggaccttgcttttgcttggggaataaatgatgctgcgaatcatgccaaatttctgacatgtttagagatatgcttcatatgcaatgctctccatacggctcattccaactgtgtgctttaagcccttttgattcgaatgctagccacgatccaggtcatgtgagacgcattcagattgtggttttgttcagcgacaaattaacacaccatgtattcatcggaattatacactcactgaatctcctcc

SEQ ID NO: 36204 - DNA, 931 bp, Setaria italica
  misc_feature (1)..(63): n is a, c, g, or t
  Peptide Sequence Number=SeqID_102178
nnnnnnnnnnnnnnnnnnnnnnnnnnnnnnnnnnnnnnnnnnnnnnnnnnnnnnnnnnnnnnngttttattcaatacaaacatccattcgctctcgtctctcgtgtctcatttaccttcacgcactcaattctaaacgctaatcatgccaacgtaggcgcgcaatcactgtaccgtaatataacctaactgtatttcttatcttttgaatgaaccgtaaacagcttattcttccctgccaaatgagaaatcttgacacatatataaacacatgggtgatgcacgtttattgcaatcgcatcacggccgcgcctcgccgtcgggtacgacgttggacaccggaagctccaccactgccgccggcgaccgaagccgtgcgcggcacccgcggctgaacacctcctctatctcctccagcggccggcaatgcgtctcggggcacatgaagtagaagaacgcggcggccaccactgagagccccgcgaacaggaagaaggcgccgccgatggtcatggccttgtacagcgacacgaacgtcatggacacggtggcgtttatcaggcggttgatggccactccaacgctggtgccctgcgcgcgtagccggagcgggaacacctccgagctgtaggcccaggtgatggggcccacgccgacggagaaggacgctacgaaggtgaacaccgtcaagatggacaccaccaccgcccacgccggggagtggtgcggcgccgagcgctcgacgacggtgaggccgactccgagacaggccagcgaggcgatgatgcccgccaggctggagaggtatagcggcctccgtccgacgcggtccacgagcaggatggccgtcaggatgaacaccgtcttggtcacgcccacgccgatggtcgccgcgaggatctcgctgcgggtgacgatgccggccgccttga

SEQ ID NO: 36205 - DNA, 404 bp, Setaria italica
  Peptide Sequence Number=SeqID_102179
ctcgttcagcacagccgatttccctgggtttaagggggattgcatctatttcttcaagatggagagggtcaagaggtcttgcatctacaggtttagcatggaggatggccgcaccgaggagctgcctggcccatggatgcatgcttgcacttggtttgtgccgagcttgtcttagcactttcatggatgaacgaggtaagcttcattacctgtacaatgtgcttgaaggctgatccttgtttgcttgagtaaggaataaatgttaatcttcaatgcaatgttgtgaaaccattgcccatgcatgctgctgtgtgctggcacacatacaattgtttggtgaagcagagataggttaaaaaaatgtgttgagtgataggcgaatgtgaatacaaaagatacgaata

SEQ ID NO: 36206 - DNA, 2127 bp, Setaria italica
  Peptide Sequence Number=SeqID_102180
ggcaggaagctcgctggctccgaaggcagtccgaggatattcagctactccgagctgtatattgggacaaacgggttcagcgacaaggagatccttgggagcggagggttcggtagggtgtaccgcgccgtgctgcccagcgatggcacgacggtagccgtcaagtgcatcgccagccacggcgaccggttcgagaaatccttcctggcggagctcgcggcggtggcgaggctgcggcaccgcaatctcgtacggctccgcggatggtgcgtgcacggcggggaggagctgctgctggtgtacgactacatgcccaaccgcagcctggaccgcctgatcttcgcgccggcctccgcaaaggttcccgtgctaagctgggacaggcggcggcgcatcgtcgccgggctggccgccgcgctcttctacctgcacgagcagctcgacacgcagatcatccaccgggacgtcaagaccagcaacgtcatgctcgacgccgagtacaacgcccggcttggggacttcggcctcgcccggtggctcgagcacgcggtgtgcgccgacgacgcggcacagccacacctagaggtgtcaccgtcaccgccgtccctgggcttgtcgtcctctgcttcggcgaactttcagtttcggctgatggacacaagccgaatcggaggaactatcgggtacctgccgccggagagcttccagcgccgggccaccagcaccgccaaatccgacgtcttcagctttggaattgtgctcctggaggttgcaacggggcggcgtgcggtcgacctggcgtaccccgacgacgaaatcttcatgctggactgggtgcgtcggctgtccgacgaggggaagctactcaacgctgcagacggtaaactgccggaaggcgcctactctctgttcgacatcaaccggctcatacatctcggcctcctctgctcgctacatgacccgagggctcgtccaaccatgaagtgggtcgtcgagaacctgtctgacggctgctccggcgacctcccgcgactcccgtcgtttgtggctcttccaaagtacatctctctcacttcatcctctgactctggcacgacaaccatcaccacggatagcacggccacaactctatccaagcccgtctacgacaccgctgctgcggataccatttaccacactgcagaagacggaagatgcagctcgaggtccgctgacgactctggtggcaacagccggcggtcgtcgcggccggtggcgatcccgaacgtggacatgccgcgtgagatatcctacaaggagatcgtcgcgatcacaaacgacttctccgagtcgcagatggttgcggagctggacttcggtacagggtatgagggcttcttggacagcggccacggccgcgtccatgtgctcgttaagcgcctcggcatgaagacgtgcccggcgctgcgggtccggttcaccagggagctctgcaacctagcaaagctccggcacaggaacctcgtgcagctgcgcgggtggtgcacggatcacggcgagatgctcgtcgtctacgactactccccggggagcctcctgagccactacctaatccgccgcgacgacgcggtcctcccatggcgccagcggtacaacatcgtcaaggccctcgcgtcggccatcctttacctgcacgaggagtgggacgaacaggtcatccaccgcaacatcacgtcttcggcggtgttcttggaccccgacatgaatccgcgtctcgggagcttcgcgctcgctgagttcctctcaaggaacgagcaccacggcgggcaccatgttgtggtatctaccagctcggcccggggcatctttggctacatgtcgccggagtacatggagaccggtgaggcgaccaccatggctgatgtttacagcttcggcgtggtagtactggaggtggtgactggtacgatggccgtggacggaaggttgccagaagttcttcttgtcaggaaagttgagctctttgaacagctgaaccgaacggtggaggctatggcggacaggcggctggatggcaagtttgaccgtaaggaactcctgcggttggctaagcttggcatcgcgtgcacccgctcagacccggcagcg

SEQ ID NO: 36207 - DNA, 733 bp, Setaria italica
  Peptide Sequence Number=SeqID_102181
attgccttcagcgtttttgttgatgcttttagtcataattctaaggtatccactgagcacgctgtacacgagcagcaccacagtaattgaggctgttatcagtctgatgccattgctggccttcagcatcttcttgaatgggattcaaccaatcctctcaggagttgccattgggagtggatggcaagcaatagttgcttatgtcaatgttggggcctactatctgattgggcttccaattggatgcgtcctaggatacaaaacaagccttggggctgctggaatatggtggggtttaatcgttggggtcagtgtgcagacgatagccctgattgttctcacagccaggactaactgggacaaggaggtagtgaaggcaatgcaacgtctgcagcagacaggtgtgattccggtcaacgacatcattgcatgatctaaccgggagtcaacctggctgacactgttctggagctcagttcagtggcagagctgttcctactccactgctacggaagggtagctttagggacttggtttttgagtttgtgacaataagctgaattcggtcaagtaacctttggttatctcattgtcaagctgaaaatgatttagtttcttggaagatgtaatttttgtttgctccgtgagcttgatatcccgaatcatgtacgcattcgcaggagacaatgaacctcaaagttggatgaagacatcatgtgctaagcgttgattt

SEQ ID NO: 36208 - DNA, 691 bp, Setaria italica
  Peptide Sequence Number=SeqID_102182
aggttagggcaactctcaagcagcttcagcatgaaaccagtttcttgtacacttgagagatctaagctcactgatagtatcctcaagtcttgaaacatgacagtcaacttcggaatatcttcatattcagatgataacaccttgatagcgtggcctctaagcgtgaggcactccagcctcacaccagcatccaggaacggccgaaccctgaatgactccattactgtccgtggtttggcgatgtgaaggtaagccttcctgacatccggcgcaggcaccagctccagtctcttcaccttaccccgcgtgtacagcgtcaccgtcctcagcgctggcgctctaattgtgatctgctctagcttcagcgtcggcctgaacacgaggttcctgacggaggacgactccaccgtgcagctgccggccttgcccgtaccgagccccgtgcagtacaccatctcgagcgtgtccaggcatgacgcggaggcgagaattttgttgatgagctcctggtggatggctacgcggtggagcctgagcgtgcggaggcaggggcacgcgacgtcggaccacgggggcacggcgcaggtatcgagggagagcacggagagggatttcagggagagcacgttcttgggcacccgcgcgcggcgcgcgaggcggaaggagagctcggagacgccgtgctgggcga

SEQ ID NO: 36209 - DNA, 1032 bp, Setaria italica
  Peptide Sequence Number=SeqID_102183
ccacgacattcaaagacttatgtgcagcagacatccatgtctttctcgcagccatacgctcagcaaaatggttgcccgctgacaggataccgatgaaaatctcaactggttcgtctgggaggggaggggcctgccaactgggtaacatctctaggtgtttctgtggagaaaagctaggatgtgtagtgggcaaagtccccgcaaacactgattgcacatcaaggtccccattcaatgataagccagtagcatcctcaagcacaaatccagtgcggtatggaaatgatgtcacatgccgtccatcaacattcacatggtaaccttccaatccagcagtgagagtaagaacaaacaggcggtcctccacgaatgggtatggccaatcaacggagacagtctttgtgcgcccaatgagccggttcagccaccatgacgtctttgactcctccaaccgcctttcgtcatcccgaatccacttctcacacttcaccaacccatcaacagtctcctcgtcggcacgggacctccagccctcgcagcggagtggagtgccccactgcatgcggtagcaggtgttctgctcgatcaccggcttgccactccagtcgccgcggaggcgggggttgaagtggagaatcctgggcgggtcctcgccgtccaccgtcttgagcccctgcagctccatcatgaactgcgacaccatgatcggctcctccccatccttcagcagcgtgatcttaggatcccgctcagggtgcgcctcgtgcggcgtcgcggccaccgtgatatgcgagcccagcgtcagcccgcacggcagctccaccgcccgccccctctcccggaactcgtcgccgctgaggacgatcgagtgcgggcacttgctcttctcctcctcgtctgacgaatcctccaaggacggcagggtcgtcgcgagagtctgcaggtcggagaacacgcgcgcccctaactccgcggcctcggcggcgaccttgcgcagcgaaccagagcgtgtggagttgaggtggcggagct

SEQ ID NO: 36210 - DNA, 288 bp, Setaria italica
  Peptide Sequence Number=SeqID_102184
gtctcgtcgcttctgacatttgggtcccacgacggagctacgtggcaacccgagcgagcaaacagactcgagcactggacgtctggacgcctccctccctcctcgcctcctcgggctccgccgagcgcccgaggctcccgtgcacctccgccgcccctaaaaacagcagtctgccggccggggacctcttcgtggtgacggctaccttcctaagggaatcagtgcagagctgctggtcgacccaaatgatacctgcttctatccatagaaacgacctaaaattaattt

SEQ ID NO: 36211 - DNA, 401 bp, Setaria italica
  Peptide Sequence Number=SeqID_102185
cctggcacagaatacacaagtggaggacacagagagccaaggatcattgccaaaatcttctacaaaagattgtgaagggaataaaaggaagaggctgttactgggacaaaagttatcgctaaaatctggaagatccgatgaggatatgaaaactatcaagcaagatccagttgctagccacttaccatccatggcaggatccacctatcctactgcttggttttctgatgtttcaggcggacagaatgacacgtcagagaagatgtctgttggcactgctagtggagtggtttcaaagatagaataccgaggaaataataagaattcgcagttacctagtcaagggctttctgttacctcagaagcccccagcaaaacaagcgatggcaatgatgtgtttg

SEQ ID NO: 36212 - DNA, 1373 bp, Setaria italica
  Peptide Sequence Number=SeqID_102186
tatcaaacttcaattgtttttcaggttgcatataaagtgtggttggagtcttttggcatgtaccctttatccttggtaaagagagtgaaagaattctggggttctatgaaaaaatggttgtctgaaaactttcctgaggcagccgaaacattgtgcaaaggtgtttcggaagctcaattaaagtcggcagaggatgctcttggtttcaagctccctatgcccacaaagctgctgtatcgcttttgcaatgctcaactgccttttagtgataacgatgaagcaaatgtacgcagttccactcatggaataattgggggctatgcgttttatgattattgggtaaatgtgcatttatcaccacttgagcaaatagttgaagagacaaaacagttttatcgtgagttccctgatgtcttcaatgggcgcaaactcattatagtggcgacatcatggtttcatccaaaaacatttatcctaaattgctcaaatggtgaactttatgttggcacaaacaacttaccagtaggagaaatgcttccttgtgtgcctaaagcattggtaaagccaactgatagtgatctaccccaagatggattacttctgtggctggaagagcatctcaggcgtttacagaatggaatgatcaagacccgtatgctgttgaagtcaaggtatatcagcttatatccagaagcaccgccattatgtacttcagccatgacaaatggtgttaaggtgcgtgcatctgctgtctttgtgccagaacatcctcaaactcagggtcatgagcgaagtttgttgtacacttattcaattcgcatgtcagttccagaggcttgcatgctaggtggtgtgtactattcttcctgccagcttcattcacgccactggaccattcgatcaagggacagggttgtttctgttgttagtggggaaggtgttattggacagtatcctgtgctgtcacctggtcgggatgagtttgtctatgagagctgcacgccactgcccaaagggcctggatctgtggaaggctctttttcatttgtgcctggcaagttgagccgaccagaaggtaagccgtttgaggttacagtggcgccattccctctggaggtgccggagtacatcttctgatgttaatcgtgagaaataatgtatctgtatgtatggtagatgcttctatcagatctggtacatgcttggtggagcaaactttgtctatttggtatgatcttgttggggtaatgtaagatatggaaccgtgtgctgttacttgatgtagcaatcatcattagtcaataaccatagtgatatcagcctaggaaccagcagatgggcctcagttaccaggatcctgagtctgtgccgag

SEQ ID NO: 36213 - DNA, 358 bp, Setaria italica
  Peptide Sequence Number=SeqID_102187
tcttgtcttgtaacttggttactaaggggtctagaagaggacaagtaagcaacaagaaactccggtgggataaagattcagatgaaaatgcatttgaagtgtttgagaagctagaagagaagcacaaggatggaagcaaggtggaaaaggaaggtgatgaggaggatgaacaagaagaagaagaagcacaagaggaggaagaaaattcagatgatgactacaatcagaatattgagtttgacgacgacgacgatgaattaggaaaccaaagacggaaagaaagacaacaatagaaagaactaactaatagaattaaagtaacggaattaggtacctaagtaattttagtactttttta

SEQ ID NO: 36214 - DNA, 592 bp, Setaria italica
  Peptide Sequence Number=SeqID_102188
atcaaagaaggttttttggagttccttaacaaggaaatgcagtccattgaatacaacgaaaaggattacgaaggactgccctttgacttccatggtggctttgttggatatctagggtatggtcttaaagttgagtgtggtgcatcatctaacaaggccaaatcaagtactcctgatgcatgcttcttctttgctgataacaccgtggtggttgatcacagtaacggtgatgtgtacattttatcattgcatgatgaattttcttcaagtaatggagatgggacatgcagaaattcaacacataattcatggttagtggagactgagaagaagcttcttagactgggcgctatgcctccaggattgctgattaatgggaaggcatatgctatatcatctaatgtgaataagcaaagttttgttgtagagaagtccaaggatcaatatattagagatgttcagagttgcctggattatatcagagatggagaaagctatgagttatgcttcactactcagatgaagagaagagtagactatataaatgcgctccagctctaccttaaattgagaaaacaaaatccagcttctt

SEQ ID NO: 36215 - DNA, 458 bp, Setaria italica
  Peptide Sequence Number=SeqID_102189
gtgcctgctttgcgtgatggcatccttgtgattctggctgatcagacagagatcatcaccaatggaagatataagagttctgttcatcaagctgttgtcgatgctgagcgtgcccgcttatcagtagctacattttatgatccatcaaaatcaaggaaaatatgcactgctgcaaagcttgtgagcaaggatgagccacaaaagtatcgggacgtaatctatggtgactatgtctcatcttggtatagcaaaggtccagagggaaagcaaacattgacgccctccttattcagcaatagagccatagatgccttaaagcaggattgggccactcatatgtgttctaatgcatggggccatttggaaagcacgcaataaagcgtgttttgaaggaaaaattataaaaaacccaatagagataatctgtcatgctggagctttaatgaaatttggacagg

SEQ ID NO: 36216 - DNA, 414 bp, Setaria italica
  misc_feature (374)..(414): n is a, c, g, or t
  Peptide Sequence Number=SeqID_102190
ggtcagggaccggccggcgcgcgcccgtgcgcgtcgcaacctcagggcgcgcggccccgaccgcctggtccgccagatgagacgacgagacgagccggcctgagccgatccgtcgcggcggcgcctcttcgcctctcctcgacccggctgccggatcatggatgaaggctctgtcctctgtctctgtgcggcgacctgccggaacggacagaggagccgcggcgtcgagttgtttcttcctcttttgtttcctggctggagaaagattagagagaatttttgtaacaaaagatagtatatacactagattggcgacttgatcaatatatcttggcatagcaaggttgattaaccaaaaaaaaaaaaaaaaaaannnnnnnnnnnnnnnnnnnnnnnnnnnnnnnnnnnnnnnnn

SEQ ID NO: 36217 - DNA, 1843 bp, Setaria italica
  Peptide Sequence Number=SeqID_102191
tttttttttttttttgttcctatctaagcaggaactttgctattgattggctagaaggaaatggttctacaagactacaactactctagcagactagcacccaccttcggttcatggagcaggagtgaaatgcttaggataagaaaacacgtcgccacctataattcagtaccacaaatatgaataatccaatgtcaacaatccaatagggaaaaagacgctagccccccaataacttgattcttctgccacggctacatttttgaaagatatatgaccgggggcatgtggattaacaagcccagcacaatggcacaaacaggtgtgcacagccgcatcgttcttattatctcatttggactattccagcgctaacgagtttctgaatcttctgcataactcctgggttcttcaggtgctcctgagcggccctggggttctcctggaaatcaattagcacctgtcgcataataggatccgtaaggatgttctggatttctgggtcttgcatagctttattctgtctctcttgcaattcgtcctggcttatttcacctctgttggccttgttgatctgttcaacgcacctcctaacaccatcaagcagttcctggttattcggatcaagctttaggccagcctgataggtttccatggccttgtcgtattctttcatgaagaattgaattgcacctttccgtgtgtaccctttggtgaaggtggggtctagttcgagacacttctctgcatctttaagaccttcaggcatggctcctaacttggtgtagcaggcagctctgttgctgtaagccttaggatccttcgggtttctcctgagagcctccgtgtaatgctttattgcttctgggtatttctgctccttgaagaactcattacctttctctctctcctcgtcagctaactttggatcatagtactcttgttgctccaactctttctttgccctctcagcctcatttaactttttaagagtgtctgggttccgatgttcagttagagccttctgaaaggtctctatggcgacatcaaaatccttagagctcttagcaagtttgactagagcagttccttttcttgtcagtgcccttgagatcatcttgaaatcagcacggagttctcttcccctctccacagccttgtcacaatccttaatgcattcatcatactttcccatctcaatgtagactgccgctctgttagtcagataggagatatcctcatcgtcaagttccaaggctttggtgtaatgctggatcgccgtctcaaagtcctttttcttgtaagctgcgttacctgcctccttctccttctgagcagctgctttcctctccttgcgttccttctcctcatcagtcaaatccatcggctctggctccggctccggctccacctccctcgccttcgtctcaggaggcggcgcctgctgttgctggtgctgctccggcggcggggtagactgcgacggctcggaggcctcgggtctctggatcttgatgttaagcatgaggctgagcacctgcatcatgcggggatcggagaggtacatgttgaggctgctggggttcctctgcacctcgcgcagcatctgcataaagtcgggctgctcaaggtaggcgcgcgtggtggggtcggccgcgatcttgctccacagctcggggccctggaacatctggccgatggcgtcgggcccggacggcccgcggcggggcggggcggcggcggccttcttggcgtcctcgagccccgccttgaggcccccgttgctggggtcgagcgcgagccccttctcgtaggcggcgacggcgctggcggcgtcgccgag

SEQ ID NO: 36218 - DNA, 611 bp, Setaria italica
  Peptide Sequence Number=SeqID_102192
gcggcggcaaggcaacaagtctaggggggaggagagggaggagtagtagacgaaaacgaagcaacggaagcgtaagcgttaggagacgggcgccgagggaaggaggcaagcggaggccccgcgctccgatcacaccaaacgcttcgtgctgctgcccccgccgtgatcccagggcggcgggccgatctcaccgcggccgcggaggcgagctttttaggcgcgccaccgccgtccgacgccgcgatccagatccagcgtggggggttcgtgccactttatctgtatacacggaatcagtgatcgatcagagtaatacgaagagggagggcctgatcgtttgatctgctctagtagagaatgtcagagggaaatgtggatggcatcgagatagcaattagtaatgatgagaggagggacagagcagatgtcgagatctcagaggacgagccgaggcacacaaaaatacggttgctgaggaagaaagcgctgcatgcatcgacaaggctgacacactcgctgaagaagagggggaagaggaaagtggactgcagagtacaaaggatagcgatagaggatgtcagggatgctgaggaagagcaggcggtgagtcg

SEQ ID NO: 36219 - DNA, 416 bp, Setaria italica
  Peptide Sequence Number=SeqID_102193
cctgaaagtaccaatcttactctcttccaagtagtaagtcagaaacgtacgtctgataccaaaaaaatgcatcaagagacatatccgagtcagattatatgttaacttcttccagttcacggggaagccctccactcgttggcaatccagtcagtatcttgattgtatcatagaagaaccactgcatggttatgacaggtccaacaagggtgatccgaatgggcaggcttcttgtgaacaaattacgaaatccaatacttttcacagcatgtatgatattttcagcctttttgttgtacagggatgagacgatattatctgcgggattcgaaacaacagtaccaacagcaccagagatgtaaccagccagacaagtagcaccaagctgctgcattgttgaacagtcctcctttttc

SEQ ID NO: 36220 - DNA, 445 bp, Setaria italica
  Peptide Sequence Number=SeqID_102194
ctcgacgtgatgacaatggcaggttgcgtacatcatctgtatctgctgaatcggatgaaccactggtcaaggcttttccaggctctgggatacctttggcaagcggagataggaaactgaagagaaatccaacagctgcactgaatctatattcaggatgtgatgttccctccattggtacaattgtttctctgagtaactgaactgctctaagcacaaccgatgcagtgagtgatttaccagttaggaatttctccaccttctttgctctaatagcatgttctgttccatatgcaccaaaagccaagcgcagattactaaatacaagagtgtctgatcgttcatccacagaagaaagccctaagaaagcacaatttacatatgaaacagcattgccaagaggacgaggtgctgctcagtaagtttcaaataacaaactttgttt

SEQ ID NO: 36221 - DNA, 708 bp, Setaria italica
  Peptide Sequence Number=SeqID_102195
agggacctagtttaggactagttagtagtttagaaaaactacggtatggagaaactgtagttttagaaaccagtagtgtggtaaaccacagtttagaaaaaagaggtcgtcagtggagtttctaaacatccaaaaagactacagtttttacaatgccatggtttccaaagatccaaggtttgttgactccaaacacctcataggttttcagaaccaaagtaatttgtaaaaccataagcagatgcccttggtatccctctgaagactctagaaaattagtgcatgagtttcacatgatattatgaagtcacacaacagaattttacaaccagggatagacaatgctatggtgtcttgtgcaaccagaagtttagtttctacttctagtcttacagagaagtcatgacacaagcggactcaccacaaaaacacgacgaaccataaaaggttatcttagttaattgttgcatccgcagacaacaggacagacaatataaatgcaggtcttgtgtgcaagttcaaatttgtgatggcttacaatgctcacaagccctgaagctgtgtttctctggccaactatctgttgggtttgcaaggattttggcaatctgaagctccaagcattaccagaatataaggacattagcatgcgagaacttcgaatgtgccattcaccacagcttaaaaaaaggttctattttgtaccct

SEQ ID NO: 36222 - DNA, 263 bp, Setaria italica
  Peptide Sequence Number=SeqID_102196
ccgaggcggtggccgccgttgactgctcgggtcacggccaggtgttcttggatggcgtcgccggcgaggatgggcggcccgggtgcgagtgcaacgcctgcttcgccgggcgggactgctccctccacacgcccaactgcaccgccgacgccgacaggtacgcgatcccggcgtgaattaatcgatcgccctctactctgtaccttatgtcttggtgtgcaaatgttgggaagtgatcatgtctaatcctagctccgacacgg

SEQ ID NO: 36223 - DNA, 478 bp, Setaria italica
  Peptide Sequence Number=SeqID_102197
cctacttcaagcggatcagagagccaagggcattcgttgcatgggtgaagtgtgagatggaggaagacgacgactgctacgaggcgctgctgaagtcaaagatcatcacacgttcaggcgctctcttcgaagctagcagccggtacacgaggttgagcctcctcaagacggatgacgacttcgaagttctcatggagagggttacggatcttgtcaatgccgagaattacgacgagcctgcctcgagctccacgactttggtaatgtaaagggaacttccatggaccatgggcacccaaaagtgccggaacgttcaacccagaaaataactgtctctctgcttgacctggagagtaactgggaacatattgcagatgtttttcttacgtttggaaactcaacgattcaggtagtgtgaaaaacgcgtcccaaaggtggattgaactcctcactcgaaagatctgcattgcctgaacaa

SEQ ID NO: 36224 - DNA, 1775 bp, Setaria italica
  Peptide Sequence Number=SeqID_102198
aggacaagactaggtaggaagggacaacagcaggcaaggcgacgacctgccctcctcgccctcctctccacgtcgctgctcctcaacgccgtcttcctcgcgcaccacttgttccggccgtcccgggttctcagcgcggtcggcgacggcggtggcagcagctgcgggctgagctggacgctgcaggcggctagggaggccgaggcggtggccgccgttgactgctcgggtcacggccaggtgttcttggatggcgtcgccggcgaggatgggcggcccgggtgcgagtgcaacgcctgcttcgccgggcgggactgctccctccacacgcccaactgcaccgccgacgccgacagcgggaacccgttgttcctggagccatactggcggcggcacgcggccgccagcgccgttgtgatctccgggtggcaccgcatgagctacatcgccactgacattgaaaaagtgttccaatccgtggagctcgagcgccagatccggcgcctgcacagggccgtcggcaacgccgtcgtcgacgacaagcacgtggtcttcgccgccggctccatacagctcatcaacgcgctcgtgcacgcgctctccccggacgccaacgccgcctcgccgccggcccgtgtggtcgccaccgcgccgtattacccgatttacaggacacagacgaagatgttcgacggccgcgagtacagatggggcgggaccacggctctgtggggcaacgcgtcgcggaaccccaccgatggcttcatcgagttcgtcacgtcgcccaacaacccggacgcccagctctacaagcccgtcctcggcggctcggccgcggtgaccgtcgaccacgcctactactggccgcacttcacgcacatcccggcgccggccgacgaggatgtcatggtgttcaccatgtccaagccctccgggcacgccggcagcagattcgggtgggcactgatcagggacgagaacgtggccaagagggccaacgattacgtgcagaacagcatcatgggcgcgtcccgggatacccagctgcggatgctggggatcgtgaagatcatgctggccaatctgcacggcaaggaggacatcttcgccttcgggcacgacgtgatgagaaccagatggcgcaggctgaacgccgtcgtgtcgcgctcccgccgcatctcgctgcagaggatggctcccgagtactgcacctacttcaagcggatcagagagccatcgccagcctatgcatgggtgaagtgtgagatggaggaagacgacgactgctacgaggcgctgctgaaggcaaagatcatcacacgttcaggcgctctcttcgaagctagcagccggtacacgaggttgagcctcctcaagacggatgacgacttcgaagttctcatggagagggttacggatcttgtcaatgccgagaattacgacgagcctgcctcgagctccacgactgacggtaatagccactgaagttcattggtccgataaggcaagtactataccggggcgatcaaatccgagctgttgtttctcgtgatataagctgctgagtattggtacagcacaagttctcaacgggcatgataagatactggaaatcatcagctaggcgttgatgattattctacaaaatcacttgaacggtcaactagaagttgggtgtttctttttttaaaaagggaaaaagttgattgtttctcagcgtgagctggcggaatagttgggcatgactggaaaaattatacaagagatgatcagct

SEQ ID NO: 36225 - DNA, 369 bp, Setaria italica
  misc_feature (4)..(4): n is a, c, g, or t
  misc_feature (85)..(85): n is a, c, g, or t
  Peptide Sequence Number=SeqID_102199
gaanattggcattgtctgccacgatgctatcaagcagcgactcgcatgcatcttccaataaatccaagaccttttcaaatccctnagggcctccataataaggatctgggacttcagactcagtatgtcgtttgcaataggagcacatcagcttaacctaataaatatacaagtaacaattgcatagatgtgagctttcaagaacgaataagcatttaaaaaatattatgtcattacataccttacgtagataacagaaaatattaaaagttggatcaataacttccctacagctttgtacaaagactagcggcaagaacaaaagaataggtatcaagcagagatggaaggtgtgctcttttacactaa

SEQ ID NO: 36226 - DNA, 1167 bp, Setaria italica
  misc_feature (1)..(22): n is a, c, g, or t
  Peptide Sequence Number=SeqID_102200
nnnnnnnnnnnnnnnnnnnnnncttaattgttttgtttcaaatgggcataagaatgttggctcttcagattgtttctgattatctgggtggaaaaacgagtcatgatgagtacgtttttgtatatcacaagtcatatacaggattatgatcatcacaatgctaacagatccaagtcccatccaaagacctgggtccatgatcaatgttccatattactccagcagtccagcagcacattgtgaacatccaaggtcatccagaaatgttggcattgtctgccacgatgctatcaagcagcgactcgcatgcatcttccaataaatccaagaccttttcaaatccctgagggcctccataataaggatctgggacttcagactcagtatgtcgtttgcaataggagcacatcagcttaaccttgttgggtgcactgtcagggaggggctccttgtgtctccatctctcaaatgagttcaatatatcttcatagttctgcctgtccattgcaaggataagatcgaagtcacggaaatctgagggtttgataggtctggatattgaggtcacctcaatcccccgcttctttgaagcagatctcatcctcgagtctgccttgttaccctcatgatatccaatggtaccagcagagtctatgtgaaacttggagtcaagcccacgcttgcttacgaggttccggaacacagcctcagctgcaggactccggcaaatgttcccgaggcacacgaaaaggacggcgaagggcttcgcctcagccgccgacgccgcgtccgccgtgctcgcctccgcagccatcccctccgccgccgtcgccgccgctgcgaatcggaggcgaggatttcgcgcctggtggggactggcgactagcggtgcggcgcggcagccgtggccgagaagacgacgggtggctgcaagtggtgggacaagtggagagggagcagcaatgcggcaacacctgctgcttaacgggtctcctcgcgttgtcgggttcggagccactgaggaggccgcagcggcggaggtggtggagctgctcgccgccgccgccgcgagtgtgggcgcgacggctccaggcattgccggcggcgccgtggcgaggcctcgaggggcggctgcgaggatgagcaaggattcctgaggcccgcgag

SEQ ID NO: 36227 - DNA, 1151 bp, Setaria italica
  Peptide Sequence Number=SeqID_102201
cgccagatgcgcaagctgtgcgtgatgaagctcttcagccggcggcgcgccgagacgtgggtggccgtgcgcgacgaggcggcggcgctggtccgcgccgtggcgtccagcggcggcgaggccgtgaacctgggcgagctcatcttcaacctcaccaagaacgtcatcttccgcgccgcgttcggcacccgcgacggcgggggccaggacgagttcatcgccatcctccaggagttctccaagctcttcggggcattcaacatcggtgacttcatcccctggctgagctggatggacccgcagggcatcaaccgccgcctccgcgccgcccgcgccgcgctggaccgctttatcgacaagatcatcgacgagcacatgaagcgggggaagagccccgacgacgccgacgccgacatggtggacgacatgctcgccttcctcgccgaggccaagccggccaacaagtccgccgccggcggcgacgtggacgacctgcagagcacgctccgcctcacccgggacaacatcaaggcaatcatcatggacgtgatgtttggcgggacggagacggtggcttcggcgatcgagtgggcgatggcggagatgatgcacagcccggacgacctccggcgcctgcagcaggagctcgccgacgtggttggctacgaccggaacgtgagcgagtcggacctcgacaagctccccttcctccggtgcgtcatcaaggagacgctccggctgcacccgccgatcccgctgctcctccacgagaccgccgaggactgcgtcgtcggcggctactccgtgcccaagggctcccgcgtcatgatcaacgtctgggccatcggccgcgaccgcggctcgtggaaggacgccgacgtcttccggccgtcgcggttcgcgccggagggcgaagccgccgggctcgacttcaagggcggctgcttcgagttcctgcccttcgggtccggccgccgctcctgccccgggatggcgctgggcctctacgcgctggagctcgccgtggcgcagctcgcgcacggcttcagctggtcgctgcccgacggcatgaagccctcggagctcgacatgggcgacatcttcgggctcaccgcgccgcgcgccacgaggctctacgccgtgcccacgcc

SEQ ID NO: 36228 - DNA, 1195 bp, Setaria italica
  Peptide Sequence Number=SeqID_102202
tttactttttttacgaagtgaagtatcaaagccaaaagtgttccacgattttgtgacagtagttcaggaatggaaaacctgcggacaagcacagttctagcagcaatgctctttcatctgcatattcaggatcacgaacaaacacagaagaaagaaaaaattgggattgtagcatccatctctgtcccgcaagctgcaaggctttgttgcatcaatccccagattgtaagtcctttccaaattgcaacgacaaacatcccgagtaaacgtttcccattctccaaaaaggcatagctagcaacctgacagaaggaacaacactggatggccaatgggatgaattagcaactcaatgaacattaagttgtagggcacacggtaccacattgataactgacccaaggcaatggcgaaggcaagtatcattattgtgacatgataatccagtcctcactcacctaaaccctatctaattacaacactacagataaacacagaacaaacaaaagggaaaatggaattaaatagttaggaactcaagattatcaatctacataaagtacaacatcatggggttacatttcctgtgttctaggctgctatagctacaccaggaggtagtagatacctcctggaaaaatggttggcgatggctaaatgtataatgtcatccaagagaatgcagagaacacagttgatcatgacgctggtaaaattaatggtagattcggcatagttccatctgaaaaaagaaaattggatgcaaccttctactgggactagtttgcttctgtgttgcaaccaacagcttcattctcatgaacacatgaagtttcatccttagggtgtaagatgccatttgaagctactttttgagtagaaacataatctgagactatattacagcctaacatgtctttatatggttctccattaggaggtttttttactacattttcagttgacccattcgaatgctgtgtttgatctgttggtattccagcattagcggtgacatctgtatcaccaattgaagaggtttgttctgactgggacttttcttcagcaacaagattgatgctttgatctgctggtggtccattgttggtacccatttccatatcttggatcctaggtggatcagaggctgcatcagtctggagcttttcttcaatagcaattccagtactagtca

SEQ ID NO: 36229 - DNA, 753 bp, Setaria italica
  Peptide Sequence Number=SeqID_102203
gtctcgactctcgactaaccgagaggtggaagacgacgccctccaggcagcagagcaggaggggaggggaaggaggatgacgatccggttcgtgctgttcgtgaacaagcagggccagacgcggctggcgcagtactacgagcacctctccctcgacgagcgccgcgccctcgagggtgagatcgtccgcaagtgcctcgcccgcaccgaccagcagtgctcgttcgtggagcaccggaactacaaggtcgtctacaggcgctacgcgtccctcttcttcctcgtcggcgtcgacaacgatgagaatgagttagctatccttgaattcatacatcttttggtggaaactatggatcgccactttggcaatgtgtgcgagcttgatataatgttccacctggagaaggtgcacttcatgctggaagagatggtgatgaatggttgcattgtggagacaagtaaacagaacatcttggcaccaatccaactcatggagaaagcctcttaaaatagtgatcttgatctgtctaatttcccatcctcaggcttcttagcacctttgcttgtcccctttcatagatttcccctctgtatgcgaagagctaacaatctctgtaagcatgatttactgaattgacctgattgcaacctaccgatattttgtgatcttctgcatagttgtcatcacattgcacgtgtacaaaagtatttggatttcaagaaatgaaataccaacgactgatttatcatgac

SEQ ID NO: 36230 - DNA, 300 bp, Setaria italica
  Peptide Sequence Number=SeqID_102204
gtttctttgccggcggccgcggcagcgatgctcctcctgcgcgcctgcccacccgccgccgtgccgctctccttctccgccgctccggcgccttcctacagttgcccctggccctcctcctccaccacctacacggccgcgcgccgccccgccaacctcgccgccgtccagttcgaggccctccgctccgactccggtccttgggctgcagaccaaggcgtggccaccacttgcgatggcgacgatatgggcgatggcttgaacgtaggaagcggggccggaaagtgatgggaagggcat

SEQ ID NO: 36231 - DNA, 343 bp, Setaria italica
  Peptide Sequence Number=SeqID_102205
agctccatccatttatgtccaaagagaggcttctacttatttatacacaagatggcaggacgagtttatgaatgagaaaaaaaggaaaaaagaaggtaagggcgaaagaatactaataacagcgatgaaacttggatatatatgctcaacaacaaatgcaaagtgaacgaagatactatatttttagctgctcatcctactgttcttgttaatatctttattcatgcttgctgctccctcctgcaaagtgcatacaccttagctttgaatgcattttgtttctctatctcacttcagtacttcaccatttgctgctcccctcctggcactgaagcacaccatg

SEQ ID NO: 36232 - DNA, 567 bp, Setaria italica
  Peptide Sequence Number=SeqID_102206
ccgacgttgccacgactctgctacatgacctcgccagcatcagcgacatcaggttctgctttcacttcaaggcctgggcagctttgtacacggatacggtgacatgcacgagctgctgaggagctttactagtagagcttacagaactagcagcaactcacacggggatttacaagaagatggcatatttttaacatgtacagcacatagaaccatcatcagaagctctgaaagaggaatccgtcttcagtttgctagctgctgatggtttccttgtgcagttcagttcttgtgtcttgggcagcagctgggcccggtcggctacttcaccggtccagcgagctgatcaccacccagtcgtagacggtggggctcctcggcgtgccggggtgtcggcgccgtcggcggcggccatcctgcctttccggcgcagcttcttccagccctctcccttgggcgtcgtggctgcgccgaagggcgagtccggggcgccgcttggtccggtcgtaagtacggtcgcggagtcttggtacttcgtcttgtcgtcggtcgacgttggtcgtacgt

SEQ ID NO: 36233 - DNA, 327 bp, Setaria italica
  Peptide Sequence Number=SeqID_102207
ccagacaagagcgtcgtgttcctctccttcggaagcatgggcacgttccccaaaaagcagcttgaggagatcgccattgggttggagaactcagggcagaggtttctatgggtggtgcggagcccgcggaaccccgaggccatgcttgcccagccactcccggagccggacctcgacgcccttctcccggagggattcttggggaggaccaaggacaccgggcttgtgatcaagtcttgggcaccacaagtggatgtgctacgccatagagcgaccggcgcgttcgtcacgcactgcgggtggaactcgacacttgaaggcatcacg

SEQ ID NO: 36234 - DNA, 753 bp, Setaria italica
  Peptide Sequence Number=SeqID_102208
ggcggtgcgcgctctgagggacggcctgtgcgttcccgaccattccacgccgccggtttactgcatcgggccgctggtctccggggtggagagaaggagcacgagtgcctccggtggctggacacgcagccagacaagagcgtcgtgttcctctccttcggaagcatgggcacgttccccaaaaagcagcttgaggagatcgccattgggttggagaactcagggcagaggtttctatttgtggtggttatcggtagtcccgccggggcatgcttgaccagccactcccggagccggacctcgacgcccttctccggagggattcttggggaggaccaaggacaccgggcttgtgatcaagtcttgggcaccacaagtggatgtgctacgccatagagcgaccggcgcgttcgtcacgcactgcgggtggaactcgacacttgaaggcatcacggcggggctgcccttgttgtgctggccaatgtacgcggagcagagaatgaacaaggtgttcatcgtggaggagatgaagctcggggtggagatgaagggctacaatgaggaggtggtgaaggcagaggaggtggagacgaaggtcaagtgggtgatggagtctgaaggtgggcaggcgctcagaaagagggtggtagaagtgaaagaaagagcggccgaagcactcaaagaagggggctcatctcatgcagcttttgttgaattcttgaaggatctggatacatgatcttgttttagcac

SEQ ID NO: 36235 - DNA, 252 bp, Setaria italica
  Peptide Sequence Number=SeqID_102209
aagcagagtttgaacagcccccacatgctgctgcgttcatcagtgagtggcatgaccgcccacctatcaagcaccgcacgcatattcctctctccaagactgtcctttaacccatcacactctcctttctttctttgttctttctcctgcctctcgttgatcccgtcgctttagaaaagaaaaagaaaaagatggtgcggatgcacgtcacaagcagaacgtagcatcaccacaaaattcggttacaaattt

SEQ ID NO: 36236 - DNA, 258 bp, Setaria italica
  Peptide Sequence Number=SeqID_102210
tttgagttacttttacgctgtatagaattcaaatgatagtgctagtgcacaagtctcctttacattgtgattcttttttcttttacacaagagtgacacctaatgcacaatgaacaataatacataggaacaagaaacattcgttcgaatggggaaagtaaaccgcttaacaacattttgatcacctcatgtgaaacttacagacttgcttgcttagatagagatggccacatggggcagaagctccataccagatag

SEQ ID NO: 36237 - DNA, 530 bp, Setaria italica
  Peptide Sequence Number=SeqID_102211
atccggtggtccagataccatgatcatagcttcattcccctcagaaggtgggtcgtagacggcaatgtctgcaccggagagctgaattcacatggacagtaaaaatgtcacgaaatcacaaaagtaatggtttaggatggtaaactatatctgggttacagagagtagagaattcagccgtgttataacacttccaagacgacaataagaaatcataattagataatggaacaggtggcacagagatgcaggaaattggtatataaaaagaatagatcagattagtaccaaccaaattttgaagcaagcagatataaggtggtagtaacagctaagtactccttcagttccaaattgtaacaggttttggcttaactatatatctagacacaacgtatatttaggtgcatagcaaaagctatgaatctagaaaagccaaaacaccttacaatttgagattgaggcagcagttttctactcatgggtcatattttgtaaatcaagttgcccaatacatctcatggttcaac

SEQ ID NO: 36238 - DNA, 321 bp, Setaria italica
  Peptide Sequence Number=SeqID_102212
gggcgggccgcctcctccccagcagcaggacgtccgcccaccaccaacgacagccagcctcctcccgcagcaggacgtccgcggtccgcccacacccaacgccggcccgcctactcctgccggacgtgagctttccagaatccacgacgtcgactcgtctgcggccatccggaattccggattccgccccccacgacgctcgacttgtctgctgccacccgaattccgtcccccacggcgcaatcctgttgcccaatccgaggtgccatgctagcacaataatgcagtgaagttgtgccatgaagtaaatgtgccagtgca

SEQ ID NO: 36239 - DNA, 1157 bp, Setaria italica
  Peptide Sequence Number=SeqID_102213
ttttttttccctagtttcgtaactttctaaacttctattactatttggtttacagaacttacggttaggtttacatacattggctaaaattgcctaactcaaagctcgcactattggcaactgaaaattggctatgttacagaagtttgaaattttaaaaacacaaagggaaagattggttcaaagcatcctcgtggtgttcccgactctgcattcacatgtacatatgctccttgactctctaaccacacgttgagaacgtcggatgtgcaacttgatgtttaacagtttaccagcaatcattctccatgtaaggtcttctggtccaagaggttgagcaggacttgaatacagaaaatgccttgaaaacttcacaagattagattgcatttctctgatccttttggcatcgattcttcttaggtaattcatgagccagccaggttgcaaagcatcagttgatgaaacaaataatgctatctccctatagtcaagtattccttcaaaaggaagctccagttcatcacttattataactgggatacatccactaacaattgcatcaaacaggcgagcagaagatggggtatctccagctggactcaggcaaaagagagacttgcgcatgccatcctgagctgctgtttttccctgagctccagcagaaccttcttctataactatgccttctgcaccttttagttcctccacaagcttactgcggatcttccctccagcatttctctttagccttcctcgaaagaacagcaatatacttcttttggattgagtttcggatacacacttcgaatcacaaagatcaacatttggaacatatggaaggatgacatccttttccagatacacctgtcctggtttataccagttgccggttgaatccatatcaggtagaagccatattgccttcttcacaaaactccgtactgacttaaatgaccatgggtggtgaacaggaatgacatgatctctgccttctgaacgttgccaagctggctgattagtcacccactttaaagcttccttaagagatgctcccacaccctataaagtgctttgcattcttgtttctccagcaagaagtaactgattgttgtgaagaatggcacatagaaaatgtctgcttcttcttgccgctg

SEQ ID NO: 36240 - DNA, 437 bp, Setaria italica
  Peptide Sequence Number=SeqID_102214
tttttttttttttttttttttttttttaagtacaccatcatctcgagacatatatgcatcagcaagcttacaacaagcctcatagaaaccatcatctcgagccatatatgcatcatgccagcttacaatacaagcctcacaggaggaacatgttgacataaaaggaagaactttagagcttcagaacaacccttttcaatctggaaaaaagacactccctattttgtacagacaattcgatcacaagctacattccacagccattcatcaatttttggttgtattacaattcgctgcaccacactgctgtagctgccacaagctgcgatctggtgcagcaaccaccaaaattatgttctaacctcctatatttctcatctggaggcctattggtacctagtaaatttcttaagttatttacttaggttatttggttc

SEQ ID NO: 36241 - DNA, 436 bp, Setaria italica
  Peptide Sequence Number=SeqID_102215
gataatagctccatagtcatggcgatgtctgataacacgtccaacagcctgattcacagcccttgctgcttgttgtgtataccattcctgtcctgtcaacatctttgtgttattattagatgctgcgccctgcttatccaaatactcacgcttcagccgaaccttaggatcagttggggtagcaaagggcattccagtaactattactgccctcccagcacggtcagcaaaatcaagaccctcactaactttgccacgacaaactgcaaaaaatattgccccagaagtagaagaatcatttaatttcgctgcataatcctcaattgcatttggaaagtttgatgactgcctaggctctataactggctgcttgtgcttacagattcgctgccatatcgtgttctcagctgctgaacttgaatggttcctatttttt

SEQ ID NO: 36242 - DNA, 795 bp, Setaria italica
  misc_feature (1)..(68): n is a, c, g, or t
  Peptide Sequence Number=SeqID_102216
nnnnnnnnnnnnnnnnnnnnnnnnnnnnnnnnnnnnnnnnnnnnnnnnnnnnnnnnnnnnnnnnnnnnacctttatcctctccgaacgaaacgagggaggagaactcactacattgctagaccacgccacctataggcctatacaaaacgcacgcaaaaaagctgaaaagaaaaaattgctcgcatacatgacgaacaggaactaatcaaataacttctctccagctcttgatttcgttccatttcgccttttccggggaggctttttgacggcgaacttttcttcaccgggagaagacggggttcagggttttggtgagcccgtggagggcgccgtagccgcgggagctgaagcccaggcagcccaggaggccctgccggtaggggaggaacgtgcgccgccgcatctcctccgcctgcgcacggttcggcgccgcgtagagcctctcgtgcgccgccgccaccgtcgttgagcgccgcctgcgccccctgccctgaccccgcggacgggcgtcctcgccgccgtgaccgccagcggcctccgttgctggtggtgcgcgagaggggcggagcctggcggcgagcctgtccctggccgcccaggagggcgagaacggccacgctcgctcgggtttggtggcaccggcggatgcggtcgtggggccgtcgtgcgcgtgggcgctgttgccgggctcgctcctgctgcggtggaggagcatgtccttgatgaagacccaccgccgggacccgcgggccgatgacgcggccgacgaggacgaggacgtggaggaggac

SEQ ID NO: 36243 - DNA, 1459 bp, Setaria italica
  Peptide Sequence Number=SeqID_102217
ggctacgccagccgccgcgagctcgcgcgccggctcgagtccctcgcggcgcgggaggtcgagctggtggccgcgctctgcgagggcgaccggagcgcgccgctcgccgagctgaccgcctccgggggcgtgctcccgcgggagcgcagcgggtcggaggtctggcagctgcccgggagcgccgccgccgtggtgtgccaggccagcgaggccagcctgctcccgcgcctcgcggcatgggacaagtccgaggcgctcgccgcccggatcatgtacgccgttgagggccagatgcagggctgcgccttcacgctcggcctcggcgagcccaacctcgccggcaagccggtgctcgagtacgaccgcgtcgtgcgcccgcacgacctgcacgcgctcaagcccaagcctgcgccggagcccaggtccggctatcgcaaccgggagaacgagacgctcgtcaccatgtaccagatactcgagtcctggctgtgcgcggcgtcccagctcctcgcccgcctgaacgaacggatcgaagccaaggactgggaggcggcggcgagcgactgctggatcctggagcgcgtgtggaagctgctcgccgacgtcgaggacctccacctgctgatggaccccgacgacttcctgcggctcaagagccagctcgcggttcgggcggctccggggtccgaagcgtcgttctgcttcaggtccagggcgctactgcacgtcgcgaacaccaccagagacctcaagaagcgtgtgccctgggtgctcggcgtcgaggtggaccccaacggcggcccgcgggtgcaggaggcggccatgaggctctaccacagccggaggcgcggcgagggcgaggaggcaggcaaggtggagctgctccaggcattccaggccgtggaggcagccgtgaggaggttcttcttcgcgtaccggcagctggtggcggcggtgatgggcacggcggaggcgtcgggcaaccgggcgctgttcgtgccggcggaggggatggacccgctcgcgcagatgttcctcgagccgccatactaccccagcctggacgcggccaagacgttcttggcggactactgggctcagcagatggcgggggtctctgctcagtcccagcaaagctgaaacgacgagatggcgcggctggacagagtgaccggatcgcagttttgcaggcccgaatgcttcctaatttcggtggtgtgatagagtgtggttcatttcatatatagggattgtgtactacgtgtagcaccagattctcttatctttgtgccctgcgttgtgttgtcttgtaccgagagagattgattcagttagatgccatttgtaactctaggcaagcatttcaattgaaatcgtgtatatatcgcactttgtaaatacgttttagatagtttcaggaattgactgagagattgactgagtgttgttgatcgaaaaa

SEQ ID NO: 36244 - DNA, 849 bp, Setaria italica
  Peptide Sequence Number=SeqID_102218
aggacatccaattcttcagaaccatgaggttgttcgtgcaacagaaaattaatgacaagttttagttccattgttacccaacaggatatgcacgctgtaatgctggcgatacaggcgagggagggcagctcaaccaactcatccacatcaattaagtgcctctcgtagtggtcccaagatctctgcacttgcagtggagaaatagggagaattaaccttggataggagcataaagagactcacagtttcatctttgccgccctccgcatactgaggctgggtgtcaagtgtgtaaataacctcggtgcatggcatctatcagcatgcccaatagctgaactcactaacgatgacctgcgcccggaggagagcccgtggttggttgtcccccacggccaacactggcaggttcgagcacttgttgatgataaaatttatggagagtcatcagctcacccaggactgcagaaaggaaacttttcatatgggactctctccctcctcaggaagacaacgctgagcattagggattagcacatgctccaaaaaaatcagaataatgtatcttgagtcctccgtcgttccaacactgcttctgaagagtgcagtgatgattctctaactgacataagaatatgaacaattcaaaagacaatcaatactcatgtatgcctacggatgttattcaaccattcagatctgcaacgttactgtccgatcagaaactatgcgcagctaccctttgaacgttccatgtgttttcttctgtatgtgaactaaaaatatctgcagccatcaaaggctggaaagacttattcctaatcctagctacgaattttgaaggatttc

SEQ ID NO: 36245 - DNA, 130 bp, Setaria italica
  Peptide Sequence Number=SeqID_102219
agtaggagtttgtatgctgtccaataatagccaattgtcgggtaggtgatgaatgtatagagtattgcttggattgctgcttgtttcagtaaccccaaatgttcaagttgccacaatactgggaacattt

SEQ ID NO: 36246 - DNA, 1075 bp, Setaria italica
  Peptide Sequence Number=SeqID_102220
cctttgataccctctaggactatctgattcttactctatataagaatctagtgctatatatagaactgctagcctaatcctcctgagagctcctaatggcctcttataagtcttggatgagaccttgcgtgttgactattggcttccaaacccttgtttatgtagtactctccaagaccctcgtacatgcaaataggtgtcctattcctagtaggattcaacactcaattcctagcataattaggagtcctaatagtacacccttattgagtccaagtccaagtagaatttgagtcaccatacaacatccatcctgattctaatccaaagtaagttatgtatccaaattggtctgcttcagccattaattagtaaagaacaatggataagatggatagagtaataatttctaaatattttatagaataacacaagatggaatcacttttgcacaagttcctttcttgaacaagaggattgagcatatttcataggcataccatttcatacatggaatttgtttaccgcttttggaagttcaacttttcaactgagagagtgtaaaggataatcactacaatagggaatgcagtgataactgtagctactatgcttagcctgtcttgatgaaacccgaaataatcattcaagaaaacagcaacagttttggtttctccaaatacattgacctccttgcctatgtttccgtactgggaggtcaattgggcattgagtatccaagatgtagggccaaggtaatacaaccagatccaccactttggcatttgatgtgcaggtaaaataaaccctgagaatagtgtctgcattgtgttgaaaaatgttcccagtattgtggcaacttgaacatttggggttactgaaacaagcagcaatccaacatatatataagaaagaactgagcaaaagatggcgtagaagaacagtaggagtttgtatgctgtccaataatagccaattgtcgggtaggtgatgaatgtatagagtattgcttggatgaagacataagggatctctattgcagcctgtgctaatgagtacgcccaggaagagtaca

SEQ ID NO: 36247 - DNA, 4273 bp, Setaria italica
  Peptide Sequence Number=SeqID_102221
aatgcaatttcactgattgtagagatggggttctctcgtgccagggctgaagaagcattgagacaagttgggacgaacagtgttgaaatagcaaccgattggttattctcacacccagaggaaccacaagaggaggatgatgaacttgctcgggcacttgcaatgtctcttggtaattctgatacatctgcacaggaggaagatagtaggtccaatgatcttgagctggaagaagaaacagttcagctgcctcccatagatgaaatattatattcatgtcttcgacttcttcagacaaaggaagcattagcttttcctgtcagggacatgcttgtcactatcagcacacagaatgatggccaaaatcgagagaaggtgcttacatatttgattgagaatctgaaacagtgtgtgatggcttctgagtctttaaaggatactacattgtctgctctttttcatgttcttgctttgattctccatggagatactgctgcccgtgaagttgcctcaaaggcaggtcttgtgaaggttgctttagatctgcttttcagctgggagttggaacctagggaaagtgagatgactgaggttccaaattgggtaacttcctgttttctttctgttgatcgaatgctccagttggaaccgaagttaccagatgttacagagctagatgtcctgaaaaaggataattctaatgcaaaaacatcacttgtgattgatgacagtaagaaaaaagattcagaatctttgtcaagtgtagggctattggacctggaggaccagaagcaacttttgaagatctgttgcaagtgcattgaaaaacagttgccttctgcttctatgcatgctattcttcagctctgtgctacattgacgaaagttcatgcagctgcaatttgttttcttgagtctggtggtctgaatgcgttgctgtcattgccgacaagtagcttcttttctggattcaacagtgtggcttctacaatcattcgtcatattttggaggatcctcacacccttcagcaagcaatggaattagagatacgtcacagtcttgtcacagctgctaatcggcatgcaaatcccagggtcaccccacgcaattttgtccagaatttagcatttgttgtatatcgggacccagtgatatttatgaaagcggcccaagctgtgtgccagattgagatggttggagatagaccatatgttgttcttttgaaggatcgtgagaaagaaaggagcaaggagaaagataaggacaagtcagctgataaggataaagcaacaggtgcagtcacgaaggtaacatcaggggacatagctgcaggatctcctgcaagtgctcaagggaaacagcctgatttgagtgcacggaatgtgaaacctcaccgcaagccaccacaaagctttgtcactgttatagagcatctcttagatctggtcatatcctttgttccaccaccccgatcagaggatcaagctgatgtttctggtactgcctcatcttcagacatggatattgactgcagttctgcaaaagggaaggggaaagctgtggctgtagcgcctgaagagagcaagcatgctgcccaagaggctactgcatcccttgccaaaagtgcatttgtccttaagctgctgacagatgtattgttaacttatgcatcatccattcaagttgttcttcgtcatgatgctgacctgagcagcatgcatggccctaatcgaccaagtgctggtctagtcagtggtggaatctttaatcatatcttgcagcatttccttcctcatgctgtaaagcaaaagaaagataggaaaactgatggagattggaggtataaattagcaacaagggctaatcaatttttggtggcttcatctattcgttctgcggagggccggaaaaggattttttctgaaatctgcaatatatttcttgatttcactgactcttctacggcttacaaagctccagtgtcaaggttgaatgcgtatgttgatttgctgaatgatattctgtcagcccgctcaccaactggctcctctctatcagcagaatctgcagttacatttgttgaagttggacttgttcaatcgttatcgagaacccttcaagttcttgacttggatcaccctgattcagcgaagattgtttctgctattgtgaaggccctggaagtggtcactaaggaacatgttcattcagcagatcttaatgcaaaaggagacaactcgtcaaagattgcctctgacagcaacaatgtggatttatcatctaataggttccaggctcttgacacaacttctcagcccacagaaatgattactgatgacagggaaacatttaatgctgtccaaacttcacaaagttcagattcagtagaagatgagatggatcatgatcgtgatatggatggaggttttgctcgtgatggtgaagatgattttatgcatgagatggctgaagatggaactggcaatgaatccacaatggaaatcagatttgaaattccacgcaatagagaggatgatatggctgatgacgatgaagacactgatgaagatatgtcagcagatgatggtgaagaggttgatgaagatgatgaggatgaagatgatgatgaggagaataacaatcttgaggaagatgatgcccatcagatgtctcatcctgacacagatcaggatgatcgtgaaatggatgaagaagaatttgatgaggacctgttagaagatgatgatgaagacgaggatgaggaaggagtcatccttcgcctggaggaggggattaatgggattaatgtgtttgaccatattgaagtttttggtgggagcaacaatttgtctggggatacactgcgtgtgatgcctctggacattttcggtacaagaaggcaaggccgaagtacctccatatacaatcttcttggcagagcaagtgatcacggtgttctggatcacccgcttcttgaagagccttcttcgatgttgaaccttccgcatcaagggcaaccagaaaatctggttgagatggctttctctgatcgaaaccatgaaagtagctcctcccgtttggatgctatattccgcagcttgcgaagtgggcggaatggacaccgttttaatatgtggctggatgacagtccgcaacgcagtggatctgctgcccctgcagtacctgaaggcattgaagaattgcttatatctcatttgaggcggcccactcctgaacagcctgatgaccagagaacacctgctggtggtactcaagaaaatgaccagcccaccaatgtatcggaagctgaggcaagggaagaagcaccagctgaacaaaatgagaacaatgaaaatacagtaaatcctgtggatgtcttagaaaatgctggccctgcacctcctgacagtgatgcacttcaaagagatgtgtccaatgcaagtgagcatgctacagagatgcagtatgagcgtagtgatgctgtggtacgtgatgtggaagcagtcagccaagcaagcagtggcagtggtgccactttaggggagagcctcagaagtttggaggttgaaataggaagtgttgaagggcatgatgatggtgaccggcatggggcttcaggcgcttcagatcggctacctttgggtgatatgcaagcaactgctcgatcacggaggccatctggaagtgcggtccaagtaggtggcagagatatatctctggagagtgttagtgaggttcctcaaaattcaaaccaagaacctgatcaaaatgctaatgaggggaatcaggagcctgctagagcagcagatgctgactcaattgatcctacatttttggaggctcttcctgaagacttacgagctgaagttctttcttcacgtcaaaatcaagtggctcagacttctaatgaccaacctcagaatgatggagatattgatcctgaattccttgctgcatcccccctgatatacgagaagaggtgctagctcaacaacgtgcccaaaggttgcaacaacaatcacaagaattagaaggacagccagttgaaatggatgccgtttcaattattgcaacattcccctcagaaattcgtgaagaggtgcttttgacatctccggacacactactagctacactcacacctgcactagttgctgaagccaacatgttaagggagagatttgctcatcggtatcacagtagctccctttttggtatgaactccaggaacaggagaggtgaatcctcccgacgtgaaataatggcagccgc

SEQ ID NO: 36248 - DNA, 554 bp, Setaria italica
  Peptide Sequence Number=SeqID_102222
cagacttagctatttgaggataaagcatgtgtgatagattctgatgttccaggaggccagtaaaaaaataacgccataaacctacagcaacccaaaaagaagctaaaaagcttacagcatacaaattctcgatgacgaagatcgtaagagcacacctgcctgtttaaagtcaaaaaagggcatccagacgacattatattccaataattctttgacaagccaattttaagttacagaaacctgggtaaaaacattattcagtgaggaatgttgtcatctgcgctcttgaacggcaaaatgaaataaaaatagaaggtactgtctcacacagccctggagggaaaagcaacaggacacatacccatagctacatgaaagaaaagcccaaaatcattgaagacaagcatgatgcattacagattaacaagtcaatgtgttagttgaaaactcaaaagtgtcaagtaaaaaaagtggattgtattctttactgccacagtataaatctatgaacaccaaacttctttgcttgtgctttactccggattcatttcttg

SEQ ID NO: 36249 - DNA, 534 bp, Setaria italica
  Peptide Sequence Number=SeqID_102223
gagtgagggacattgtaaaagttattacatccacaccatcccgcatgcagattttcaacacaatagtgcagaatttaggcctcaaagcaaagtcaggactgattctggatgttccgcaccgttggaatgctacgtatgatatgttgcatgatgctttgaaatataaggtggctctcaacagatacgcggtagagcaacatcaccaagttccaagtcaagatgaatgggcaaaagttaaagcccttcatggttttttgcaacagtttagtgaggcaactaaagcattcttcgcagacaggcatcctacagcccaccttttcttgaagatgttgctagcaatccgagatgttttgctcgaggaggtgtggaattcaaatgagctccttaatgaaatagctaatgccatgcatgcaaagtttgaaaagcactggacaaaacctgatcttgctcttctaatagctgtcgttcttgatccaagtatgaaaactgactttatcaagttctatttctatactgttggtgaaaatgttaaag

SEQ ID NO: 36250 - DNA, 627 bp, Setaria italica
  Peptide Sequence Number=SeqID_102224
caaagcacttgtacaaggctatacaggtatctcttcagaaataatctcaactatatactcacgataatctgaatattgttttgctatatggaggcatgagctcgatcatgtggttagggtaagctgtgccgtgaattcaacaaactataattagtgcttggttgcattttgacccgctttgaggattccaaaagtctgacaagtgacgggagaggtcgtggaacagggatattccttgacctgtaaagcctcttcaaacttggattcaaacatttggatgatccaaaaatgcacaagggttccttttcacaagtagttgtttctccacttctgaccaaggaaaggctggagtcttcggaagaacttaatgcgtttgactctattgcagcttcaaacttttcatgctgatcagcaagcactaatatattgcgatgaacagtggacaatgactgagcttgagatccttctaactgtcttgacgataattcatgctgacaggagcccatctcatctccagcatcaatgtgatcctgatgggaggctggtgcttccttaacaacacaatccgctgcagaatttgtctcactgtcttcactattactatgaaccgaatccgccagtgcacat

SEQ ID NO: 36251 - DNA, 1264 bp, Setaria italica
  Peptide Sequence Number=SeqID_102225
aagtgcttcctcaagctaccaagcaaggaatcagcaatccagcaggttgccctttcttctgagattagatatgttactattgtgatgacaaacagggataattacgattgagaaatgattcagtgattgcaggttatagcgtgcatatggaagcatccacatgcaccttttgtttaccttgcttgtgaccttcttgggcatgaagatgtcctaattgaggtgtcaaggacattcggatcaaagatttatgttgacaggagattggattgttttaaagcactatcgctcacagcccctgaaatcattactgatgatccatcttctcgctttcagatggttggattccatcaattatatgaaaaagcaagtaggaagcttgaagaggcaagggcaagactccagccagaacccttgtttattcgtccatcaacccagtggtatgcaatctgtgctcgaagccagaaacccagcctaactgaagctgagcaggatgagtacggagtctggcatatttgtttctccattcactcctctcgtgatgagttggagcaggcgctgcaacttctgcaacctcagtgggtcatttcaacaactcccccgtgctttgcccttgagctcagctatgtaaagaaacattgtttcaagacccgcttgacagctgatgatccgttgtggaaaatattcggagatcctcttcaaaagtctatatcgtctccttcttcagtgcttgcttcttctgaaacacacacagataaagatcactcagattttgttgacgaggatgatcattcatcgtcctccagtgaagaatgtacatatttagacatcagtgccattgaacttaaatttgtgccatcccctccacctgaggaaccagacattacattgttcggaagagccaggtttggatctcaagcaattgacataatgaaagaagagttatgcagccaatacattgcctttgaaggaggatatcttgaagaagctagggcatgtgcactggcggattcggttcatagtaatagtgaagacagtgagacaaattctgcagcggattgtgttgttaaggaagcaccagcctcccatcaggatcacattgatgctggagatgagatgggctcctgtcagcatgaattatcgtcaagacagttagaaggatctcaagctcagtcattgtccactgttcatcgcaatatattagtgcttgctgatcagcatgaaaagtttgaaagctgcaatagagtcaaaacgctatttaagtttc

SEQ ID NO: 36252 - DNA, 288 bp, Setaria italica
  Peptide Sequence Number=SeqID_102226
aactttaacaaatatagcagataacctccatgtatgtggccagtacatgaggtgacgtaacatgtcatatttatggagtcaaaacatacgcatgattgatctttctgttaatgttgctgtatacaacgtgatagtttaaatagcttgcgaattggatatttggttacttggttcaaaagatagctatttgaatcttatataggaatccaattagacaatgggaaagacaacgagagctgcatttgatgcatggcttgcacgtgttcagtagggcatttgaagaaaagt

SEQ ID NO: 36253 - DNA, 369 bp, Setaria italica
  Peptide Sequence Number=SeqID_102227
cggcggtgacctctccggcggcggcgagcagtgccgccgcggccgccacggagggcgagaactccgccatcttgacctcgggctgggtgcggaggaggatgtcgacggcgcgcgccttgacggcggcgacctgtagcgggtgccgcggcggcgggtagcaggcggagatgaagaagccgaggaaggcgagcggcgtgacggagcgcgcgcgccactccagcgcgtccagcagtacgcgctccatgcgacggacggtcaccgcgtcgaacatgaactcctcgtccctctggatgtcggcgatggagaaggctgcgacgcgctgcatcttggcggcgagggaaaggcagctgatggcgagcaggcgcggcg

SEQ ID NO: 36254 - DNA, 473 bp, Setaria italica
  misc_feature (64)..(64): n is a, c, g, or t
  Peptide Sequence Number=SeqID_102228
gtttctacttattcagaggcaggttaatattcttttttgtaaatgtcgctttgttgttattacnggaatctgaattaagacgaactttagtgtgatgtctttcctgagattgttacctcaaagactgaggtagtctttgaggcaggtggagcaagatgttgagactgtaatccatgttctccagccaggtccaataggaatcgtggagcacaaattcacagacgtggagatccttgaggccagggccacagtaaaaagagcagtggataattggcaaaggaactgggcccttgagagaaatcttggtagtggttcttttgataaatggaagaagtgatatagccctcaattaatcaattcctcatgactcccagctgcagtacttgaaataaaagggtgccatgggctatggctggccccaaccgttgccactcaatagttgatttgtttattccctttacgaattcatggaa

SEQ ID NO: 36255 - DNA, 360 bp, Setaria italica
  Peptide Sequence Number=SeqID_102229
tcttctactttgtttccggtaatgaaaataaaggaactgaagaataatctgtcaagtacggttaaggggttcttcctcagtagtacagttcaaatatttagtgcagaatatagatttgttcgcgtgacgtcctttttcttaaacaaggatagatatgaaaaaatggcagtctattacttcgcaaagggccagtcattttctgtaagccacatccttcactctcaagcgttgttttatatttttactcacactaagattaaaaggtagctagaaacagcttgatgctcagagtagaacaggtgaaaaggatacaaaagaatccaagatgacgcatcctccagcatctacaagccaaggaca

SEQ ID NO: 36256 - DNA, 600 bp, Setaria italica
  Peptide Sequence Number=SeqID_102230
ccaactgcacccatgctatgtgcctcagatgttaccaggactggtatgcacgaaatttcagtttctgcccatgccttttgcgtgactgcattgagcgttgtattcccaattgcttaaacttttactgctgtgcaagtgcaacattcttgcgttatcttcccaattaacaagctttttagctggatgattcaagtatattctgtgtcttgataatatttgaagcttgagggcctgctaagcatgagctgctgagaatggttctttctgcagataagcttaaacctgtctttctagttctttcaccaacttatatgcttataaacaagactaagaccctccatgcttatggtgtctgtacaaggttaacctctcttgtaaggaagcccctggggttgaatggccagtagctgaacagaacataatgctctgtgaagcatgtttgtattgatttatatgttgtcccgatgtcattctgaaaatgaagtgatcattagaaagtagcattgcgatattcaggtaattttgccaactactgttaagtatgctaaatgtgctgattcgcacctgattcttttaactatgttctcccattccttcatt

SEQ ID NO: 36257 - DNA, 629 bp, Setaria italica
  Peptide Sequence Number=SeqID_102231
tcttcttcttgaaaagaatagtcttcaagtgacttcccacggggtagtgagttcggtgcccatgaatggtcatctttgtgcttctccaggacattcaacacctcagaatgaatcaatgccaaatagtactggagaaacagtggacaatcaagaagtcctatctgagatgatggattctgatggtcatcttaatacacgtgtgtttggtgcaagtgctggtgatgcccatgatatgctttccattgcagagctaagaaagaatatggcttcagctcgcagaagcagttctgtccaacagatacagaaaaaagtgctctctgtcaagacactcaaggtgaagaaaggcatatcaaaaagtaaagggaccaaaacacaccctattctggaacttgaggggaaaaatgatgcctcagataacattcagttgaaagggaacatcgatttctcaagcactgtcattgtctgtggtttgaacgcctctgtggaagaccaaactaataaaacaccagataggcgggtgacaagacagactattaggggtccaagttcaaaggtgcttacctgtaagaaattggctaaacggaaaggacccagagaactgtgtagtccacttagctcactggatgtga

SEQ ID NO: 36258 - DNA, 672 bp, Setaria italica
  Peptide Sequence Number=SeqID_102232
gcgttcttgaatcctagtaagctcacaacctatctgcggagggaagtgggtggtgatggggcttcttgggggtttcttgctcttcttgttgcttgcttcccctgcacttggccagctgccttcgcaggacatcctcgcgctcctcgccttcaagaaggggatcacgcatgacccttctggctacatcaccgactcctggaatgacgagtccatcgacttcaatggatgcccggcgtcctggaatggcattgtgtgcaatggcgcgagcgtcgccggggtcgtgcttgatggccatgggatctctggtaatgctgacatctctgtgttcgctaacctcaccatgcttgtgaagctctctatggccaacaacaacctctctgggagcctcccgagcaatgtaggcagtctgaaaagcttgaaattcatggatatctcgaacaatcagttctctgggccaatccctgaagatattggcaatcttcggagcctgcagaacctgtcacttgctggcaacaacttttcagggccgctgccggactccatcgacgggcttatgtcacttcagtcgctggatgtgagcggcaactctttgtctggcccattgcctgcaggcttgaaggtctgaagagcttggttgcgctgaacctgtcacacaatgccttcacgtaaacg

SEQ ID NO: 36259 - DNA, 217 bp, Setaria italica
  Peptide Sequence Number=SeqID_102233
tattctaacctggtgattggtctatttgctgttgttgcgattgagagcagtagccagagacttggccggacatatgctgtccttctcttcttcgctgtcgtccttgatgttgcttggtttatactcttctcacatgctatctggactattactcctgatgagaagtatggcgaactttttgtttctcactcagattagcattatggatgacaaatca

SEQ ID NO: 36260 - DNA, 274 bp, Setaria italica
  Peptide Sequence Number=SeqID_102234
cgcgccgccaatgccgctcctcggccggctccccacgcgcgcccgcccgccgccgctcttcctctgcagcttcgccgcagccgacgacgcccaggtcccctcgcccgccgctgccgtcgcaggcgcagccccgggggaggacaaccgccgccgcatcaccgagatcctctcccgcggacgcaaccccatgctcgtcggcgtgggggccgcgtccgcagcagccgacttcgccaccgcgtcgccctaccgcatcctccccgtcggccccaccccg

SEQ ID NO: 36261 - DNA, 392 bp, Setaria italica
  Peptide Sequence Number=SeqID_102235
tgcatgtgttgttggacctacaccaacaaatgctgctcttgtttggattgttgcagactgacttccatcctctgcaatgtattgtcaacccagtgatgacatcttccgctgggaaaccatacttgaccccaatctcatttccccactgtgtgttatgttcgtaagtgcatgttgttagcaactttgctttctcttcaatcttatttatggacagttctcttttttccttattaattcctctgtcccagtcttccttatagtcattggtgaacctcctaccacataagctctcccttctgtggaagcatccagtgccaatatagagaggtccatccacaccgtcgaaacctcttagctccacatgactgagaacagtgaatgagttgccatta

SEQ ID NO: 36262 - DNA, 217 bp, Setaria italica
  Peptide Sequence Number=SeqID_102236
aaactgcatcgcctgcaacgactacgtcgctctcacgcaccctgacctggacaaggaaactgaggaggtcatctcagatgttcttggggtggaagtgttcaggcaaacgattgcaggcaacatcctggttgggagctactgcaccttcacgaacaaaggaggcctcgttcacccgcagacgtcggtggaggacctggacgagctgtcgacgctgctg

SEQ ID NO: 36263 - DNA, 259 bp, Setaria italica
  Peptide Sequence Number=SeqID_102237
gggggcggtgaacgagaagggacgagcacggaggtggcagcaaaactttcttgctctgtagctcgtctcctcagctagtaagccatcatggcccccaccgcgatggccgccacctccgtcgctccattccaggggctcaagtccaccgccggactccccgtcagccgccgctccaccagctccggcttcggcaacgtcagcaacggcgggaggatcaggtgcatgcaggtgtggccgattgggggcaagaagttcgaga

SEQ ID NO: 36264 - DNA, 385 bp, Setaria italica
  Peptide Sequence Number=SeqID_102238
gtcctcatcatcagcaatgaacggctgcttggtctcaatgttatctcactgatatttttcctagatcgtccttcaacaaatactcgcaaaatctctgactttgctaagacaggatctttctccacaaaatgcttcatcagtgagctgtggtccctgaagtcatcctctgagggtctaacatcaaacttgtcgaaaacttttcgaagatggctccacaagttcttctctggctcatcaggcttcctcctgaggaaatgcagcatctgtgccgtgatcagcacagtcctgaccatctcctcgtagctgttcttgggcttcacaaggcgtatcccacccaccaccatccgcaacaagcaccgcgatctcaggctgcttacccctcaaa

SEQ ID NO: 36265 - DNA, 274 bp, Setaria italica
  Peptide Sequence Number=SeqID_102239
ttcgttaccgacatcgaaaccggcctccagcaaggccaggaccgcatgcgagccgatatagccggcaccgccggtcaccaatacttttttcgtcacgatcgatcgccattcacgagcaacgagatcgacccgagcctgggcggcatcggttcccgaagcggtcgaactcaggattccaggatgccgacgctcgataaaaggtaggctcggatttccccggcatccagcgccgggaaaagccaggcgcgggaaacggatgccactgcaccggtca

SEQ ID NO: 36266 - DNA, 216 bp, Setaria italica
  Peptide Sequence Number=SeqID_102240
cagcaatagaatggatcgcaatacatcaacccagacaggcatcaaatggcagtacatcatagccaaaacagaataccaaagcacccagtggctcctgaccatggctagaagaatctgtcttctaaactcatttaccaatcttaagcataatattgacaacatcagcaacaccggtgcttcctcacccgcagaagcacaaatttgtaaagtataatt

SEQ ID NO: 36267 - DNA, 104 bp, Setaria italica
  Peptide Sequence Number=SeqID_102241
tttatgcatgatggactgcagcaggcccgtgctcccatttatgatgttccatttgctacagaagtcctacgtacagggagttacgaggaacgttaaccaaaatg

SEQ ID NO: 36268 - DNA, 435 bp, Setaria italica
  Peptide Sequence Number=SeqID_102242
tcttcgctcgcaagtacgaaaccttcacatcccccttcgtctcgtctccggattccccaaatccacagcccgcaggcgctgcaggatcaggctcctctcggtcggcggccgcctcgtcgtcccgcccgctcgattgggtcgcgtgtgcgataggaagttcgtcatacgcctcgcggtttttctagttcctgttctgatttgtgtgcgcttaaattttcgttccgattgatcgatctgcttaggtacgtgaggttgttttgattgctcgtgggtgcgcgtagatgatgatgaactgataatgtctaattgttctgattttggatatggtgactaattgctcgacttgattgcggattgtgatgactgattgtttgatttattttggtatatacggtggaatatcagtacatttggcgcttgattgattgtgcgagc

SEQ ID NO: 36269 - DNA, 384 bp, Setaria italica
  Peptide Sequence Number=SeqID_102243
gccttcgcccctgcctgacggtgtgacgtgccgttgccagtactcggccgtcaccgccgtcctcccgctcgcccgccttggcctcccgccttgtcgtccccggcgccacgcctgcggcttgttgtcgccgctcatcccgccgcccgccagatctcccacctgcctgcaccgacgaccgccggatcgcccgcccgcgccgacatccgctggcccgccgacgcccgctggaccgcccgtgtgcttgccgtccgtccgcccgtgctcgtttggttaaaacgagtctgagcctctaaggatgagggctctagtaaaaaaagaaaagaaagaaaaaaaacaaaaaaacgcttgcgccattgttcctctgcgctctcgccgtcgcccgcc

SEQ ID NO: 36270 - DNA, 370 bp, Setaria italica
  Peptide Sequence Number=SeqID_102244
aacgaatgatcaatgggcgccctttgcctacatatacattgccctgagcttgcacatgagccacaagtcacacaacgccgctgccgccccggcggcggcggccatcgcctcccgccagttgatgaggatggccgtggcggcgtagtgcgtgagcgcaccgacgagcacgagcacgtggaagatctggtggctgtgcccgacgcagtcgaacctgcccggcctccacctctccggcaccctgctgacgtagaacccggcgccggcggcgtagacgagccccatgacgagctcgagcgcgagggcgaggtggcactcgcggtgcgcccagttgatcgccagcgcgtgctagtcgtccggtcttacggttctt

SEQ ID NO: 36271 - DNA, 399 bp, Setaria italica
  Peptide Sequence Number=SeqID_102245
agcgcgcggacacggtcgggtcctcgccgggggtctcctgcccccggccccaccgcgggtcacggaagatgttgacgttcggggaccagaaggtgagccccgcctgcccgccgtcgttcatggcgcgcgcctcgtcggaaaccgcccgcccaatgagctcccagagcgaggcgttgagcgccgcggcggtgccgatgacctgcgggaacgcgcagcccaaccgcacgcccggacccgtgaccgacacgccgtgcagcgcccccgacaaccactcgtacccggccacgcccagccggggcaccccggccgcgttgttcaccagcagccgcaccttctcggcgcgggtgagccgggacacgaagtcgcgggcgcgggcccgcagcggcagcgaccgacggc

SEQ ID NO: 36272 - DNA, 652 bp, Setaria italica
  Peptide Sequence Number=SeqID_102246
tggcggcgtagcgcgcggaacaacggtcgggtcctcgccggggggtctcctgcccccggccccaccgcgggtcacggaagatgttgacgttcggggaccagaaggtgagccccgcctgcccgccgtcgttcatggcgcgcgcctcgtcggaaaccgcctgcagaaatggaatgataaaacataaaaagtgttctttttttttccttggtcgtcgctcgtcgcgacttcgcgaggcacgagggcgcgggtcccattgggtatctgcatctctgacccgtgtctggccaatcacgtggcgagcgcaagttacgatgcacgccggcgatcgccggcagcggcgcacgtgaaggatcggaagtggcgctcgtgatcgaacaggggactcggcagacatgtttactgctgctgctcgacatgcacaggcagaggacgcaggcgaggcgatgatggttcagacatcagaagcaaggccacttgcaagttgcaacttgctcaagatcttcaagacgaaacagcagatacatgcccaacaattcagaaaaatgtagcagtagagtcgacattttaggctccgtttggattttagttgcttcgagttcctgtcacatcgaatgtttagatactaattaggagtactagtccatcaatccgt

SEQ ID NO: 36273 - DNA, 453 bp, Setaria italica
  Peptide Sequence Number=SeqID_102247
ttgacctgtgacagagcaaattctacaattggctttacatctcttgctccttgataatcaactggaggtttaccaggggcaaacacctttatagttggaaatcccctgattccatattcctgcgctagagcctggtgcgcatcggcatcgagggccgcgaccctcgcgacgcccttgagcacgccggcggccttctcccaggcgggagccagctgcttgcagtgcccgcaccacggcgcgaagaactcaaccagcaccacgccgttcgcttctagcaccttggatttgaagttgttggggttgagctggaggacgggggagcccgcggagtagagtgcggcggccggggaggcggccgcggcggcgaggaggaagagcgccgcgaggacggcgggacgcatggcggagccgcgaagcttctggaagcgggggaggggaggagacagaccgtag

SEQ ID NO: 36274 - DNA, 1048 bp, Setaria italica
  Peptide Sequence Number=SeqID_102248
ctcgatgatttcatcgtgctggaaggcactacgtagtggagcgtatgcgcctttcttcacgttgagagcaaccatggcgggatagccatagccacccactccaacctggttctcaagatcagcttgcttaccagcagctgtccagacaaaactgtatggactctttttgaacttctcggcaacagatagcaggagctcaaggtacttgtttcttccttctgcctttgaatcaaggatgtctggaagaaatgatacaaagcaaatggcagcagaagcgcacttctcctccatgacatccgggccagtcaactcagaaacttcagctggaccggagttgacttccaactgctccaatgcaaaggactcaatggcagatgcaactctagccccctggtatgggaatgggctctccttatcagcaccaaataccaaaatagtagggaagccttcaaccttgtacttgctcatcaaggacttttcagcatcacaatcaacatggcctagcttcacttggcccttcaagttcttcgcagcccttttccattcaggtgccaatttcttgcagtgcccacaccatggtgcaaaaaattccacaatccataagtccttgcttttgatgacaagttcatcaaaattacgtgaatttagttcaactgacgcacttggttcatttttctcacttgaacctccagatgccttgccacttgaacctccagatgccttaccattcaacctatctctaagaagggccttgacctgtgacagagcaaattctacaattggctttacatctcttgctccttgataatcaactggaggtttaccaggggcaaacacctttatagttggaaatcccctgattccatattcctgcgctagagcctggtgcgcatcggcatcgagggccgcgaccctcgcgagcccttgagcacgccgtagtcccccttggttattgggtaattgggtcttcttcctttatttcttagttcttaccttaaatttaccttaaaatttagtttagggttaagtaccttttacttaaacctta

SEQ ID NO: 36275 - DNA, 813 bp, Setaria italica
  Peptide Sequence Number=SeqID_102249
ttttttttaaaaacgttgtgaacagaggaagtactccatgcatcaatccaatgggagcatcagagcatgttctgatgggaaccgtttgttgcggcaagcaaccaccgcagaactaactttatttcagggacaaaaaggaaaaagaaaaggggggcgcctctcacatcagttctctttaattaaaaaccgctctagcatccaatataactgacaataagcccactaaaaatcgtacacttcaaagaaaacaagtaaaacgtcagagttcctcagatttacagcctggctaatcggcaccctgatgacagatcagttccaaaatcatcagaatcacaactcatcatttactggggagctttcgcccatgagctcgtcaagggagaactcatcctctacaatttcctctccatccttgccgtcccatggctcggatggaactactgtcggggaaccgttcaggggaagatttccctttccaccgcgccctgcttccttcacaaactcgatgatttcatcgtgctggaaggcactacgtagtggagcgtatgcgcctttcttcacgttgagagcaaccatggcgggatagccatagccacccactccaacctggttctcaagatcagcttgcttaccagcagctgtccagacaaaactgtatggactctttttgaacttctcggcaacagatagcaggagctcaaggtacttgtttcttccttctgcctttgaatcaaggatgtctggaagaaatgatacaaagcaaatggcagcagaagcgcacttctcctccaaggtacttgtttcttccttctg

SEQ ID NO: 36276 - DNA, 783 bp, Setaria italica
  Peptide Sequence Number=SeqID_102250
atgacaacattgctgatacccatggccaatggccaaattttggccaggccacttgggttgcatccaaacatgctccaaataatgcacatccatgaaggccacttgactagcaatcagaggataaacaatagactataaccttttgctgctggacaaaaactaatatttcataacaggaatttaggaatatcaatattggcactgctctacatcaaattaggcagcatataacacataataatctgtaactgtttacaacacaataagaaggtgagggtggaaaattgacatttaatttacgattggggggtaaaaggagaaagatatatctacttcaccatgctctggttggtgtagctacattcaaggagttcatatctaagaaaatcagttgttaacccacattatagaaacggatgaatcaacagatatttttgcctgtacccggggaaaaaggatcagacatacacagatcattgaactaatatctacagttttttatacacaatgaagagctactctggtaaggtcttgccgaaagatgtgcaataagcatttacttaccaacattcgggcagtcttaaaatcatatatcttagtcccgtgaggcacatgttgaactttccaaaaccagtgaaatgagtatcactgaactgaatttgaagtacctgtcagttggtaccatgatgatccctttcgttcgtgctatatttcagggaacaaaatttgcagagctatggtgagaaccacaacagtactaactcctatgttgtttgtattgtt

SEQ ID NO: 36277 - DNA, 796 bp, Setaria italica
  Peptide Sequence Number=SeqID_102251
atcgacgtcgtagtcgtagacgcaaacaccttccctttcctgtcgtaccgacccacgtcaggcgtcgtccgctcactgaagctctcgtacaggtcaggggagtgccggagcagctcgctcgccgacccgtaccccatcagccggtgcagcctgcccaccactttcgtcccgtccatggtgtcgaacgacgtgttcctcgagacgtgaagcggatggtcgtcctccgtcgagtagctgctcagcccgaagccgtcgacgaacggcgcgaacgggtccggctgtcccgcgcagcctccgccgccgtgcagctcggaaccgtccgtgctgaactgatcgagggagtcctggtaagccttcttcctggccgggtccctgtaggagtaggagagcaccgtcgagcaggcgccgcaccgaagcttgcgcaccgtcttggtcgagacggcgaagtcggtgggcacctggaccagcgtgaagcagctggagcagacgatgaacggtgcgcccttcagcaccggccggcagtggttgcgcggtggcaggcgacgcttggcctccttggccgccggcggtggcttccgcggcgcggatggctccggtgctctgggcctgcagcagtgtccccggcagctgccgcactccggcttgccgtggtggcggcagcagccgtggtggcacggccttagctgcacggtgtggcagcacgggtcggctctgcaccggcggtagcgccgtgacggcaatccacggggaggaggcggagcagaaacttggccgtgcttgaccgcacggtggctgt

SEQ ID NO: 36278 - DNA, 382 bp, Setaria italica
  Peptide Sequence Number=SeqID_102252
agccaccttggctccattctctgcaagaggctcagaaactttagaacaacgctgagctggtaataggatcgatgagcaaagcgtatacacatgcacaagctacgattgaagcacgaaccgtaccttggataaccagaggagcaacagaaacaggcaggggtcgagccgctgcggcgcagtggaagaggcagatgaggaggagcagggcaacagccgcgagcggcgaagagatacggctgcaacgcctcatctctgccgtggcttcaacagttgaaactaggctgcgttgtccaagggcgagaggatcggagaagctgcctgtactgcctgcttgaatagagtgagtgagtgctggttggctgctggtgggtttggcctctgg

SEQ ID NO: 36279 - DNA, 676 bp, Setaria italica
  misc_feature (1)..(39): n is a, c, g, or t
  Peptide Sequence Number=SeqID_102253
nnnnnnnnnnnnnnnnnnnnnnnnnnnnnnnnnnnnnnnaataaacctgatcagctttacaatctcatactgcgccgattacaatcaaaagccttgaagaaaatagtggtaacccatgcatgtatatagacgactgagagatgtacaaacgaggtgacggatcggacacacgcgtatactaatcctagagatggatcacggatactaattagtggcagaacttataattaacctagcagaaggtagatgtactagctagatgagattccctgtgtcaactttgcagcatgtactcgtcaccagagactcaagtcccaaccaaccgagatgaggatctgcagctgccggtcctcaccctcacacgtacgtcacacgggttcacggcttgcccttgtgctgggtgtagatgtagtcgaggtgcgcgtcccggagcagccgcctctgcatgcagtcatcgtcgttcccctcctcgcacgccggctcctccgcctcctcctctgctcccatcacctcagcctcagcgaccgatgagagctcatcgccactaccagcggcgcctttctgaatcaccggctcatcatctgcagccaccttggctccattctcttggttaacccagacgggagggaaaccaggaaaaccagggccagggggggcagccgctgccgcgccgtgg

SEQ ID NO: 36280 - DNA, 791 bp, Setaria italica
  Peptide Sequence Number=SeqID_102254
tttttttcagacatgaacccttgtgatcagctttacaatatatctcatactgcgccgattacaatcaaaagccttgaagaaaatagtggtaaaacatgcatgtattatagagagatgtacaaacgaggtgacggacacacgcatatactaatcctagagatggatcacggatactaattagtggcagaacttataattaacctagcagaaggtagatgtactagatgagattccctgtgtcaactttgcagcatgtactcgtcagactcccaagtcccaaccaagaacaaccaaccgagatgaggatctgcagctgcctgtcctcaccctcacacgggctcatggcttgcccttgtgctgggtgtagatgtagtcgaggtgcgcgtcccggagcagccgcctctgcaggcactcgtcgttgccctcctcgcacgccggctcctccgcctcctcctctgctcccatcacctcagcctcagcgaccgatgagagctcatcgccactaccagcggcgcctttctgaatcaccggctcatcatctgcagccaccttggctccattctcttggttaaccagaggaggaacagaaacaggcagggggcgagccgctgccgcgccgtggaagaagaagatgaggaggagcagggcaagagccgcgagcggccaagagatacggcagctgcaacgcctcatctctgccgtggctccaacagttgaaactgcctgcttggatagagtgagcgagcgctagctggttggctgctggtgggtttgggctctactacttctta

SEQ ID NO: 36281 - DNA, 366 bp, Setaria italica
  Peptide Sequence Number=SeqID_102255
actacttgccctgtcactttggcagctacagtttatcaaagagcatgtgccacaattctgcttatcctttcccagttttctcttaagacgtttgacctccaatgctacttcattcgacattctaacttcatcatgagacttttgtttgtgtaccacctttgcttgatgaccattcaatctgtgatattctgcatagacatcaccaacaagcatccatgcctttgcccaaaataaataatttggtggcaaccgttgggaagaaacttcatagctgaagcatttggtgcttttgcaatagcctgcctcatccagtacaagtttaggttttttaagtcaaagacaatacttacccatttaaaccctaaa

SEQ ID NO: 36282 - DNA, 596 bp, Setaria italica
  Peptide Sequence Number=SeqID_102256
aggatgatgaggatgaggaggataacttcccgaagaacttggtaaggattcaaacgatttgagctaaaaataattcagtccagttttaacatctaatcatgcctgtgccagggaaaggttctgaaagacaaaggttctcaaaagaaagatttgaaacagcaagtcgtgcaacagttcaaggataccagcaagaagttgaaagggcatgtaaataaggtttccaatatggtaaagaaatggtggcaagggacgaagaagcctgcaaaaatctggcaaaagcaaaaactgaactctgaagttatttttcatcagatcgtctctagagtacatcttcatgcttggggctcctggcatgccctccattgatttcaatatcttttccatctcggcatctttcgatggcttttttgcaaatggttctccagggacccgatcctttggaactggcggtggatccttagcacacgctttggatagatctttacagagaaatttcatcagctggtcaactgagggttgtttttgtacacaaactcagcaacatcagtatcagcataccccatcacctcctgacatgcacgctcaatggtcttgca

SEQ ID NO: 36283 - DNA, 447 bp, Setaria italica
  Peptide Sequence Number=SeqID_102257
ttcagaacctttcccaagttcttcgggaagttatcctcctcatcctcatcatcctcatcatcatcatcttcagtaccgaagttatttttcatcagatcgtctctagagtacatcttcatgcttggggctcctggcatgccctccattgatttcaatatccttttccatctcggcatctttcgatggcttttttgcaaatggttctccagggacccgatcctgtgaatttaatgatgaattgatgatgtcccaaaaatgaatttatatcttgacactcatgtccccaaaatctcaaaggctactatttctctctcatcttgtagcaaatttttatacaagtgaaacatccaaaaatggcatgtgacaggtataccaaatcatgccatcccaccttcaaacacagaacatgatatacctcccctgcataacttctttcttcctttcgtt

SEQ ID NO: 36284 - DNA, 393 bp, Setaria italica
  Peptide Sequence Number=SeqID_102258
aagcaatgtaacatacaattccaattccattaaaaacatataattcagaaacaactgaattcactacagacaacaaataaatcaattcaatttgtttagacaccgctccatattttgtataatcgcttaactatatccaaggtattgccaactaaaacaggtcttgtcagcaagtattcaacttatgcttgggaaaatagcagctaaagctgaaattatgataatatcagggtatcatgaaaaaaatcatctaaaaatacactaacaaggcacaaagggctcacctttggaactggcggtggatccttagcacacgctttggatagatctttacagagaaatttcatcagctggtcaactggaggggtttgtttttgtacacaactcagcaac

SEQ ID NO: 36285 - DNA, 987 bp, Setaria italica
  Peptide Sequence Number=SeqID_102259
ttttctaactttctttgtcttggttattcctttgtaacttgtttgtctacgtactttgtcttgttttctaaattcttttctttttgtagtaaccttttgtatattggaaccttaacattgccctttcaacttcttgctggtatccttgaactgttgcacgacttgctgtttcaaatctttcttttgagaacctttgtctttcagaacctttcccaagttcttcgggaagttatcctcctcatcctcatcatcctcatcatcatcatcttcagtaccgaagttatttttcatcagatcgtctctagagtacatcttcatgcttggggctcctggcatgccctccattgatttcaatatcttttccatctcggcatctttcgatggcttttttgcaaatggttctccagggacccgatcctttggaactggcggtggatccttagcacacgctttggatagatctttacagagaaatttcatcagctggtcaactgaggggttgtttttgtacacaaactcagcaacatcagtatcagcataccccatcacctcctgacatgcacgctcaatggtcttgcattctgcattacaatgcccttcctcatcttgctcaacaagctccagcttgtcgcctttctcaacgatatcgatccggagcatccagtccgcctcctgcttcttcaggttgcacacattctccgcgatgtcgatgatctcgatctccggcaccttcttggagggcgggagagcctgctgcttcttggcgacctgcgcggagatctcgcgcgcgatccgctcgcagacctggcaccggatgtaggggatgtcctcccgcctcgcggccgtggccggcttcttctgccccgccgccgccacagccgcggggtgcaggaggacggccgcgagcgcgacggcgaggagcaaggcggcggcgcgtctcgccatctccgatgggctctctgcctctctctgctcactttttcacac

SEQ ID NO: 36286 - DNA, 658 bp, Setaria italica
  Peptide Sequence Number=SeqID_102260
ggagggcatgccaggagcccaagcatgaagatgtactctagagacgatctgatgaaaaataacttcggtactgaagatgatgatgatgaggatgatgaggatgaggaggataacttcccgaagaacttgggaaaggttctgaaagacaaaggttctcaaaagaaagatttgaaacagcaagtcgtgcaacagttcaaggataccagcaagaagttgaaagggcatgtaaataaggtttccaatatggtaaagaaatggtggcaagggacgaagaagcctgcaaaatctggcaaaagcaaaactgaactctgaagactgagcagtgtcaaatcagttcagtaaattcatccatcttccactttcctggagcaaagttttagatgatctttggaagataagtcgcagcgtagcatccagatcttttgatagagagtttagctacataaacgtgtacaatttttcagttgttttcactgtacactaggagaactagaatctggagcttaactgggaactaccgaactactgatagtttattaccaggctagtaaagttcagactggttgttggtgtgagatactctgtaaaacaattggccataccattgaaaattacgttattggctaccctctgacaaaaaaaaaaaaaaaaaaaaaaa

SEQ ID NO: 36287 - DNA, 386 bp, Setaria italica
  misc_feature (56)..(56): n is a, c, g, or t
  Peptide Sequence Number=SeqID_102261
cttcatctgccgatgcaatggccgtgtacactccatctcggtgaaggcagagtcanaagggctacgacaagaaatccactcatgtttctgtgtcagtggtaactgagagaaagagttagagtaggtggaagcaaataagaatgctgtgagtttatggagacttcagttcctgacttcttgtgggtcagcttcaaggttgtgctgtagtattattaattctagttgtgtgcctgaggagaaattacaagtttacatgaaaattcctgctgtgctcaagtacacgcagagtcaaggaaacccagtcctgtagaaaaagactaccagtaaaaaattccatctggaaggggatggaacttgacttggaaagtattttggtccaagtcaaa

SEQ ID NO: 36288 - DNA, 312 bp, Setaria italica
  Peptide Sequence Number=SeqID_102262
aaagaacattgacaatgtacaacataatttcgccacagttgaggacatactggccagttaaaaccaaatagtgccaaataatgaaaaggtatcaagagactgcaattgttcccgcactgaaaaagtaacatgaagggaaacttgtagtgatgcaacacaggtatcattgagatttccacggcatattttgcagcatgcagaaacttatgggccacagaatgaacaattgttttcactgcttcacaaacaaaaattccttattgaaaaagagccagaggcccagcagtaaagatggaatggaaaaagtgactg

SEQ ID NO: 36289 - DNA, 761 bp, Setaria italica
  Peptide Sequence Number=SeqID_102263
tgttacctgttccatccatgcaaacctcataaagagtccagaatacacacacattgctgctgtcatattgccggatatcatttcaggaggcttgttcatgtcaaccaaaccctaggagtaaaacaaaaattcaagagtttcaattacaaggtacaatttagttgtcagcgaaaaaacataagttaaaaatgaaggtgaaacatgtgaggtaatgggagctaaatgcaaacctttaactatatactatgatataacatggtttatacatttccgacaaaaaatagctagaaacgtaataatctttgcaggtcgatgtaaatattacagaatgtttgaattgaaagaaagaacctgatgttagatcattggtcagtccaaacaaatgagcaggtccaacttaagttacttagcatccatgaaaaaaaacctgatgctctgaaattttaaaccaggcttgccagctacgcaccccgactccccccaagtaaaagtgtaattacagcgatccttcagaagttcagatacaggtccggcattaaaaaaagtatcaatgcacaaaagcaagatctttctttataatactgacagccggaacagattccatgatacaattaaataccagttaacttctatactgacaaatatgatttagctccataaagatttttcaagcaaatcgaaagactcctcgatgaagatgtagtaacactcaggtgtagatatattacataagttgttgatcaatgattcaaatcagtgcc

SEQ ID NO: 36290 - DNA, 511 bp, Setaria italica
  Peptide Sequence Number=SeqID_102264
cgccaaccaaaagagggaaaacacttgtaacactacatatggcgtagaattggtttctggtatttgtgtactagattgagcattcaaaactgtagcggcagtagctattcttattgggaaggtaaatgcagtttatacactctttcactgttgaggctctggttctttcttctccagatacccctgggctctagcccaccgagataactggtacagctggactgattcattggatgcatggcatgccagaagcaagtagttccgcggctgtaccatccatgcgaacctcataaagagtcctgagtacacgcacatggctgctgtcatattgccagataccatttcaggaggtttgttcatgtcaaccaaacccgcaaggacgaaaccccagtttgcgacgggaccccagaagtgggtggtcttggggccgaccgggctgttcaggaaggccttgagcgccgtcgacatggcgaatggttcctcctaagattcaccgcacctggtcacgcca

SEQ ID NO: 36291 - DNA, 784 bp, Setaria italica
  misc_feature (1)..(27): n is a, c, g, or t
  Peptide Sequence Number=SeqID_102265
nnnnnnnnnnnnnnnnnnnnnnnnnnntacgaccaacaagttagaagtattatttactggccagttaaaaccaaatagtgccaaataatgaaaaggtatcaagagactgcaattgttcccgcactgaaaaagtaacatgaaggaaaacttgtagtgatgcaacacaggtatcattgagatttccacggcatattttgcagcatgcagaaacttatgggccacagaatgaacaatgttttcactgcttcacaaacaaaaattccttattgaaaaagtgactgcagcattccattccatctttactgctgggcctctggctctttcttctccaggtacccctgagccctagcccaacgagataactgataaagctgaacgctttcattggaagcatggcatgccagaagcaagtaatttcgaggttgtaccatccatgcaaacctcataaagagtccagaatacacacacattgctgctgtcatattgccggatatcatttcaggaggcttgttcatgtcaaccaaacccgcgatgacgaagccccagttggcgacagggccccagaagtgggtggtcttggggccgacggggctgttcaggaacgacttgagcaccgtcgccatggcggaacccgctccccgcggaagctgaaatcacctcgcgcagatttcgccgacggcggcggcggggtcgagtcgacgagcgagggcgagggaaagaaaaatttacgaggggggggaaaataacggaaacgaacaaacctaaggaaataagttaacaaata

SEQ ID NO: 36292 - DNA, 236 bp, Setaria italica
  Peptide Sequence Number=SeqID_102266
tagtttctattgcaatagaaactagctatgttcccctaccaagtggctagcacagccacaaaagaacaaaatcacatgactagccgaaacttaattttgacaggatacacaacaaataaataaatttgggaggaattacagaaacattagagaagtgcacaaggtctcttatgttagaatgaatccatctaccaatgcttgaagttgcctggcaacgcaaatgtgcatatatgatg

SEQ ID NO: 36293 - DNA, 340 bp, Setaria italica
  misc_feature (284)..(284): n is a, c, g, or t
  misc_feature (306)..(306): n is a, c, g, or t
  misc_feature (316)..(316): n is a, c, g, or t
  Peptide Sequence Number=SeqID_102267
gtcaacaaataagcaagaaaggagtagcttgtgctgaaatagttgagtcgacaggaaaagcatcactagctcccaaagactggtgggttgaggacttgtgtgaattggatgttgacctctacaagagagttatggttgctatcaaatccaaggggagaatgtcacctgaactgataggagaggccctcaaagcttatgcggttagatggctgccagactcgtatgatgctttgattgctgaagattacatgagaaggaatcagtgtctggtcgagactataatntggttgttgccgtctgataagngctctggttnttcttgcagtatttctcttagaaa

SEQ ID NO: 36294 - DNA, 284 bp, Setaria italica
  Peptide Sequence Number=SeqID_102268
tccctaagccatctccctaaaccgcaagaagaacacagtcgcagagcattttcgccctgggaaaagagccgaaagagaggttgatcacgccgccgcaatggcgttagcctgcacagccaggctaatccacccctgcatggtgtccaagaatccaaggacaccgccgccccccttacacctccacacccataggcccgcggccgccaccacgctgtcgctgataccgtcgtcgtcccatcacttcgcgctccactccgtcgacgtctccaaggacgacaagccgg

SEQ ID NO: 36295 - DNA, 256 bp, Setaria italica
  Peptide Sequence Number=SeqID_102269
ctctctgctccggtctagctagtctaccaacggggggcatttccggcaacaaaccggcgccggcccacaaagcagggaggtccggccacaccggcccccggccaggcgacgccacgacaggactggccttagtggttttccttggctgttctattgctctatcactattcactagccactgctactacagtatggacatcagggtcgtcgttgtcgccatcttcgtcgtcgccggtcagtcggacggtgggaatga

SEQ ID NO: 36296 - DNA, 738 bp, Setaria italica
  Peptide Sequence Number=SeqID_102270
tctatcagatcagatcagtcaactttctgcaaatcgatcacaaaaatgggacaagattgatcaagaggaggaaacctcaactccctccatgagaacaaaaatatatgcaacctcgatcagcctacattggttggatgcaaatcaaattacaaaggaaaggaaaggaaatatactgtgtgactgaatgaacagcagtagcagacactgagaaagaggacccatgaaggctaagctagtggcatctgtttgcgagattgctcgggctgaccataccgccaccagtggcttgactactcaagctcgtctcacttcttgttgaggtcgatgccggccttgcgcgcgacggcgtcgaggccgtgcttctcgatggtcttgagggccttggtggagaggcgcagcttgacgaagcgcttgccggcctcccaccacagcttcttgtactgcaggttcacgaactgctgcttcttcgtcttgtggttggagaaggacaccttgttcgcccggttcgtcttcttgtcagtgaaggggcacacccggcgcacgacgatgggctggaactgcctcttggggaggggggcgatggcggttgaagtggcagcgccggcggagagggagaggccggcgagctgtgacgtggcgaagccgagggaggtggaggacgaggaggaggccctccgggcggcggcgggcgtggcgaaggaggagctcagcagcgtggcggtcgccatggtggatgga

SEQ ID NO: 36297 - DNA, 487 bp, Setaria italica
  Peptide Sequence Number=SeqID_102271
cgccagctgagagcagctgtctcttgttcctgcatccaaaacgcagaggtgaaatgatgagggcaactgagttcaagtcgtttagttatgattgagcaacaaagcaaagttgatatttacctgtcattgctgacagcaagattgaacagagccattgtgccaacctcctgagattgcacatcttctctgaagatagccatcttcagaaaatggatgagtggttcagtaataccattagcaccagcatagtccctaagttcatcgtcattctttaacaggagcctgatctgctcaaccaacttatgtcgctcatctatactctcatcattgttcttgttcaacacacgcagccactcttcacatatctcagacacggtctccttagagttctgattagaccatttaatcacagagtcctcaacttcacatatctcagatgtggccgagcacttctctggagtgacttcatctacacggatcttggatt

SEQ ID NO: 36298 - DNA, 894 bp, Setaria italica
  Peptide Sequence Number=SeqID_102272
ggtgccgatagtgaggaagactcgggtgttgaatcactctacattgactgaggaatagaatcatatggtggcattgggtgtcaacttggaaggttacagtctctgcccccatttggaaaggttaacttcgtgtcttggcatcatcaccatggtgttgtgattttgtgttgatgtgattgggagtcttcaaaaggagcggagtctcaggcaaaaactgatggctccatgagtaaaatgtgcattactgaactggggaagtgaagacctatgtgcaacgatggttggatggcctcctccccttgcactccctcatctgaagacagatttcagggtccatcgactgagcaagtctaacctcattgatcattgtgaggttcaataaaagaaaggctcgggtcttggtggctaatagttcatcagctaaatgatttggctttattcaggtctgatcaagtgttcgccgtgaagccggatgtcatgctgataggtcatggggtggtctgtgactctgtgttgtcagttgtcactgttatgcctctgccatatacactgaacaggtgcacgtagtcaattggacctgtcttagtgctgcttgtgttattctacagtactatcatttcaaaactttgaactgcagctaaaaagacaagcatcctaaggacaatagttggtacatgatgtcacctacagtatcatgcctcacagccctcaagatgctgtgatttcgaaaatgttgacctctggatttttggcatggatgcagtggctgacccgctgaaggatattgtcttgttcatcaatgaggctcaaacttcgttttaccatacgaaagtgcacaagattaaaatgcacagaacaggccactttgtggatgatctagatgacacatcctag

SEQ ID NO: 36299 - DNA, 731 bp, Setaria italica
  Peptide Sequence Number=SeqID_102273
aacaaattaacctcaatggaactgtgccaccgtcactcagcaattgcagcaatctagagtcaatcgacctcagtttcaacctgttacacggtcagattccgccagaagtattgttccttcctaagcttattgatctggtcatgtgggcaaacaatctttcaggtgaaataccagacaaactatgctccaatagcactactctggagacattggtgataagttacaacagcttcactggaggcatccctccgtccattaccagatgtgtgaatctcatatgggtatcacttgctggcaacaatctgactgggagtgtgccctcaggctttggcaacctccagaagcttgccatcctacagctgcacaagaattcactctcgggcccagtgccagcagagttaggcagctgcagcaatctcatctggcttgatctcaacagcaataacttctcgggtacaataccaccgcagttagcagcacaggcaggacttatcactggaggtgttgtttctgggaagcagtttgccttcctcaggaatgaggctggcaacatctgccctggtgctggagtgctgtttgagttccttgacatccgtccagagcggctggcccagttcccagctgtgcactcgtgtgcctccacaaggatatacaccggaatgacagtatacacgttcaatcaaaacgaagcatgatcttcctgatctctcgtacaacagccttacaggtac

SEQ ID NO: 36300 - DNA, 1336 bp, Setaria italica
  Peptide Sequence Number=SeqID_102274
agtttttttgttttttttttggtaaaaacaacgtggatctcaaacaaggacatttgccgaattttctcatctaagtcctgatatatatacattgactagtaaaatgaaactatggtatggtaagctaatcgcaggattgaccccggggtgacattgtttgttttcctgacacaacaaagacgatcatttggagacatctcgaaactgatcagatgaccatttcagcctccctcaagctagaaggaattcctatatctagtctcatagtagctttgtacttctctggcactttggcgccaccctgaatgcatatctcaacaacggcgggtgcctgcccatagaatgtcttcagctctctctgcagttcctccccagattctggcatgtgccacacatatctaggaggtattaggtcatcgagcactgctgcttgccatccatgctgtccattcctctgctgatgcttgaaggccccacagttccgtgctttgtggccagttggtccgatatgcacctcagggcagtatccacaaaccctcacagcatagcccttcattagcttcaaggcgccatccctgacagtctcccatgcttcgagtgtctcctcggcaagagccactgtctcctccgggctagatggagagacaatttcatcggattgtagttcttcaagaagtgtctgcttaaatctgtcaggctctggttctggtaggtcatcttcatctgcatcaacaaactcgtttcttccaattttaatgattggctttcttcgacgctttgtgggatactcagggaggtcaactccagcttggatgcaaagttccacaagagcgggaatgcggggtacagcaaacctctgatcatgcgggatacgattcccaagacggtcctctagatggtaggcttcaacaggtaagaaaacagcttccgctaaagtacttccccactcatgctctcccctacgttgatttgacaacattcctcggcatgttcggaaaggatgtccaacagatccaacatgtatctcactgcaatatttgcagccttttacaggtactactttcataagcttcctcaagttgttgatcagcaaaattcttgcattgtacactttgtaggcaactggtatcagtctacggattagcattccattttttggtggaggcagtggacgttttggtttcccttgtgctgccttcatcctctcctttgctcggcgtcttaactccagcactggtataggaaatggtttcttctcccttttggagtattttcgtggaaggtcagcattctgagcatgttcgtttctaatgacagtggccctttgatgaggttg

SEQ ID NO: 36301 - DNA, 138 bp, Setaria italica
  Peptide Sequence Number=SeqID_102275
tcgcactagtcagggtgttccaagtggtggtgcgaatccagctcctgcaccggcaccagcagctggtgcccttgatgccttgcgacagcttccacagtttcaggcactgcttcaattggtccaggctaatcctcaaat

SEQ ID NO: 36302 - DNA, 437 bp, Setaria italica
  Peptide Sequence Number=SeqID_102276
gtcgtgggtgtgtgtcctttgtaacttctgcagtagatagtaatgctgcgcggctgctgcgcgggatgggtgattcaccatgcccggtgcttgatttgtgttgcttggcttcgtctctagtcctgcagcctactcactgctctgagctacttctgcaggttgctgaggtgaagaagatcatcgagaccacccagggtgaggtctaccccgcggaccagcagatgctcatataccaagggaaaattctcaaggatgacaccactttggaaagcaacaaagtggctgagaacagcttcctcgttataatgctgtccaaggctaaggcgtcgtcaagtggagcttctaccgctgctgctgcaaaagcccctgcaacaccaggaattcctgagaatgttgaggccccgcctgttgctcgagcacctgcatctggccaacaa

SEQ ID NO: 36303 - DNA, 426 bp, Setaria italica
  Peptide Sequence Number=SeqID_102277
caggtgcccgccggagatgttggcggccatggagacgccgacgaagagagcgaacgcatgggcgatggcgatggcaaccaggccggcagggtcgagggccccgccctttgtcaattgcgctgcaagagacgaatttttttggttaacaatgagctaaaccctggatgatcgtcatggtaagcatggtgtgatatgatatttgagaggaggtgtttgagataggagaagctcacagtaggcgatggcggagccgacgccggcgaacacgaagaggagcgtggcaatgaactcggcgacataggccttgagggacgccgcgctgaaagagtcgccgaagcttccaaatgcaagcttcaccatctttcccctgttttcttctactctctctgacagtagtagagcccttgggctggtatattcagagaa

SEQ ID NO: 36304 - DNA, 944 bp, Setaria italica
  Peptide Sequence Number=SeqID_102278
cgtcttcgcgaggtcgaaccccaaccgcgaggcagcgaaacccatcccccctccgaaagcagagtcggccagtgcgaggagagagagaatagcgagggtgtgaggcggcggagggcgcgatgaagctcaacgtcaagaccctgaagggcaccagcttcgagatcgaggcgagccccgaggagtcggttgctgaggtgaagaagatcatcgagaccacccagggtgaggtctaccccgcggaccagcagatgctcatataccaagggaaaattctcaaggatgacaccactttggaaagcaacaaagtggctgagaacagcttcctcgttataatgctgtccaaggctaaggcgtcgtcaagtggagcttctaccgctggctgctgcaaaagcccctgcaacaccagcccaacctgctgcgcctgcagtccctgttgcttcagttgcaagatcaacacctccacaagcacctgttgctcaagcagaaacggctcctccaactgcacagccttcacctgcagctgctgctgctactactccagctgctacagttgctgcatccagtgatgctgatgtgtacagtcaggcagcttcaaaccttgtctctggcaacaatctggaacagactatccaacagattcttgacatgggtggtggtacttgggaacgtgatactgttatccgtgctcttcgtgctgcgtataataaccctgagagggcaatagactacctgtattctggaattcctgagaatgttgaggccccgcctgttgctcgagcacctgcatctggccaacaaacaaatccgcaagctccacctgctcagcctgcagttgcaccaccagtgcagccatccgctgcctctgcagggcctaatgcaaatcctctaaacctttttcctcaggtatgtgctgtcaatgtaccttgacattttttatagtttgg

SEQ ID NO: 36305 - DNA, 547 bp, Setaria italica
  Peptide Sequence Number=SeqID_102279
ttttttttttttaaaaagtaaaacacactttttttccttgaaagacgagaaccgcagatcggatgagatctttacatcgatttaaacaaaaaaaaaggaagggaaatgaacacaagaaccatgaatggcacatcatttgtaaatacaaattcgtgaccatgtcacgtgtcgaagagcaaagcaaacgacgacgaagattgaaacgctgcactcgatcgatcggttcaatccatcggacttaggcgtagtcctggtcggcgacctgctggtagttgccgccgatgaagacgtcgccgtagatgaggccggcgaggccaccgccgatgagcgggccgacccagtagacccagttgccggcgaagttgccggcggcgacggcggggccgaaggagcgagcggggttcatggagccgccgctgaaggggccggcggcaaggatgttggcaccgacgatgaagccgatggcgatgggggcgatggtgccgagggagcccttcttgggggtcggcggcggtggcgtacacggtgtacacgagcgcgaaggtga

SEQ ID NO: 36306 - DNA, 1044 bp, Setaria italica
  Peptide Sequence Number=SeqID_102280
tttttttttttttttacttgggaacgctgaaccgtgcatgtcatgtgtatagatcgaacggttctcttacaacttgctgacatcatcgctggtgaaatccaaaagggaaattcaaagaagaccaaacataatcacaagacgagacgaggtgacaatcgacgatgatgaaattgacacgtcgggttgggtgcggactgcggactttcatgccgttcatgggtactcctgctggccaaccggctggtaggaggcgatgaacacgtcgccgtagacaagcccggccaggccgccgccgatgagcgggccgacccagtagacccagttgccggcgaagttgccggcggccacggcggggccgaaggagcgggctgggttcatggagccgccgctgaaggggccggctgccaggatgttggcgccgacgatgaagccgatggccatggggggcggatggtgccgagggaccccttcttcggggtcggcagcggtggcgtacacggtgtacaccagcgcgaaggtgatcacgatctccatcaccacgccctcgacctcgctgatgccggagacgccgtgcgttgggatggcctgcccgtgggtgacgaacttcaggaggaggcaccgccacggaggcgccaagcagctgggcgacccagtagaagatgccggtgaggatggtgatgtggccgccgacggcgaggccgaaggtgacggcggggttcaggtgcccgccggagatgttggcggccatggagacgccgacgaagagagcgaacgcatgggcggatggcgatggcaaccaggccggcagggtcgagggccccgcccctttgtcaattgcgagtaggcgatggcggagccgacgccggcgaacacgaagaggagcgtggcaatgaactcggcgacataggccttgagggacgccgcgctgaaagagtcgccgaagcttccaaatgcaagcttcaccatcttttcccctgtttttcttctactctctctgacagtagtagagcccttgggctggtatattcagagaagatggctacc

SEQ ID NO: 36307 - DNA, 437 bp, Setaria italica
  Peptide Sequence Number=SeqID_102281
cgcgcactgtccccttaaatttttgggttaaactattcaccaatgcttacaacttaatgtggtatcagggccaatgcttacaactgatattaggattttagagatctcgagtatgaatcatggcggtaccattaaataaaatagagcaaagtccatttcacctgatgaacccgaaagccaccctcaaggaatcatacacctctcatctatcaaaacaggtcaacttaaccccatgcaccattttaaaagtggctttgaatgtgattttagttgacattagtgggatccaaatgtcagaaagtctcactccaccatttcatttgggacccacttgtccgtttcttttcactccaccatgtcatctgggacccacttgtccatttctttccctatccatccaccgtggttgccgctgagccgcccattggttttatcgg

SEQ ID NO: 36308 - DNA, 409 bp, Setaria italica
  Peptide Sequence Number=SeqID_102282
tggtaccatcaactgttgaccctgatgctgctggacatactgaaagagcaatcaaaaccaagaagcaagtcaagatcagtgcctggaagcttgcaaagctggatagcaatgaggcaatgagagctgcagcaaaagctcgggcatcgtcctccgtcctccgacctttagatgcccggcggggtccagggtctagccttagctctagtggcaatgccagcatgagaagcagcatgagtgctgattacagtgccagtgccaccaagggaaaaattgggctgataataagttgtcgtctcttcatagctcctcgtatcctcaaagcctcgcaagccaggacgactatgaatcaggcacgcagagtgctagcagcgtaagcagcccggtcacattcacaagccagtgcctcata

SEQ ID NO: 36309 - DNA, 396 bp, Setaria italica
  misc_feature (37)..(37): n is a, c, g, or t
  Peptide Sequence Number=SeqID_102283
aaggcaggtcgatgagctgccatctcatacatacagnacccaagagaccagatgtctgacttgaatccataaggaatatcagccagcagctctgggcacatgtaatttggtgttccaacaaccgatgaagctagatcatcttcctttaaagtctttgctaggccaaagtctcctaggcgtatgtcctgatctttggtgaggaatatgttggagcactttaggtcacgatgcagaacatagttcgagtgcaagtagtctacagccaataccaattgagcgaaccatttaagcaatacctcctcagggaagtaagtaccatttgatttcttcatcagctcatccatatctccaccttcacaatagcccgtgacaattgtctagactattaactaacta

SEQ ID NO: 36310 - DNA, 997 bp, Setaria italica
  Peptide Sequence Number=SeqID_102284
ctagcttcatcggttgttggaacaccaaattacatgtgcccagagctgctggctgatattccttatggattcaagtcagacatctggtctcttgggtgctgtatgtatgagatggcagctcatcgacctgccttcaaggcatttgatatggctggattaataagcaagataaatcgatcttccatgggtcccttgcctgcctgctactcagtgtctatgaaaaccctaatcaaaagtatgctgaggaagagtccagagcatagacctactgcatctgaaatcctgaagaacccatacctgcaaccttatgttaatcaataccgtcctctttatgatgcttcaaaccccatgcgggtgccagagaaaccattacccacttcatggagcagtcagagaagcatgtctgacagccaaagcagtagcgtttctagtagtgacatagacagtacccagtcaagtgacagaagcacatcaggcggaacaagttctgatagaaagaccattgatactggaagcattcgagttgtggatcaagctatgtcagatgaaaatgttcaacacctgaagatctaagaggcaataaagataattcaagtgttcagtttaaaaggcaagattcatctaaatctatacatgttgaccaccacccaagaacagagattaagcaaccaaagatcattgagaagataatgacaacccttagagaggagagccggctgagagaaatcaactctcctgtcagaggtggtgtaaagccaagttctggcctcggcaataataatcaagtagatcaaccattaccggtttcaaggacaaacggtgatatgccatacagtttaaagtctggcaacattttatctcacgacgaacatgtaaatcaagttgaagcatcaccacccctgaagcaactgtcacctattgctgaacataatccaaagatcaaaactgctgggccatcaactcctgaacctgccaaactgataacagaaaatggtgc

SEQ ID NO: 36311 - DNA, 772 bp, Setaria italica
  Peptide Sequence Number=SeqID_102285
gtcgccctcaacgctggcccgccttccactaagaggcgggtgcggctcagcgaggcggccatcctcgccatcgccgtcggcggctgcgtcctcgtgttcgccgtcgtcgcggtgtccctcatcgcgttctgcaaccgggacggcggcgaggagatgggcggcggtgcggtgtccgggaagggcggggacaagatggggagggagtcgcccgagtccaaggccgtcattggcaaggccggggacggcaaccggatggtgttcttcgagggcccgtcgctggcgttcgacctagaggacctgctccgcgcttctgccgaggtcctcgggaagggcgcgttcgggacggcgtaccgggcggtgctcgaggatgccaccacggtcgtcgtcaagaggctcaaggaggtcaatgccggccgccgcgagttcgagcagcagatggagctggtcggccggattcggcatgacaacgtcgtcgagctccgtgcttactactactccaaggacgagaagctgctcgtgtacgattactacagcaggggaagcgtatccaacatgcttcatgggaagaggggagaggacagaacgccattggactgggaaaccagattaaagattgccctgggagcagcaagaggaatcgcacacattcacacggagaacaatgggaaatttgttcacggcaacatcaaggcctccaatgtgttcatcaacaggcacgacttcggctgcatctcagacctcggcttggcacaactgatgaacccaatcaccg

SEQ ID NO: 36312 - DNA, 228 bp, Setaria italica
  Peptide Sequence Number=SeqID_102286
ttttttttttcggtcaaaacaaaactacaattgattcaatatatgtagcagatgtcacatgcaatgcagtacaaacatcgttttatacaacagtggcactcacaacatcacggcagatgtgcggcatttgcatttgcatcttgcgaaagcaagtgctctgtacatcaaggaggggcaacacagcagttgacccagcagttacaaagcaagcagcaggccagcaagtgg

SEQ ID NO: 36313 - DNA, 216 bp, Setaria italica
  Peptide Sequence Number=SeqID_102287
gccccttttcatgctttcttatcccaacaagtgattttatccacttggccgaaatccccatgatatccctttcttctgtgtgtccaacagctagcacctgcaagaatgcccgcagcgaggcgtcgcagtcgccgccgaccagcccgaccgcgccctccactccccctcgctttcgcctccgctttggattgattgagctcccaactccgccgtccg

SEQ ID NO: 36314 - DNA, 1397 bp, Setaria italica
  Peptide Sequence Number=SeqID_102288
acttcgccagttctgctatatacagttttctggaagagtgttcaggaaatgtgatgccaataacacaagagacagaggctatcgcattgttaggaagggataatcgcttctttgctggtgcattgacttgtgctggcctttcttttggattgctcgtggatcgggaagccaactttgaaggttgagagctgacttcatcagttatttcgtctgatggtttctcttttaccttggatgaatccaaagaagcagttggttgcacgcttgcagattgccccgatgaagagccacttacatcagaatgtgacttcttgtggcttgtgcctttcttgtgctgttgtccatttgcttgtgtggttgaaacaagtacttttccttttggtttgtttggagctttagtcttgtcttcctcagccactttgtcatcaccaactgtgacactctctttggcattactgtcaagtaacctgttctcccatgggcgtgcagccatccacctctctaaccagttccgcccccactgattctcgtctcctgcgagtccttggtcttggaggctcgctgctttctgtttccttgaacctgcctgccactgatgtgtcaaagcatatgccatcgccctttcccgcttagctgcagcttcttgcctttttaatgccttaattttcatttcttctactgagcctacactgccacaccagtcttcctcgatatctcgaacatggtcctcatgaacatttttttcaggtggtttcttctgggtcccttggctttccaaagaaacacggactcgtcttgctctgacacgagcttgagctcgcaccagcgcttgcatgcactgaagtgtttctgccgcttgctttctcacagcatggcccctaacaagtgcctggagtctaactagtccttttaatgcccgtaaagcacgtctagccaggaatgctcggaatgcagactgaatagctacagcagcctgatgctcctttgtatcatgttcagtctgagaaacttgaaggtatgtgctcggtgaggaagcggaatatgatattgcctctgtgttcgcctcaccagccaatggttcagcttgtactctgagttcttcggctgcaataacaccttctgtatctacagaatgatcctgtttgtctagcaactgggtagcagaggtcctcgcggtgctgcatccagcatttcgccccttttcatgctttcttatcccaacaagtgattttatccacttggccgaaatccccatgatatccctttcttctgtgtgtccaacagctagcacctgcaagaatgccctcatctcgctcgtctcgtctccgccgagcccccaacccgcgccctccactccccctcgctttcgcctccgctttggattgattgagctccca

SEQ ID NO: 36315 - DNA, 396 bp, Setaria italica
  Peptide Sequence Number=SeqID_102289
cgggatcccggcgaggcgaaccgggcgcgcggcgagcaggatgcggaggccggcggcacaacctcgcggtgcagggagtccgacgagcttgcgctggagcttcagcacgtgcttctctgcctgcggacctatggcggaggtggccagctcgcgagccgaaacgagctggctcgagctaccggcgagccgagccgagctacgttttttgcttgtttctataacgagccgagccagttcgtcatataaacgagctgcagcgagccgagctggctcgacatccacccctagcctgacctgaccggataaatgcatcagcggcgcaggccggtaattaccaaggaagcgaagatacctcggtgatctccgccttctgctataaatcctcccaggaggatc

SEQ ID NO: 36316 - DNA, 586 bp, Setaria italica
  Peptide Sequence Number=SeqID_102290
ttcacaaagcattaccgcacagagaaaaacttaccgttgccatttccttgtggagacgagcgcccaggaagcgaagatacctcggtgatctccgccttctgctataaaatcctcccaggaggatctgctgcagagtccattgcggcgaagccaccgagaagcgttggcaccgtaactgcttcagttacactatccttggccaaagcaagctatctattgcgcctgagatttccgtgggagcagtcacatttgagaacaactgaagacatgacttttaagctagtagatgctcagatgagatctacaaagaacctcttctatgccggaagaaggaattcagatcatctgtaataaaaatcgttgattcatccttgaactcgaatttgctgcctgccgacagtatttgttcaattcctgcttcagaagatgatttctatttgaacaaacgaaggaagatggatgaggaatatgatccccttccaacaaatggaaatatgagagagagtataacgagaaacttcacagctactggatgtatctcatctccagtacacagagtggatggcaaatcacgtatggtttctcc

SEQ ID NO: 36317 - DNA, 996 bp, Setaria italica
  Peptide Sequence Number=SeqID_102291
actgagagctcaatgtacatgagcctattcacatcttcggtttcatccttaagtttcagaatgttaatggtttcatctgaaacagtctgcaacagaatttcatcttcagctaaatcagcaggtcctaaatctttgcagatattcagaaccttcatttgctgtgaaatccctaccctcagtttttcattatgcattagcaatgtttctctctcttccttgttatatctggcttcctccatcagctctgaaactaacattgttgcagaatgatttgcctcagcatacttcttgcattcagtgaaaagagcaaccttcttgttttgctcatcagccaaactgttctccaagataactgtatgaatagaagcacttatgtttttctgctgctcctgttgaagcacctcctccatatagtggtttttcgcttccagagaagaaatctgtttctcgtagctgtttacttgcagtttatgtgactttactaatacttcgtattcctcatttttaattctcaactgatcctgcagttcacttacttgatcataagcaaaatccttctctcttgatacagaggagtgtttgtcttccagattggcatgcttgtcttctagggctttcatgatcactgtaatgctctccaactgagataacagattgttcttttcagcaaaaagcgctgaattatttgtgaggtgagcctggcatgcttcttcagaatctttcagctttgttctcaaatcttctagctcaattttcatatcagatagcgagatatccaagactgaattcttctctaaaacatctgataaatgtttaccaaggctctccagctctgacgcaagattagccttttcagaaacatggcaggaaattgcatccttcagagagctttccgagacctctaatgtttttatattctccctcaatgcatccatttcagcagagagagctgagttatttgctagttgagcctggcaggattcttcagaacttttc

SEQ ID NO: 36318 - DNA, 1348 bp, Setaria italica
  Peptide Sequence Number=SeqID_102292
gcgcgccgccgaggaggaggcgctgcgccgccgcgccgtcgcactcgtcgccgacgcccgccgcctccagggctcgctacccgccctcgacccctccgcgatcgacaaggtcgaggaggaattggagcgtgccagggttgccatcgcagatagtgatgtggcctcatttctccccagcaagagaaatgggaagttccttaagatgtttctaggccctgtgaatgtgcgggtggctaggaaggaagataagctcaaaatcaaggatgagtacaataattacagggataggactgcctataagtttctgctgtttccatctatcctcctcctactgagatggtggatatgggatggatgccttccagcttgggcagttcaggtctaccaggcttggttactgttcctgtatgctagctttgctttgcgggagaatgtgttgattgcaaatggtagtgacattcgtccatggtggatatatcaccactatctagcaatggtaatggctcttattagccttacatgggagataaagggacagcctgattgttctagtaagcagagaggggtgcaactcttcctgcgttgggcaataatgcaagggattgcaatgcatctacagaacagatatcagcgccaaagattacgcactcgcatagctctaggaaaggcaaaaagaatggatgttgtcgctggagaaacagccggtgtggagggacagctcttgttgctgtaccctgtcctttttatattacagggttttgaagcgtatgttggagttttgcttcttcagacagctttgcacgggcttgcctccgaatggcaggttgtagtttgtgggatcttgctggtggtaatggcagtgggcaactttgtcaacactgtggagacactggtattgaagttgaggttcaaagcaaagatgaagagggcaaagagcaggcaggaccgcccgcatcaaaattgacgaaagcagaactctgacaccatctcttttgtaaatcctttgacccataaaacatttttggctgcttgtaatcccctgctttggtaattggtcattcaagttggcaccctagacgacacgactaaaagatacaaatatttccacttcagttgaaaattgcgagtttgcatgtatgcttgagctctaaatctttgagttttgataaaggtaggtaatgtatccaaagttgtgtatagaataagggtattagactgttgcagctctgtataaatggagcagaggcttgtaaggtttggtggtgtcatggctcttttaaacagggtggtgtgaatgacgagtgtcatttctgtactaaaaaaaaaaaaaaaaacaaaaactcttagt

SEQ ID NO: 36319 - DNA, 3082 bp, Setaria italica
  misc_feature (1)..(20): n is a, c, g, or t
  Peptide Sequence Number=SeqID_102293
nnnnnnnnnnnnnnnnnnnnagtttaagtcatgtatagatactcagggaataaaatgccttgatggcttcatatatcacattgatagctaagatttaacacattgaactagctaagatggcctcattttagacagcaaaccggaaaatttaatacataagcttgttcagaatgctaagattctaactcaattacaaatgggatcctactaacatcactcgctcttccaaagcagtgagccagtgacactctgccagcctcttagaggagccagcatctcaatttccttttatttcttctgccgtgagaacaaaaaaggttagggctcagttcttggtttcggacgcacgcagccgcagaacggggccctcttctttttcttctgcccgccaccacggtccttccttccatataaataatccctcagaagcacacgggtgcgcttgtcagacaccttgagccttcggtactcatgctcttcctcgagtttgagcaagacgtactgtatcttctgaagctcgagttccaatctcgccacattttctgaccctttctgtacctgctcagagattttcctcctgctggagtacccttctcgctcagtgttcatattatctgacaatgcaggataattctcagccttcctagtcaatttgttgttgaaattgatctgttccaagacatatccatcagtctcatgaagctgcgtgctcacactgctgtactcagaattcatcggggatttgccctttggtggttcctccattttgcgcttcaactcctcaatgcttgcttggatgctcaacagcctctgagcatcagaagcgagcctctcgagtacactcttgctccacacttcatgaggctctacagctccctttgacacctctagcttattgatttcgaggtctcttccccttactagttcagaggaagggtattcactcttcacctcctcaaccgcttgtatatcatgctcagatgatgaggacttggctgtttgattcttgcagttcctctctgctgcctcccacagctgaagcatatcatcatccagctcagaatttgcaccattgccaagggggtagagggtagctccagtgccatatggtgggcaagtagatatctggtcgagttcaatgtccttcattatctggacctgcttccctttggagacctcaacatcttttgtttctcattgtcagaatatatttcctttgcctccatgcgcgagctacctcttgctttaagctcttgaattacagtatttgctgccgccaatttagctgcagactcagctgactcctgatcttgacgatctttggcatttaatagaaccacttgaagtgcttctactcttgcaatcaacccttgtaactctggtgttccttcaggtaagcagtgagattccagcccataattaccctcttgcacatgaggcatctgtgcagtttcctctttgccttctgtactacaaggtttcgacagagaaagtgtgttttcttccagcacactgacttgatcagccaatgatgctatgagatttagatgagtgcccaactcagctttcagttctgcatgttcttcctgaatgccagacattttgttctgcagctcctctatttgagcatcacgtgaatagatctcattcattagcaactcctttagggttactgcactaatctctgtagctttacctttcatcaaaagctcaagtgctttttcttcatagaccgcagaattcactgaagaggtaattgcatcacccatcagagcaacaaactccctctcataatgcccaaggtcagatttcaatgcctcattggcttgatgaagcagcaaaatttcatcatccttggtagttaactgctcagctagtcttgtgattttcttctccagttctcctttcacaaccttagcaccttcaatcgcaacctgaagagacccgacaactccacacagttcccggttcttttcttgcaagaactgaaccttctcttcagcttccagtagctcatcatccttctgcgtcaactgtgccatgcaattctcaagttcaatgaataactcctggcagacacttttattagtgttcagatcgaactccgaaaggactaatcgagtcctcagaatctctagcaagtagacgaaatattcctttaaattattattttccgattcaagcaccgtcgaccttctgctcagttcattaatttcgagatcaagatcacccttagccaaactcaacaaagccatctcatcagtaagagaaaccaatgcagatgctatctcattattatgtcccctaaagaacaaacacaagttttcaagcatcatgcactcttcaagaacagtaccattctcatcttccaagtaattgtacttctcactcaaggactggtattccttagataaggactcaattttcttggtcaggttggaagtttcatcttgtgaaaccctgtaggactctcttaagcaagatagcttctcttctatgacggatacttcagtttttagcacattttccctttcactgctttcctgtaatccttgcctgagctgttcattctccttcaacatctggtgattactagtttgcaaagcaagtgattctgctactccactttccacttctttctccagggcacacttacgtaagtgcagatctctgagctccatccctaactgcaacaaaacagttgagagaactgagagctcaatgtacatgagcctattcacatcttcggtttcatccttaagtttcagaatgttaatggtttcatctgaaacagtctgcaacagaatttcatcttcagctaaatcagcaggtcctaaatctttgcagatattcagaaccttcatttgctgtgaaatccctaccctcagtttttcattatgcattagcaatgtttctctctcttccttgttatatctggcttcctccatcagctctgaaactaacattgttgcagaatgatttgcctcagcatacttcttttcactgaatgcaagaagtatgctgaggcaaatcattctgaaactaacattgttgcagataactgtatgaatagaagcactta

SEQ ID NO: 36320 - DNA, 264 bp, Setaria italica
  Peptide Sequence Number=SeqID_102294
aagcatccagaagtgactgtcctttgacccaccaaatgctatccaacatttgcacaatcgccagtccatgcttcaagaagttgctgatctgaacttgtccaatggctatggtgaggtttgcactccacggcagctggttatcatgaaagatccgtcttccatacctgatgcagttgccaaggctggactaaccttgcccttggttgccaaaccattggttgttgatggaacatccaaaatctcatgagctatcccttgcatatg

SEQ ID NO: 36321 - DNA, 375 bp, Setaria italica
  Peptide Sequence Number=SeqID_102295
tagcctatgttacatccttgctacttcaatttgtaggtatctatctattaaggtgtgctgttgaagctgcctcaataaaatttcatatgttgctttggatgtttctgctctttttctcttttgatgtttgtataaatatgactagtatgttcttacctgccttgtcgttatgctattgatgagtgttttgtactgttttgctatattgcatttgttcaggaagaaaggcattcatttcgcatcaattgatgagactcgtcctctctccgaacaaggcccatttgacatctatttttgcacaaggtccgtcgtttggtctttatctttgagatgatattgcagttttgggtatcctttatttcttacataggtttt

SEQ ID NO: 36322 - DNA, 339 bp, Setaria italica
  Peptide Sequence Number=SeqID_102296
tttttgtatgaatgtctcaaggtaaccttcagcagcaattggtaattgaatccatgagttctgtttgcctttaacttctaagttcagaaagattttagaggcttcaaggtgtccacaaccacaacagagcatcaggttatcaaagattatgcacgccttgcatctgatgaggactagctacaacattttgttgcaaagaagccaaggtagggtctcagtttaacgatttacacaggttggcaacaggacaacgaacatttcttcccatatcatccccgcccacatgctgcatttctcctttgacttctaatatgcacttcctgtcaaggttaaccccca

SEQ ID NO: 36323 - DNA, 278 bp, Setaria italica
  Peptide Sequence Number=SeqID_102297
aaaccattggttgttgatggaacatcaaaatctcatgagctatcccttggcaactgcagctggttatcatgaaagatccgtcttccatacctgatgcagttgccaaggctggactaaccttgcccttggttgccaaaccattggttgttgatggaacatcaaaatctcatgagctatcccttgcatatgcggacaacacgtatagtttcaccaacaatatataccttaaacaggatcccaccatggttgacaaattcctggagaacaagaggaggatc

SEQ ID NO: 36324 - DNA, 475 bp, Setaria italica
  Peptide Sequence Number=SeqID_102298
gtctccatcttggcaagcttctctacgcttcagctcccgcttaaaagcatcttgtacttgctttgcacgaggcttagcaagaagtcagtaaatatatgctcatatcctggcatcttgccgtaccctgcagaattttggctacaacaatcaaaaaaacacaacaaaggatagcaatatgacactttgctttgcaacaaattgtgagtgttcctattgatggtcatgtgatatgctttgagagcagttctgaaaaggtaaaagaagcttatgcaatagtttcatcatggaatgtgtaagtttacccaaaagaatttgttatgatcttatctcaaataaagccaaccatgtgaatttcttctgaatcatcatgctgcggtcatactctgcatgtctttaaatttcacccagaagtgcatctgttgctaaaacatgcgcataaaatggcgcactgtggccactacaaatgcagcaacag

SEQ ID NO: 36325 - DNA, 628 bp, Setaria italica
  Peptide Sequence Number=SeqID_102299
ggcgggctgcggcggggggaggccggtgccgctgaccccgcccgcccgccctccgcggggcgagcagcggctggtggtgggctacgccctcaccaagaagaaggtcaagagcttcctgcagcccaagctgctcgcgctcgccaggaagaaaggcattcatttcgcatcaattgatgagactcgtcctctctccgaacaaggcccatttgacatcattttgcacaagcttactagcaaggagtggcagcaagttctggaggattatcgtgaagagcatccagaagtgactgtccttgacccaccaaatgctatccaacatttgcacaatcgccagtccatgcttcaagaagttgctgatctgaacttgtccaatggctatggtattgtttgcactcggcagctggttgtaacagcaatgttgacattcatgtattagcaaatagatttatgtgatgagttctgtttgcttttattatgtgtgtaagttaacttgatatgttatggtctagagtaacatagagataaagagcaggggatggagttagttgattgctcaagttattgacaggataactatggcatggaatcagagactatgtgggagctctactttctaaatgctcataat

SEQ ID NO: 36326 - DNA, 844 bp, Setaria italica
  Peptide Sequence Number=SeqID_102300
aggttggcaacaggacaacgaacatttcttcccatatcatccccgcccacaggttggcaacaggacaacgaacatttcttcccatatcatccccgcccacatgctgcatttctcctttgacttctaatatgcacttcctgtcaaggttaacccccatccccttgctatgtacaatatggaaaatctatctagttgccaccgaccactgctacatggctgtttggcatctgtcaatagtctccatcttggcaagcttctctacgcttcagctcccgcttaaaagcatcttgtacttgctttgcacgaggcttagcaagaagtcagtaaatatatgctcatatcctggcatcttgccgtacccaggaaaatagttgatgtcgatgacatagtaccgatcctttcttccatgttctctaatcatatctatgttaaacagtctaagacccagtcggcgtcgaagctccttgccaagtttttctagaagtggctttggaggaagttctgcaatagaagggtcaacatctgcatcttctgcattatttgtagcacaggaaactcttggaaaccgaaagatgccatcattgtttcccaagtcatatgtgttgacatcaggaagcgaaaaccggcggacaacacgtatagtttcaccaacaatatataccttaaacaggatcccaccatggttgacaaattcctggagaacaagaggaggatcaagcaaaggcaacgatgactccacatatgcaagggatagctcatgagattttgatgttccatcaacaaccaatggttgcaaccaagggcaaggttagtccagccttggcaactgcatcaggtatggaag

SEQ ID NO: 36327 - DNA, 512 bp, Setaria italica
  Peptide Sequence Number=SeqID_102301
aaagttttaggtttgggcaaccatggaattcatttcgtgaggcatgaagttcatcaatttaacctgcagtatgctcccctgaatttgaatgcctgctaggttacatgttagttaggtccaggctttagattgatttctcatttatttgggaagtgtgcgaaactaaatccgtatattggtttgatgctttaagtggatgacgtgcatggaaccaatttccccagaaacagaatccatcactgggatgtggatggatggtgcttccagagttgttttaattttttgttttgcttcgtggttaacatcctaggcaatggcagcctgtagtttcagattgttctgattagttcctcctcatggctgtatttatcctgataatttaggtgttcattgatttgggaatgtaatttatacctttcaaactgttggtgcaacatcatttggttccctgtagttattgtcagatatttggcgctctggttgatcacctaactcttggttgagtataattc

SEQ ID NO: 36328 - DNA, 996 bp, Setaria italica
  Peptide Sequence Number=SeqID_102302
ggccagtgccgccgtggccgcgcaagcgcggcccaactcgatggcggagcgcgcgcggctggcgcggatgccgcagccggagcaggcgctcaagtgcccgcgctgcgactccaccaacaccaaattctgctactacaacaactactccctctcccagccccgccacttctgcaaggcgtgccgccgctactggacgcgcggcggctccctccgcaacgtccccgtcggcggaggctgccgccgcaacaagcgctcgtccaagtcctccggcgggtcatcctcctcgaagccgtactcgtcggccaggcaactcgctggtccatcatcatctacgccgtcgtccaccccgggcgccaccggtgcgatcatcccaccgagtctcggctcgttctcacaccacctgccgttcttgggcacgatgcaccagccagggcccaacctagggctagccttctccgccggcctgccgccgctcgggatgcagcacatggacacggtggatcagttcccggtggcgagcggcggcggtgccaccatcggtgcatcgctggagcagtggagagtgcagcagcagccacagcagcagttcccgttcttgacaggaggaggaatactggagcttccgccgccggcgatgtaccagctgggtttggatggtaataaccgtggaggcagcggctcagctgcggcggcggcgttcacgttagggcagaccagtgctacgacggcaaggcaggaaggatcaatgaaggtagagggcagtaaaggacaggacatgagcttacagaggcagtacatggcggctctacgccacggatcacagggtgtctgggatgggattcatgggaatgccggtagcagtggtggcgacggtggcggcaatggcggttctagttggcccatgaacattcctggattccattcgtcatcgaccggcggcggtaatggcagtggcctgtaatgttacggatgcttggccagcaatgttctaatcaa

SEQ ID NO: 36329 - DNA, 280 bp, Setaria italica
  Peptide Sequence Number=SeqID_102303
gtccccctactccttgtaattatggtgattcttccaggcttgtttgaagggttcaaaatctcaatcagcttcaccaagtcactggggttcattttgtcactcacctacatttccacaaattgcatgccaatttgacaatcagcatcacaagatattgagtacaataactagaattcacttggccaatacaaaaatggatttataaagctgacctttatgccaagagggttggcaacacctctgaggaattcaacatgagccccatcaagttggcgagtgc

SEQ ID NO: 36330 - DNA, 438 bp, Setaria italica
  Peptide Sequence Number=SeqID_102304
gccttgatggtgttaccgtgcatgggatcagtgatccatgtgacaattagtcctgcttggcggacagcacgaataagatgaggtaacttgaccctcatgttctccgcccccatccttgtaatgatggtaattctcccaggcttgtttgatggattcaatatctcaatcagcttcaccaaatcgctggggttcattttgtcactcaccttgatgccaagggggttggcaatgccccttaggaactcaacatgagcaccatcaagctggcgagtgcgctcgccaacccagagcatgtgggcagagcaatcatagaaaagaccagaggtggaatcctgacgggttagagcttgttcgtagggtaggaggaggcattcatgtgaggtccagaattcagtagtcttcatcaacgtgtggtccgctactagtgcgactgagtcg

SEQ ID NO: 36331 - DNA, 761 bp, Setaria italica
  Peptide Sequence Number=SeqID_102305
cttcttggtcatgcacatcgaagaaatgcacgtacttcagcctgttaggtagtaaagctcatgattagtcaacatattggttgtaaggctaggatgctcctagataaactgtaaatgttccagaagtacaaagctagagtaaacaaataaacatggaacataagtaaaatggctactatcagaacacaggtgaaaacacgtataatagcaccacctaaaatgcagactcagtatgcttaaaaacgtattaataattttactccaatttattcacttgtcgagtagcctaagtagacatacgtctattaaattatagaacagatagactcttctgacagaggatacctatgcccaaactaataagttcagatatcatctcatttgtccaatacaaatgaatgcccaaacaaaattgagcctctatcagatttatcatactataaatgcataatatcacagaatgacatggaagttactgatggaaggcaactcacaagaatggagtcgaatggacgagtcttcaaaccacaaggggccttgattgtgtttccatgcataggatcagtaatccatgtgacaatcagtccagcattgcggacagcacggataagatgaggcaacttcactctcatgttctctgcccccatccttgtaattatggtgattcttccaggcttgtttgaagggttcaaaatctcaatcagcttcaccaagtcactggggttcattttgtcactcacctttatgccaagagggttggc

SEQ ID NO: 36332 - DNA, 1719 bp, Setaria italica
  Peptide Sequence Number=SeqID_102306
tttttatatttcattattattctctcatatatggtataaatagaaaacttagtgtcgacaagtgcagtcatatgcattacatagtatttacccacacaaaagataaaaaaaatcgaacagatccatcctggagtgcggacagctcataggcatatagttttaccaagagcaactaccaacaaatggaatacacacatctctcttgctggccctgtctacccattcagaaaccaaaaggcggcaagggcaagatgttgttgagaccagacgatgaccggatcctcctcttcctcagcctctcggcaatgataaatgagagctccagcgactgggacgcgttcaaccttgggtcgcagtgagtgtggtagcggtcgctcaggtcatcaaaagtcacggtgcgtgatccaccgatgcattcagttacgttttgcccagtcatctcaaggtggaacgcctcctgggtggcttcccctcttgctcgtgcacatcaaaaaaggcccgtacctcagccaaaatggagtcgaaggggcgagtctttagaccgcaaggagccttgatggtgttaccgtgcatgggatcagtgatccatgtgacaattagtcctgcttggcggacagcacgaataagatgaggtaacttgaccctcatgttctccgcccccatccttgtaatgatggtaattctcccaggcttgtttgatggattcaatatctcaatcagcttcaccaaatcgctggggttcattttgtcactcaccttgatgccaagggggttggcaatgccccttaggaactcaacatgagcaccatcaagctggcgagtgcgctcgccaacccagagcatgtgggcagagcaatcatagaaaagaccagaggtggaatcctgacgggttagagcttgttcgtagggtaggaggaggcattcatgtgaggtccagaattcagtagtcttcatcaacgtgtggtccgctgttagcccagctgcagacatgaagccaagggcttcatcaacccgatgtgccaattcacggtacctgtcgccctgctcgctgtgttcggtgaaatcgaggttccactgcgtgacgcgctgcatggcggcgtaccctccggtggcgaacgcacggatcaggttgagcgtggcggcggattgggcgtacgccctgatcatcctctgcgggtcggggacgcggctcttctcgtcgaacgcctcgccgttgatgttgtcgccccggtagctgggcagcttcaccccgtccctgacctcaaacgggtccgacctcggcttggcgaattgcccggccatcctaccaaccttgacgacgggcatttgggcgccgaacatgaggacggcggacatctggaggaggacgcggaaggtgtcgcggatgttgttgctgttgaactccttgaagctctcggcgcagtcgccgccctggaggaggaaggcgcggcccatggcggcgtcggcgaggcgctcctcgaggtggcgcgcctccccggcgaacacgatcggcgggaaggcctcgatcgtcttgagcacggcctccagctccgccgcgttcgggtactccggcagctgcagggccttcttcgacctccagctgtccaccgcccacttcgcaggcgccttcggggccggggccggggccgcgacaggggccgcctccttctcgggcgcgaccgtcggcgccgaggtcttcgccgccgccgggacgccgtg

SEQ ID NO: 36333 - DNA, 1139 bp, Setaria italica
  Peptide Sequence Number=SeqID_102307
tttttgttgagaagggtgttcgaatatagccatctagtatgtgtttatctaaatttgctgttctagagctacagtatacagagagatattagtagtattgtcattcatgtaccaacattctatacatttcccctaggaactaccaagcaactagtcctggagctcattccatcctatgaacaagtgattagacctccaatgccaatgccactggaactctggccttcccattccacagcttccaccacagattcgtaaagctttgtccatgagcaaccatcacctgtcccaacaacatcccaaaatgtcaaatttgggctcggcgggcatgtggcaactaccatgtcagcaatgctgccaacgtttgcgactgatcgtgggaagtccaatgccaagttatcaactttgtgttcatagattttcccgttcctgtcaaccttgtacctcgacgtgccactgaagcagccatatgattcccaggggacacgcggggtgccccacagctcccaccggacgactatggagttctctgtcagttgccaaatgcgcgatacgtcaagcccaatttctctgaatagtaggcgcccatggaatctaagtgcccagaagatagtcttgtaattgtcaatcccttggaaagtgttcagtgggtcggtaaatgtgatgtcttcacgatagatatcgtagttgggttcccggaagaagacgtcgggcaggtcctctcgcagcgttcgcaccgccgtcccaagattgaggtaaaaatctgacctttgcgggtccccgccgcccttgccccggttcttggttgccgtggacttggccgacgggacggctgcttgctgtgaggcgctgagcaggagcaggagactgaggtggcccggggtcgcggcctgcgccgcgccggagcctgagccgtggatcttgccgccgccgccgtggcctggcaaggccagctggggcttgaggaggggactcgggggcagcttgcaggacggcgtggtgagcttgggaaggaggaacgccatggcttcctgctcctcgctctttcgatttttctggtcgcctctgcttcgtctacgagcctcggtgtcccatggagaagcttccaaatccaacgggggctgcgttcttgggagctt

SEQ ID NO: 36334 - DNA, 426 bp, Setaria italica
  Peptide Sequence Number=SeqID_102308
catggcggcctctgctggtgtggcttgtagggaggctggtgtacatctcgggtttgaagaaaagttagtttctgttgcggagaaaggctcacacacaatgttggtgtcatccacaaatacggcgatggcatggtgcagatcgtacaggggaaatctgccattggatggctcaccagagaaatgtggtggggtgtatgctggggttgttactggaatttacttgcagggcctagcggttgagctggatgacactgtgtggctgctcatagatgatctgctgctcctgccaccacattgtcttcgagttggtgcttttatctctgtaaagaacttttcatgcaatgcgtctgaatttgcttggacggaactgttctgcttgcaacatgcagtaaaacttgacctcactgtaaagtctttctccctggt

SEQ ID NO: 36335 - DNA, 676 bp, Setaria italica
  Peptide Sequence Number=SeqID_102309
tcctgcagtcacgcctggtggagattgcagcaaacttcccatccttggtaaaagaaacacctctagaagcatgctttggccactggacatgcacgcatgctgtatttacaagagaccacacggtaagacggagctgaaactcggatgtagtgagtatatgacgactgtcagggctccagcgagcatatgcaatccctgcagggccttcatcgatcttgcaggtccagtcaggctggctcagtgaccaagcctgaaccatgggccgcttgtaaagtccacatagaatatattctgaatccgaagcccactccagagagcttatcttgtccacacatgaaaacaattgtaccaccttcagggagacaacgtcccggacgacgaggcggtagtctacggcgacggcgaggaagcgcgcgtcgggggagaagcagcatgggcccgtctgcttgtacggctccgtgaactccattcccttctccctctcacccgaggcagccctccaggtgacggggagcggagatgagtcctctggctgggcggcggggcggcctagtgctccggcgaggtggggtttcgatttttggtaaggttaggttagtttaagggtaaattttaagttaaaaattttaaactttaaacgtttaaaagggggtttaaaaacttaaaaagttaaaaa

SEQ ID NO: 36336 - DNA, 693 bp, Setaria italica
  misc_feature (1)..(39): n is a, c, g, or t
  Peptide Sequence Number=SeqID_102310
nnnnnnnnnnnnnnnnnnnnnnnnnnnnnnnnnnnnnnngtcctcggtacgttacaatatatatatgcatagacatgtacaatgtctactagcatcagcagtagcaacaagggttgtcgaagtagtgacaaaccaacaaaaaccaccgcaacattgtagtaccctgcatttctagtttttattactaaaaagttatccccgcagagctatcggtggttgctgtagacaggagtgtgcatgcagctctcggcgtatttcaccaggtctcgggggtaatgcaaacggtccccaaacctgtagccaaaagtttatgggaattggaggcgaatggaaatatttggaatcggggcaaactgaggtgaagtgtaccaagctcataagcttttttgcagccatggcgacagcaatgtgagcggaaatctttctgatgctggtgacaggcacgaaggttgatacctttcaattctctcgagtgacctgatcagctattgcttccactatttgaatgaataaaaccatcagattgcttcacacccaaccctccaagttcctcattgaaggaagccatcgtctcaacaacatatttgtggatgtccttccaactcctgatgttccaatcagaaccgtaggtttgatggactggagaataaataaagaaacattagtaagattttgatgaacaaccaccaaaat

SEQ ID NO: 36337 - DNA, 1930 bp, Setaria italica
  Peptide Sequence Number=SeqID_102311
tatgcattagactatgtacaatgtctactagcatcagcagtagcaacaagggttgtcgaagtagtgacaaaccaacaaaaaccaccgcaacattgtagtaccctgcatttctagtttttattactaaaagttatccccgcagagctatcggtggttgctgtagacaggagtgtgcatgcagctctcggcgtatttcaccaggtctcgggggtaatgcaaacggtccccaaaccaagctcataagctttttgcagccatggcgacagcaatgtgagcggaaatctttctgatgctggtgacaggcacgaaggttgatacctttcaattctctcgagtgacctgatcagctattgcttccactatttgaatgaataaaaccatcagattgcttcacacccaaccctccaagttcctcattgaaggaagccatcgtctcaacaacatattttgtggatgtccttccaactcctgatgttccaatcagaaccgtaggtttgatggacaagacagcatcatacaaggtcgtcaaaggctcatgctcatttgcacaagatttttttttgaatgatcagagtctttacggagctaacaattaagtcatatttataaaatattgcatcaagccatcagatttggaaaccaattgcttgatcacaaattcacaactagcccgagcccctggtggcattcaagatcaaccttcaggtttatcctgtaccttaagcgccatacaatgggtaaatcacagattctgacaactgtttgagtagtctgctacttgcttcagatatggagtatacagcaccttcaactgagttgaatctcatgtaaaattttccatagtcgtaggtcggtactcctaaccccaagtaacaaaattctagcaatgtttatagcctgtcctggatcaaattcagcaccctctcataaaagtgagacaacacaacaaaattattgtcatgtgtaggttgaactgactggtgcctctttccgttgcttaaatgcaatctgtcatcaactaaactactgaaagatcatccccttgaacaactaaaaaatgtaaaggtaacagtcggataactcaaatatagtcaatgagaggtaagccaagtttcaaacactaggcattagttgtcttgcatgataagaagcaagatccatggtaataacaaacatgcgttggacaactttggttcctgcaaaataaaagactgatgtagcagaactccttgatcaaggacatggaaaggtgcatacataattattaccatttttaacaaaataaaagatggttctgagtaccgacatagctagcaagtagcaacttatttgattcctcaaactctagtacccctgattcaacacaatttaccatcttgtaaatttgaggccctgacatttgtatggaaccaccaatcctgagtcctgacaaccttgttaacggttttctcataggaattgcacaccagattacaatactggatagtgcagtcatggaaaagcatcttcattgtcaagagaaatatgcttgggaatatagtgtaatgccacaaaaattgctcaccggatagacagattagatatacagaaatttttaaattatttggacatatcaaaggcacgttgccctctcaagttaatataatgtaacgttgccctttgttgaaggtcttactaacaatggaaaacttaaaacaaaaattaaaaaatttcagttaggcactctactgtacattacaaaatttgctaatcttgaaggaacattgtactgtacatttaaaaaatctgctagtcttgaagttcaagtcctcaaagaaattggcatattcaagcaaccaaatcttgcaaatacacaagaattactctgtaacacacaggtgaaccaaagtatgaattcaggcaaagaaaataacgagatttgaaatagatg

SEQ ID NO: 36338 - DNA, 253 bp, Setaria italica
  Peptide Sequence Number=SeqID_102312
tcttttctaaactcgtctgcacgacattatattcctaatcgcgaacctcacataagttaagtaccaaaacgatcgagtcaggattaagagattccagagcgagatttagcaaagccttgttcaggattattcataaaactctaacacatcctcgaattttctctgcatcctcttcttaccgtgtgttcccacgggccatttcgctcgcgtttgcctccgccgccgctttggcctctgcctccgctgccgcttt

SEQ ID NO: 36339 - DNA, 699 bp, Setaria italica
  misc_feature (87)..(87): n is a, c, g, or t
  misc_feature (140)..(140): n is a, c, g, or t
  Peptide Sequence Number=SeqID_102313
tggaactgaataagcattccgagccactgtggaatgcttattcaacagttatgtcacgttgcaaggaagttgacagcgtgcatttcncgttgagccaggcgaggatgtcgccacgaacgcgctcgatgttctcgtccagntccccgaagagcaaggagtggagcatcccgtcgtatatcttgatggtcttgtccttgctggctgcggcctcgtacagggcgcggctgacttcggggtcggtgacctcgtcggcgctgccgtgcacgacgaggaacgggatggtgacctcgccgaggcgcttggccagctcgtcggtggcgcgcagcagctcgacgacggtgccgagcctggggcggccgttgtagcgcacggggttgcgcgccgcaatgacgcgcttggcgggcaccttgacggacttctcgatgaggtcggcggtgggcacgatggcggcggtgggcgcgaaccgggcgacgaaggtgaggatctccggcagcggccacggcgggcggatccggtctgagatcctgcacatgggcgcgacgaggacggcccccgcccactcctcgggcggcgtgcggaggtggatgagcaggcagatggcgccgcccatggactccccgaagaggaagcagggcaggcccgcgtgctcctcccgcgccctgacggcgcggaagaaggcgaggaggtcggcgacggcgg

SEQ ID NO: 36340 - DNA, 776 bp, Setaria italica
  Peptide Sequence Number=SeqID_102314
atgtaagaggggcttttggctaggtataagccaattatatgcttggatggcttccacattaaaacgaggaacactactaacaactattggtatggatcctaataattgtatttttcctatagccatggctgttgtcgaggtagaatcacttgtatcatggaaatggttcttggaaaccctcaaagaagacttgaagattgacaacaccttcccatggaccataatgacagacaagcaaaagggtctcatcccagagcacaggttctgtgttaggcacttgtactctaattttcaagaaaaattcaaaggtgaaatcctaaaattagttgtggtcatgtgcatgatcttccccagagacaacttggaatattcaaatggagaagatgaaacacctaaatccagatgcacgtggatggttgctgaaaatgcccccaaacacttggatgctagagagttacctattatgagcatgtttgagaggattaagtgctagctgatgaccagacactacaacaaacaacaagagatggcaactaagattacaggatccttttgccccaagatcaagaaaaaaatgaatttgccaaactgtgctatgcattgccattaggaaatggtgtgttccaggtcctcatcaaggattaccagcacattgtggacataaatgccaagagctgtgattgtagaagacatcaattggtaggcattccttgcagccatgccatatcttgcttaaggcatgagaggatttccccagaatctgttcttcctagctg

SEQ ID NO: 36341 - DNA, 562 bp, Setaria italica
  misc_feature (534)..(534): n is a, c, g, or t
  Peptide Sequence Number=SeqID_102315
caacatgcattgcaggcattgttccgaagctagacacaatacagctacttgcaccctaagaaatggacttcaattcagaagatgccaaaaagttggtggcaaatacaaaagctcaactgcaaactgaggcagcacaagttgggacaccacaggagcaaccacaagatttgcctatcaaccaggaggtaagagtacaagatgatgtaggttctcaacaagtgacacaagctagtacagcaaccttgtctcaactctttgaggagtcccagagctctatgctgtctcagccttaaggccccttaccagaatcaacctttatcttgtctaaccagccaattccaaggccaggaccactgacaaccatcaccaaggcaggcagggcagctgcaaccaacaagaggaagaaattcacaagcaaaaaaagacagcaaggcatctgaagcaaagaagaggaagacctccatagctagcagcaaggcatactaaggtcttttggtggcaagatgtgcttataacgaacatcaaaacttttgngcaagatgtgttgtctcttgctcttttg

SEQ ID NO: 36342 - DNA, 1293 bp, Setaria italica
  Peptide Sequence Number=SeqID_102316
acgctccgcagcaagaagactcatcgagaagaagaagagagcagcccgtgcaagagaagctggatcaaagtccgctggaccagagtcccacggagacgggggatgatgttggcgagattaaggtaaaaaggggaagccgccccaatctatgccatggctgttgtcgaggtagaatcacttgtatcatggaaatggttcttggaaaccctcaaagaagacttgaagattgacaacaccttcccatggaccataatgacagacaagcaaaagggtctcatcccagagcacagagacaacttggaatattcaaatggagaagatgaaacacctaaatccagatgcacgtggatggttgctgaaaatgcccccaaacacttgggtaagaacattcttctctaaatttccaaaatgtgacatattgcagaacaacaattgtgaggtattaacagctatatcctagatgctagagagttacctattatgagcatgtttgagaggattaagtgctagctgatgaccagacactacaacaaacaacaagagatggcaactaagattacaggatcctttgccccaagatcaagaaaaaaatgaatttgccaaactgtgctatgcattgccattaggaaatggtgtgttccaggtcctcatcaaggattaccagcacattgtggacataaatgccaagagctgtgattgtagaagacatcaattggtaggcattccttgcagccatgccatatcttgcttaaggcatgagaggatttccccagaatctgttcttcctagctgctattcaattgaggctttcagcaatgcttattcttgtagcatttggccttgcaaggatagaacagagtggcagaatgtacatggtccagaggtgttaccacctgtgtatgaaaagaaggtttgcagacccctaaggctagaaacaagtagcctcatgaagtacggggaccaaatggactaaagctatctaagcatggagtcaacatgcattgcaggcattgttccgaagctagacacaatacagctacttgcaccctaaagaaaatggacttcaattcagaagatgccaaaaagttggtggcaaatacaaaagctcaactgcaaactgaggcagcacaagttgggacaccacaggagcaaccacaagatttgcctatcaaccaggaggtaagagtacaagatgatgtaggttctcaacaagtgacacaagctagtacagcaaccttgtctcaactctttgagccaattccaaggccaggaccactgacaaccatcaccaag

SEQ ID NO: 36343 - DNA, 214 bp, Setaria italica
  Peptide Sequence Number=SeqID_102317
cagcagccccagaggccatctctcctgaggcatcaaaatcgcggagtagggccaaatatcgcaagtgcactctagttccactcggatcaggaaataaactgcagccgatttggtacagaatgtaagctcgtgcagcatactctacatctgactgattagcaccttctggtaatgttttgaaagtgtcatgcagccatgcaatgttgatagaacc

SEQ ID NO: 36344 - DNA, 239 bp, Setaria italica
  Peptide Sequence Number=SeqID_102318
tgcggacgaagctcgagacgtcgccgaggctgatgggaggcacgcctgggatccagtcgatgatcgtcttgtccaggtagccgttcgtcaggtagctctcatctttgagtggcacgtagcctctcttccttagctccggcgtccacatgtacgccatcagcgaggccgcgctggcgcaccagaacaccatgctcgggatgcccaggtcccgggccacgcccagcgcgaagtcatcacgg

SEQ ID NO: 36345 - DNA, 222 bp, Setaria italica
  Peptide Sequence Number=SeqID_102319
attcgcgcggctctgggtgcgcgtgaagcgcttcgtgaggtcctgcgagaactgcttggcgcggctggcggtggccttgagctcctgcgagaactgcagcaggcggtgcgaggaggtccggcgcatggccggcgaccgcgaccgcgacggcgccccggaagacgacgcctggggcggctccgggtggcgccggggcggaggaggcgccaccgacgaaggcga

SEQ ID NO: 36346 - DNA, 326 bp, Setaria italica
  Peptide Sequence Number=SeqID_102320
cagccggcggcgacgacgccgtcggggacgaggactgcgagggcgactgctcgacggctatggtggccgccgcgcccacctcctcgatctcgccaccgaggccgcgggttccgccgtccaaggacccattggcgcgcgggaaggccgggtccttgggcaaatgggggcggctcatcacatccggaggcgcggaggggggagatctgggcgcgggcggcgcggattcggggcgggggcccgcggattcgccgtcggtggcggcagcggaaggatacaggggaggagatagtgcgaggaatcggattcggtagaggagggggggtagg

SEQ ID NO: 36347 - DNA, 332 bp, Setaria italica
  Peptide Sequence Number=SeqID_102321
tcgcgcggcgcgacgccgccttctatgacgacgaagaacggggagtaccatttcccgacggcagccgtgttggtcgccgccgggaacgcgtcgaggatggcggcgtcggggagctggcgggaccggagggcggcgtcgaggccccgcgcctcgccgagctcgaagtccttgggcttggacgcgtacacgcgccagcccttcttgcggtagaggaagtacgggaagccatcgggggcgacggccctcgccgtgaaccgcccccgccggcgcggcacgatctcgatctgctggtagatgtccgccgggtcgaacggccgggctcgacgtcgctg

SEQ ID NO: 36348 - DNA, 467 bp, Setaria italica
  misc_feature (384)..(384): n is a, c, g, or t
  Peptide Sequence Number=SeqID_102322
cggcggaggcgctggtgcgcgcggccgcggagtggctgcggggcgcgagggcccagtggggcatcagggacgtgatgctctcggggaaggcggcgctggaggacatggagcggggccggcggtggatgtgcgtgggcgaggaggagcgggaagtcggcgcggcggtggaggggttcgtcatggacgagctcgtggacgagctggtcgaggagttggcgccttgttggcacggtgatggccgtcgacggagtagcaggtaggaagtgctcgtcatcactggatgttgtccgaagaacgttaacttgaatgttgacgtcacgaggtccggccgtggacagaagagcgtgtacatgtccgaggtagctactagttcaaaaattttgnggttttatagctgggattatgatccatgcgtgatgcgtcccatggtgaactcgtagtagtgttgcccgtgccccgtcgggata

SEQ ID NO: 36349 - DNA, 878 bp, Setaria italica
  Peptide Sequence Number=SeqID_102323
gttctactttagttttttttttttttttgttaccaatatccctctttcggaagcattcacttgagagtaagtaaacatggcacaaaatgcaatgatacgccaataaattcagccgaggataccactacaagcttaccctacaccttcaatctattagcggacttttacatcacagcatccacagaataacatacttgcctagagacctcaagaatgtctcaatctcacaacacaaccatttctttctttcttttcagagatgagaatactggacacctaattccacacaaaaaactggatggtattgggatggattgcaggaaggccttggagtagttgcaatcaacaagcagatgtctaagccttagcttgtacagcttgcatcctctgttgcaacttgaatatcgattccttcttgctgttctgcttgtcctccaaatccttcagtgcccgatccatccgcttcagctctgccgagatgtactcaatgcgcttcttgacgttggccttggcctccgcaaggtcctgcttgaccagcaccggtccgatgagcttgtacacgttcgccccatcgttcagtagctccaactccttgaggacgagctcgttctcgccaacctggatggtgtactgcttgcggacctggtggttcttcgagatgtctttctggatcttgctgagtgcgttagcctggacctcgagatccttctgcatctcacggacggccgccggggtcgacgacgacgccatggcctgcccgctgctgctgctgccgcttcctccgccgccggcttcgggaaggagtggctgagtgggacgtgggttgggaccttaccttacgtacgtaccgaccaaatagacaaggaactaaattaaga

SEQ ID NO: 36350 - DNA, 500 bp, Setaria italica
  Peptide Sequence Number=SeqID_102324
acgccgtgcacgttgatgtcgaacaccttgcgcacctcggcgaagtccacgttgcggatgtcagtgaccttgctccccgtgatgccggcgttgttcaccatgacgtccagcgcgccgaacctctgggccaccgcgtcgacggcggcactcacgtcctcctcgaccgtgacgtcgcagtggacgaacatgacgtcgtcgccacctccgagggcgtcgcgtagcttctggccggcctcgtcctggatgtccgcgatgcagaccttcgcgccatggtttttgaagaggcgaacgatggtttcaccgataccgctggcaccgccggtgacgagggcgaccttcccttccaaccgcttcgtcatggaggaggaggatggcgaggaggcagcggcggacatggtctctctggattggatcctctgcctccggcgtcgcgaattcgatcggtgcgcggcgagacgggagcgtcagaaaaatctcctcctctccttgtgtctcatctc

SEQ ID NO: 36351 - DNA, 1324 bp, Setaria italica
  Peptide Sequence Number=SeqID_102325
tttttttttttttttattttttggtaagagcagttcttatatttcattaagtctcatcgcgagaaagtttatctgatcacacgctgctggaattaattcttgcacattctcattgatcatacacacgaattcggcactgtttatttcgaaggtccaatcagttgccctacattcatgtaccgggctcattagtcttgcggacgcttaatcttgctacaaatatagcacatgccacatctcggaacagcagtgccaatactcgcagagcagagctggcataatgctgcgaacagctttgaactaatcctcgaacggtttcaggttatggttcacggctgtgaagccaccgtccaccgtgaggttgagcgcgctgacgtacctcgcctcgtcgcttgccaggtagagcaccgcctcggcgacgtccctgggcatcaggtcgacgcccttgaggttggcctcgccgccgacgaaggccaggaagtccttgaccgcgtcgtcggcgcgcgcgccctttggcaggtgcggcatggacagcgccgtgggcacggcgtacggcgagacgcagttcacgcgcaccccgtggcgcccgagctcgccggcgacgctcttggtgaggccggcgacggcgtgcttggacgccgtgtacgcgtgcgggcccatcccgccgatgacgctggccacactcgccagggacacgatggagccccgcttccgggggatcatgacgcgcgccgcgtgcttcatgcccatgaacacgccgtgcacgttgatgtcgaacaccttccgcacctcggcgaagtccacgttgcggatgtcagtgaccttgcttcccgtgatcccggcgttgttcaccatgacgtccagcgagccgaaccgctgggccaccgcgtcgacggcggcgctgacttcgtcctcgaccgtgacgtcgcagtggacgaacatgacgtcctggtctccgagggcgtcgcgcagctgctggccggcttcgtcctggatgtccgcgatgcagatcttcgcgccatgctctctgaagaggcgaacgatggcttcaccgatgccggtggcaccaccggtgacgagggcgaccttcccttccagccgcttcgcggaggatgaggaggacggcgaggagctcgcggcggacatcgtctcgagatcggagcctgcctccggcgtcgccgaatccggtgcgcgtcgtcgtggcgatagcggggaagatgggtgggtaggcgaggcgagagcctgctgtggtcgctcagtggaggtcgcagtagtgtcgcacttcgtcgtaatttcgttatttcggtttgttcgttcggttctt

SEQ ID NO: 36352 - DNA, 382 bp, Setaria italica
  Peptide Sequence Number=SeqID_102326
ctgggggctgaggagcttgccgaaggtgaagagctccgggcggcgcaggggcagtatgacgagctcgtagagcgcctgcttgacgtggtcgaggccgccgatggagtcgaactcgacgtcgatgctgtcggggttgatgacgtcgcacgcaatcacatcctcgtagggcgtggtggagacgagcggccggccgaggcgcctggcgatctccttcttctgctgcgcggccttctgggaggcggcgcggttggggtcgaggtggcggaggccggcgaagaggacgaggcagctgaaggcggcgctggcggcgtagagcacgagctcctgcacgaaccgcgacgacgactccgacgacttcatcgccccgctgctcgccgggcgg

SEQ ID NO: 36353 - DNA, 330 bp, Setaria italica
  Peptide Sequence Number=SeqID_102327
ggttggatgatttttcggtggaacagaacaggcaactgctgttgacctgtcaaacagagaagtgcagcatttactaccatcaaacataaaaacgttaaatcaatccctatgtaaatcgactagttaattagaggattcgatgagctcaactctttattgttgttcagaatacaaacatggaaaatttattccaaatcggaacagcaaagaacatgtggatacaaaactaactgctctaacaaatcatggcattaccgtgtgtcttaccgtgtgtttactgtcatgagaagaacatgtcatgagaagattttaccgtgtgttttgtgttta

SEQ ID NO: 36354 - DNA, 239 bp, Setaria italica
  Peptide Sequence Number=SeqID_102328
ggtgctagcaaatatttgtggctagaatctcaagaaaagctagtgttggcatggcattactacaatccattctgtcgctcaattatgtagatttatccatttctgcatacacatcagatagcttagatggtttcatatattctccgaaaaacatttttatttatgcagttttcacatccataaaaacttggagcagtgatctgctggatgtatacttacaggtgatgggagtttcttag

SEQ ID NO: 36355 - DNA, 429 bp, Setaria italica
  Peptide Sequence Number=SeqID_102329
taaacaaggaggaccaagacaaacacatatatggacgttgagaactttctgctgcttccagcagcataggcccccatcagaccaaagagatccagtgtcatggctgtttgcaggatgtggcgcttaatggcaccaacggtaatcagttgactctgaagtaaggcgatgatcaccaatgatgctacaaaagctgtggcattgcagtagaagaatgccttgtaacgccttgggttcacagtctccaagattggatcccctgcaacatgcccatcgttatctgtccaaaagccacctggtggattcagcccagcttgatatgtgacagtggcagcaaggatgccgagcaataggagatatgtccgcagtttctgtaaatcatccttaggatcaccaaattgcttgaaagtttttgttaggcagctgtctatt

SEQ ID NO: 36356 - DNA, 246 bp, Setaria italica
  Peptide Sequence Number=SeqID_102330
gagcgcgatgaggcgtacgtcgaggaggttgctgggaacgtcaccgcggacgatgcgctgcgcgaggccctctacgacggccgtcttcccgacgcctggctcgccgatgaggaccgggttgttcttggtgcggcgcgagaggatacgcaccacacggcggatctcctcgtcgcgcccgatgacggggtcgagcttcccggcctgctcaacgaggtcgcggccgtaggtcttttagtcgtccttgta

SEQ ID NO: 36357 - DNA, 658 bp, Setaria italica
  Peptide Sequence Number=SeqID_102331
acctactaaggaaacaaaccaagccaaaggcaaacaccaaggtctcatccaaggtttgtgagaggcaattaggagtgctcaagagggatagactagatagttctatagcattagattcttgtatagggtaagaatcaaagggtcctagagggtcgagtagggttgcgagggagcgacaattacttgtactcttttggagttgtgcttaaagaatttgcggtaggctttgccaaaatcctattctcttgtcatggttgcttcaacgtcgtcatctagtattttctacgagcttcatctacattattcttgatacggtgcaacctcgtgtcgtactcacaatatccttgctagatccgggggctgctgtgcataacaaggggtatcggattctaaaaccacctctcacctttgactttgaataaacctgataagcgcttatgtaattgctgctaaatattcaatttccttttttatataaatgttccaataaccaaagcaataaacgcttaagtaatcacatttttatatgatctggttatttcctttattgtaacatcttccctacttggcactaactttaagtcagactggatgaataatagtgagcagatcgaacaactaaaagtgaccaatatttgggtataacacaggtaaatta

SEQ ID NO: 36358 - DNA, 237 bp, Setaria italica
  Peptide Sequence Number=SeqID_102332
ggagaagaggaagtgtacgtaaagatcccagctgatctcatcataagtgctgagaaggccaagtcaattgttcaggatattgcaaaggttaggttggagaactcccttgttcaggctattgccttgcttcggcagaagaagagagatgatgtgctttcttctctgaatgacttgctcgcgtgcgatgccgctctcccggtgtgggccatgacagaggttgtggtgcagggacagcca

SEQ ID NO: 36359 - DNA, 305 bp, Setaria italica
  Peptide Sequence Number=SeqID_102333
ccggggagtgaaatcgccggataagttcgtgctcgtcgagaaccgaacattccaggagtgcgcagccgagtgcaccagaaactgttcgtgtgtggcgtatgcttatgctgatctgagcactagcagaatcaagggggatgtgacgaggtgcttggtgtggacaggagagctgattgacacggagaaaataggtgtcaatgctggcagcgaaacgctgtacctccggattgcaggcttggatgcaggtatgatggagggcgaagagacaaagcactgaagactgtcgcctccctgtcttgtttgac

SEQ ID NO: 36360 - DNA, 452 bp, Setaria italica
  Peptide Sequence Number=SeqID_102334
ttttttttttttaactaaatgtttatccttgatcaacaaaacaaaaagtctcctacggcctgtttggacgtagaaatttgtctcaaatcttacaagctttaaacattaaaaagcttaattcccaggaattttctatataatccacgtttcacggaacaatcaacacaccatgcattcacctatgctacgcttgcatgcatgtggctgcttgcttgcactctgtagtctgtacacgaacttcaccctcaactgaactgagctgagctcatctcatcatctacacgtcaagcaaattgtacaagaagaaacctagctactaggccttcgatctcctcacgtctaccggatggcggccttcttgcccttgccgccggcggcgccgttcttgcgctggaggcggcggaggaggtcctcgaagtcctcctcggcgcacggcacgcggaggccgccgg

SEQ ID NO: 36361 - DNA, 709 bp, Setaria italica
  Peptide Sequence Number=SeqID_102335
ctgcgccagaaccagctcctcacgaaatcagcaatcctaatgcttgagcccacaacattccacatccggaacccagaagatcccgtcctattcgattcctcctcattgacgaaagaaggcatcggtggcaatctctgccatttctgaaacaatggatcgagggcataccaatcgagcttatttgcctcaactttgctcaggatatacaaccattcttcagttacaccaagctctctcctcagctgggaaagttcatgactggtgattgctgccttccaagctctgcaaaccatcttcaaatttaggtaatgaatcagtggtaaccttgccagaatttggaacgacagctcatcaggaagggtcggaatgatcctccggttcatcccatactcataagcagataccttcaccctcttattaggatctgttccagatgtttcatgccgatccatggacttagcagtagcactacctgtagcacttagaatggagcccatctcaacttcttttcttcaaattcaataattgatgcagttttacatctctaatccatcaataaacgctgaaccgtgaaacgccagcgcggatctccgatgggggcttgaggagcagagcaggggagggcgagcgtccaggagcagacgatccaggggtagccccgcggccttgggcgagcgctcgccgcgtcgccgtgtcggcaggcaatgag

SEQ ID NO: 36362 - DNA, 1035 bp, Setaria italica
  Peptide Sequence Number=SeqID_102336
aacgattacggcaacgaatgaatgaaacatgattatttgggacgagtaactatatatccaagcaacctgactggacccaaatgtaggacgaattacaattttccaattcacacacgactcgacaatccaatcgaggaaatagaccgatcgatgctgtttattcggtggttcggtgcctgaccccaagaagctctcgtctatggatcacaccttgaagctgaaggttaggaggaacttgtttaggccacccttccagccgccgctgaccttcctgccggggctcgaagttgccgacagaggctccgacccggcgtcgttggcgacggcctggcgcgcggccttctgccagagcaggaagctccggcaaccgttgaagctgatcctctcgtcagccatcagcgcgtcggatctgccattggcggtgtagaggaggaagtcggcgggggcggcgccgagtagtggcatgcgcccctcgcgcgcgtagcagcggagcgcggcgcggatgagcccggtgaccgtctctccctcgtcgaccaggaaccgcagcgggccggcgctgccgagcacggtcaccgtcacgagcacgcgcgcgcgactgccggtcacggcgcccgctgccgcggccttgccgtggggttccactttcctcagctccatcggcagcgtcgacggcaccgcgacagccaccatcaatcaaatttgactccttcttcggaggggagaaacaaatctcgagttcaaatgggctcgagaaacaaatatgatcgaagaataacagggaatcaaagaatcctcgtcggcgggggagcggttcacgggtcaaggccgatgcagcgatggtaccagccctgcatgcagcaaccgaagccgcggaaggaggccttctccggctgcggctgcgaggcggcggacgtcgcgcgggctcccaccattcacgaggggctcgtcgtcttcacgatgcacgcggcgggccgggagatccgcgatgcgcttcttggcttcttgccctcaggcgggcggggggagacgattggg

SEQ ID NO: 36363 - DNA, 257 bp, Setaria italica
  Peptide Sequence Number=SeqID_102337
acaagtttagcgaaagattaagtctccaactagaagccctcagccctgatcacttaaacaagggggaggtggtggaaaagcatgaccgactattggatctagaggggaaggatggcgtggtagtagacgcgatagcgggatagattggatggtagcgaaatcaatcagcatgcggacacacgatgcaacatgagagtgtggtgaatgtccaaagctttaaggtggtattcgatttggagacaagtgttacaattata

SEQ ID NO: 36364 - DNA, 233 bp, Setaria italica
  Peptide Sequence Number=SeqID_102338
cttcccaatctccaccgtgcccccagttccagctccacacaatacacatacacgcacggccgatcgatctatcgatagagaaacaagaagaagctagtataaggaagagacgatcaatgatggagagggccgaggacttagggctcagcctcagcctcagctcgtcgctcgccgctcctcgcactcaccatgtctccgccatgctgctccgctctccagagaagaggttccta

SEQ ID NO: 36365 - DNA, 1143 bp, Setaria italica
  misc_feature (1117)..(1117): n is a, c, g, or t
  misc_feature (1128)..(1128): n is a, c, g, or t
  Peptide Sequence Number=SeqID_102339
tgatccgccagcgggtcgacgccgacgacgccggctccaggagatccgccgacactctcgccgctgccgccgaggatcccaaggtggtcgacgacgacaacgccgccaaggaagcccacgccaacaccagaggagccagtgaagaggagaagagggtgcttactagtgagcccgagcagggcaaaaagatggaggacaccgcatctggtggggaagacgaagaggggagtaaagtcctgcttgaggggcaccaagagcaccaggagcacaaggtgaccctcccaactgtttccaattataccattcgtgatgccgctgaggacagcgacaatggcaagcaagaagatggcaaaacagactcggaaattaagctcgcaatggctgttgcccagagcaatggcagggacagatctcatcaaccagcactggataatttggagtgggacaaaccattgtgtgatttctcaaacttccgagcaaatgtctgtgagatgcgaggtaacattaggatacacccaaatggcagttcagtaatgtacatggagcctgcaggttcaaacagagatgagcaatggaaaattaagccttacccccgcaaaggtgatgaattatgcctcagtcatattacagaggtgacggttcagtccagcaaagtggcaccagagtgtactaagtaccatgatgtgcctgccgtgatctttgctttgactggatatactgggaatctattccatgacttcactgatgtgcttgttcccctattcacaactgcaagtgagttcaatggtgaagttcaattcttaatcacagacatggctatttggtggacaaggaagtatgcagtggtttttgagaagctaactaagtacccattgattgatttcaataaagacaccgaggtgcgttgctttaagcatgccattattggccttcatgcttacatggagttcacaattgacccattgaaggctccacacaactactcaatggtggacttcaacacgttcatgcgcagaacctactcactacctagagattcagtgactgcacttggtgagatccctaagaccaggccaagactgttgattatctccaggcagcggacaaggatgtcctnaatctcaaagngatcgtagccatggc

SEQ ID NO: 36366 - DNA, 268 bp, Setaria italica
  Peptide Sequence Number=SeqID_102340
gggtagtctatgggagcatcaaggcaactacatcaacactaagaagaatcaagttccaagaactccgaaccaaacttgagaatataagagttaagtcctaatggtgatagaataatgtattagtagtgcctatgtgcacttagtgcctgtgagcacttgtatccgtgggtggttcgtgccaccttatcccaattactactttagatgctctttagatgcttagatgcttagatgctttgtttagcttgtaagccacatacccaaaggg

SEQ ID NO: 36367 - DNA, 448 bp, Setaria italica
  Peptide Sequence Number=SeqID_102341
acttaacggacctacgactttacctacaatagtaccctagaacgaagctcgtcagtatggtttaacctgccatttgccacagctctgattattttatttcgctatatatcacttgactatgacctccgtagaaagagcacaactaatacagatcaggacatcagtcgtccacttataaaaacgagaagtactgagttaaagaaagtccttctgactgaaaatgatggaaaatctaattggaggagcaaggttaattcacctccagttgaagcagcatttgaacagttttcaaggcaccttgtcacagaatgggtaacagatctgtggtactcccgtgtaacacctgacaaggaaggtccagaagaactcatcaccatagttaatactgtaactgaggggttgtattgtagtttctttcttggtacctttcctttgttctaggttgttt

SEQ ID NO: 36368 - DNA, 453 bp, Setaria italica
  Peptide Sequence Number=SeqID_102342
gcgggtagtccactttaccgccgtccctaccaccgcggcccttcgagttctcacggccgtcgtcgtgccgccgatcccgccggccttgcgagtgtgagctcctgccactccgtcgggaaggagacctcgaccgcgacctagagcgcctccgggacgccctgcggtccctctccctagacctggaccggcgtcttcgctccctcgaccgggacctcgacctcgatcggcgccggctcgagcgagacggggacctggaccttgaccgggtcctgggacgcgacggaggcggcgagcgggagcggtggcgtgtgctggacggtcgctcgggaggcggcggcggcggtttcgcgagattaggtggttgggcttgggcgggggcgggggcggcggccagcgcggacgaagccggacaggaaggaggaggaggcggcgggcttggaggggaaggaggcc

SEQ ID NO: 36369 - DNA, 1728 bp, Setaria italica
  Peptide Sequence Number=SeqID_102343
tatttcaattcatgcaaccttccaggcaatttctagtgcataactgatttcatgacattattgtattcactggcacatattagtacataggatcagtatacaactctgagatgaaattactctgaaattattatccttttaacaaagcacaacactatgaaccataccaagagtgagtcctaacagtatattatggtgacgaaagtatgtcaatacatgccacccaatgcctgacaaacctgaactgtatacataggagataatgagctagcgctacttcacatcagaaacttagaagaaggccctgcttccataaaagaccctagaaccctttgttgcagatgacgatggggatggggatggcttctcaatcgtactggagtcagagtcgtcatttgagggactactattctcaacatccaatggaagcttcatttttgcaagagaatctgtgaactgctgcatgctcttcatgtacatgtcaactatgtcttgttggacaactgactgctccggctgaagattaatgctgatcacaggcttgacaacttcatccttgggtgctgctagtgcttcagaagaatcagcctcaccatcggtaacatcttggcttttctccctctggctttgtcttgggggtgcctcgacagtggtctccgacggctcagaacttggctcagaaactgattgttgtgttgcagaaagggtggtggaggaacctgtggttgagacacaacttagagggctttcatcctgatgttcctccagcttatctgcacagattgcagtaccaggcacagctgcaccaaactgcagcaacttgccattatcagcttttacagggttctcagagtctgggaactcgatttttccaagttcagaaggaatatcgttaccatttccagaatgcagcaacttgccattctcagtttttatagggttctgagagtccaaagaccccatctcgagatactttgagaccataatctcatcctccttcacgacatttaggtctgggaactcaatcttttcgagctgagcaggaaccacacaatcatttccagaatcgggcactcttgacactgacttattgggtgatgagatgaggatgacatctggggaacaaccagtatatgacaaggacagctgcacaaaaccagctggtgtgtggaaaaggtcagttgatgtcagggagaactcctggaccagcttcccatcacccattacaatgtctgccagaggaacaagggcaaagccaaggagctggtcctccaagtagttcctcactctgcttaacatccatatctcgcatttgagtgaagcgtccacagtctgcacatcaagccgtaggctttcttcaaacactgggttgtgcccagcactattaatcaccttggttgagcacgaaagatccgggctgcttgtgaggcgcagctttgcatatacgtcctgcttgtggtagatacaaacattgtggatatcacgtgcctggtgtacaaacacatccaagtagccaatggatttgtcttttctggcggtgtcagcaacaaagttggtggccttctgagcgatgatctcagtgttcagcaattgtggctcaggcacaaaggcagtttggtacgcggccattgcagatgtgctaagtactacacttcttcgctggggattgacgggggtgaactgaggtgagacgcgctgttgcgggattttgtggggaagtgttcgctg

SEQ ID NO: 36370 - DNA, 275 bp, Setaria italica
  Peptide Sequence Number=SeqID_102344
ttacatattctcaggcggtagtgtgccatgtattctgaactattcaaccctgaaggagaaaaagcactgtcctgaggctgtagaaccccatggcgcgcttcatctctcgagtttactctatgaagctgcagaattgtgcgagggacttagcggacggtcattgagaaaactcccttttctggcacatgcctctgtcgccaacccttcgtgctgcgatgcttctactttcatgcatacattgatacaaactgcaaaagtagagtattcttggtagt

SEQ ID NO: 36371 - DNA, 380 bp, Setaria italica
  Peptide Sequence Number=SeqID_102345
tactgttcctgtaaatctatcagatctgtctccagcggcgcccggaacacgaacctgcggggacggcgccatcgacgggggattcggtcgtctgttcgccggaggtgcatggacgtcgtcagcgtcagcgtccacggggcgcccgcgcatgcgcgagcgcaccagtggaggggtctcggccgtggcggcagccagacgcaggggctcgtcggagcccgccttctcgagatcaggccgctgcaccgctgaatctccgtggccggcagtcgccggcggcaagccgagtccaagaaggtctagctccatccccggctccggggatctcttcgcgctcacagggtctcgtgcggctggtactcgtcgaaccgacgcgccgctgt

SEQ ID NO: 36372 - DNA, 1173 bp, Setaria italica
  Peptide Sequence Number=SeqID_102346
cgcactcgaggaggagagggagatgaggaagctgctctcctcgcccctggccgcgctgtcgctgccggagatggcggcgggaggggtcgcgctggcgctgcggggctggtgggaggaggtgaacggctcgtcggcgtggcaggacggcgcctttttctccctctccgccgcctacgcgctcgtctccgccgtcgcgctgattcaattagtcagaattcagttgcgggtgccggaaattggttggaccacacaaaaggttttccatctaatgaatttcattgtgaatggagttcgtgctattgtatttgggtttcatgcacatgtgttcctgcttcaaccaaaagtgtatactttagtgttgttatatcttcctggtctcttatttttctcaacctacacattgcttgtgctgttctgggcagagatataccatcaggctaagcatcttcccacagacaagctaaggactatatacattgcagttaatagcatcatatatgtcattcaggtttgtatttgggtataccttggaataaatgacaatcctctcatggagcttgttagcaaaatattcatatcagctgtctcctttatagctcttctgggattcttaatttatggtggaaggttattcgccatgctgagacacttcccaattgaatcaaaggggcggagaaagaagctttacgaggtcgggactgtgacaggaatttgtttcacatgtttcttgataagatgcattgtggtgtcattttcatcatttaatcctgaactatctcttgaagttttggatcatccagttttggatttcttctactatatgttgacagagatactgccttctgcccttgtactattcatcctacggaaacttcccccaaagagagtatcagcacaacaataccacaccattcgttagatgtagtgccaagaaatccttagaaaaccctaaatttccgttcgtcaggccgaattgtgatttgagcgtgccttgagaggatttttgccatcgaaacgccatggccatgatgtataagagggtctccctcattctgtcaaaggcccatttttctgggcattgtatgtcttaagctccctgtatcagtaacctgtctatagcttttatactgtctaacaaacttgtatcttttctgctgaaatgggttggtttcg

SEQ ID NO: 36373 - DNA, 362 bp, Setaria italica
  Peptide Sequence Number=SeqID_102347
agtctctctgccctgatctccgacaattgctactccatttgacagttcttcgtgccacactccactggaacgacagagcatacgaagtgaatgctgaactccatttgacagttcttcgtcaaaaaaaagaatcttcttgcacaggggcagaacgcggcggcggtctctttgccttgatctctgacaaatttgttcttcataccggtgtttcaaggagacagcatatgaaggggacactggactccatttcacagctcgttctgggaaaaaactccatttcacattacacaaacttagtttcacatatggtggtttgtgttcagaaatcactagttgtttgtctctggttgattttcttgtaa

SEQ ID NO: 36374 - DNA, 240 bp, Setaria italica
  Peptide Sequence Number=SeqID_102348
ggtggtggtgctcctgctccccccgccgtgggcgtcgggccctagtggtcatgtcatgggtcgggggtgagatctggaaagggagggggcggggcgctggatgggatcgaatccaggagtaggtgaggcaagatcacgggtcacgggcggtgccctcgccctgggggcagccgagcagggggtgctggatctcgagcaagcctgccggctgccggcgcgagtgagctcaagtgatgtgag

SEQ ID NO: 36375 - DNA, 563 bp, Setaria italica
  Peptide Sequence Number=SeqID_102349
aaagtaaagcctgttgtgtcagagactcagtatttgaacagggaaccaaagattatattataattttaaaaagcacatttgcagtgaatagaaccagaggtagagagggcacaggagacaaaatatggcctagctgaaatccatggctacaagtagacgtgtgaaacctctttttcttgcgggaaatacctcactgctttatgcatacactatggcgtgacaaagcaataaaatgcataccagagcaattttttatatcacaaatagaagacaattatgaatattttaccagaagaaataggaatcaagaatattgcagggcctgaataagtttaaatacttaatactccctccatttatgtttataaggcgtacacgcatttcaagattcaaactttgctatctttgactaataattaaccaatattttttttatgatgtaaacttgaaattgttggatttgtaatcaaatgtactctccaatgattataagtttataaccataaacaatataatataagataaattaatggtcaaagtaaaatttgggagactgttgtcct

SEQ ID NO: 36376 - DNA, 272 bp, Setaria italica
  Peptide Sequence Number=SeqID_102350
gtgagccttggaagtcattgggagcagcagttttattgtcaataccatgcaaaattctgttcatgcttccttcatgtgcattttctctaaaggagttcttctcccatctcaacttatcaaacaaagcagctgaagatgagaagacagatacagccctcgagagtgtcctctgaacatcatgttttctacgctgatctggggatttcaaattgggaaagggagaaacagaagatgggacaatgacaacagaaaatatgcggtgtgcagcaacg

SEQ ID NO: 36377 - DNA, 936 bp, Setaria italica
  Peptide Sequence Number=SeqID_102351
ttttttttaggttccttatttccgtttctacctttttctatttaaattaaaccagcgacaagttttgatccacattgtacaggtgccattcattagtatgcaagactgtaactgtaacacattagccgggtcggtctatatgcaccctgagatacttgtctaggacattctggaatacctgaaaagaaaacaattcttttccattgagaagcacatccattgcagcatgctgatcctcaaatacgctatagaatgtcttgtagaactcagcctgttcttcttttgtggtctgttgatcgatctcatcaaacttcctagtcagtatctctgctcctactggcccgagcatgttaaggactaaagcttctaatgtccttgggaatgtatgcaccattgcaagcatcatactccgcaattcaagtggttctactggtaaaatgatttttgcaacaggatctttgtccaagagagacgaatcatcttcagcggcaatctttgttttgtctctttggttggaagatgtatcctgagatgtggattctgtttggttattttgcttaaccacttcagcactgtcgtggaccagtgagatgagttcataaagtgcttggagagtggagggttccagagtttgcaatggtgaatctttttgtaaattgaatagctggaaacctgtcaatgctttgtccataggctgaatattggtgcaatcttccaaacgacaaaaaggactcttctgcaccattatgttctgtctcatgtccaccaatctgctcccgattcggcgcattcaaagaaaataacaacatattcccttgtaggaaataggagtgaagaaccaaagatacgagaaaaagtattgcaaagtgcatgtgtctagtagacgaatcatctaaactttaaagggtcagatcagggcaaggagtgaaatagact

SEQ ID NO: 36378 - DNA, 355 bp, Setaria italica
  Peptide Sequence Number=SeqID_102352
gcctcctccgatccctcctcctcctccgcggcgcccaccatgctcgactcctgcgcgcacctctccccgcgcttccgcgtgcggtggacgctccacgaggccaacaactccgtcgacatcggcctcgaggctgccgtcgggtccgagtactacatggcgttcgggtgggcggagcccggcgcggccgagccgccgtccgtgatcggcgccgacctcgtcgtcgccggcttcaccgaggacggcctcccgttcgccgacgactactacgtcaccaagtacagcgagtgcctgctccgcgacgacggctccgtcgagggcgtctgcccggacaccatctacggccgcaaccactcct

SEQ ID NO: 36379 - DNA, 561 bp, Setaria italica
  Peptide Sequence Number=SeqID_102353
ttaactaattaactaaaaacctaaattaagtttacctaagttaattaaggttacttacttagaagaaaaatcttggtttatttggatgagaactctcaaacatatgaaatctgaaatggggcaaaatcgcctaagatgacaaccgttgcacacgctgtactctctagttatctttggttaaagaagtgagaaagaactggaggtaatctcccatgcatcacatgaaacaatagcatgggttgtgggtatcttatgcttaaacttcacactcgataatcttgacaacagaagaatcgccaatcttttcaagattatcaccctgtcgaaaggctttactatgcccactgaccggccatagttcagtgcaagtttgatcccatactcttcctttgtaagcccaccagtttcggcctcatcagtactccccatcagggtacacgcctctcactgcttgccttgcctgagttgtgccataagacgccactttgatggatcagaactaatagacccaactagaaccggaccaataagttacaagtagacaaagtttagaatacccaa

SEQ ID NO: 36380 - DNA, 301 bp, Setaria italica
  Peptide Sequence Number=SeqID_102354
aggccgaacaccttgatggtggcgtagagcacgaggaggcccagggaggccaggaggaagcccatgacggcgccggaccggaacgccgtcgcgaaggcggcgccgatgccgcgacgcgcctccagggtggtcctggcgttggcgtacgtggcgatccgcatgcccaggtacccggacacgacggaggtggcggcgccgaggaggaaggcgatggcgctgaacaccgcgttggccagcgccggcttgcaggtccggccgatggtgtactggcatggtcggctgtcggtgctgaacctgtgca

SEQ ID NO: 36381 - DNA, 496 bp, Setaria italica
  Peptide Sequence Number=SeqID_102355
tgttggactggcaaggattgggccagtgaccagatagaggtactgaaccctaaaatagagcctccccggatgccgagattgagttttcagactttgtaagccgatcagtgatctttatttgtgccactgctgcactcagcgatgccagaaggaaaacagagttgctctgatataagctgatcaagcttcacatgctgaattctgaggatgatttgaagcagcagaagaatcaggtgctgttactgtcccgatcttgcttgcaatttcaggtgtcaactgaagctttctaattccgtccagggtgcacaagttgtgatatttacatctgaagtacgaggaactgtttatttattagttagcgacaggataacaatgtgtgcaggttgcagactgccagcctagcaagtagaaggctagttccttgttgccctggttggatgtgtatcaactagcaagtaagatagccatgatttagcatttatgaatgaaataagat

SEQ ID NO: 36382 - DNA, 169 bp, Setaria italica
  Peptide Sequence Number=SeqID_102356
ctagcggcgacgactgggcgagcgccgccgccccttacgccaggtgccctggtcttcgtcgggcccttcgccaggtattcgttgggctgttctctggtggcgggcaggcacgcccgattaccattacggcgagcctgcggtgcgggaccgtgagtacgacatgaacgag

SEQ ID NO: 36383 - DNA, 1874 bp, Setaria italica
  Peptide Sequence Number=SeqID_102357
gtctgtcttgccctttctttctagcggcgacgactggggcgagcgccgccgccccttacgccaggtgccctggtcttcgtcgggcccttcgcaaatcatcgggtgtacacccatgtcctatactgggttcgcccctggctgtgatataggcatgtccgattaccattacggcgatgttgaggagatggaggatgagtacgacatgaacgagccagtcgatgacatggaggaggaggaggaggaggaggaggaggatgagtaccaagagcccgtggctagggactctgatgccgaggaagaagaggacgaggaccaatcgcataaggtccccgacatatcagcagtagatgcaagaaatggcaaagatattcaaggaataccctgggaaaggatgggaatcacaagagaaacatataggcaggctcgggtagagcagtacaaaaactatgagaatatacctaattctggagaagcagcaatgaaggcatgcaaatctaccgagaagggcggaacatattatgaattcagacaaaatactagatcagtgaaatctactatctcacactttcagctgagaaatttagtatgggccacatcgaagcatgatgtctacctattattgcattactctgtacttcattggtcagccttaagtggtttggacacagaaattatggatgtacatggacatattgcgccaagtgagaagcacccaggaagcttattagaaggtttttttcatactcaaatcagtaccatggcagtgaaggataatttgctagtagctggcggtctccaaggagagctaatatgcaaacacctagatcgagaaggaataagcttttgctgcaggacaacatttgatgataatgcaattaccaacgcattggagatattcaacacatctagtggagctcttcacttcattgcatccaacaatgattgtggtgtaagggagtatgatatggaaagataccagcagtataagcatttccgatttgattggccagtgaatcatacttcattgagccctgatggaaagcttgttattattgttggtgatgacacagatgctttgcttattgatgctaattcaggaaagactattcattccatgaaaggtcacttggattactcttttgcatcggcttggaacccagatggccggacattcgccactggtaaccaggacaaaacttgccggatttgggatgctagaaatctctcccagtctgtccatgtcttgagaggcaacgttggagcaataagatctattcgcttcacatcagacgggcagttcttgtcgatggcagaggcagcagacttcgtccacatctttgatatcaaaagtgactacaacaagagacaggagctggatttctttggtgatgtatctggtatgtctttcagccccgacacggacacactttatgtcggagtctcagataggatatacggcagcttacttcagtttggccgccgctataactactcatacctcgattcactactatgaagatcaaggcaaacgagtcttggacgtggtacgtttcagctgcgctgatagtcagcccagattaagtatcccgatcagatttaatttagcttggttttcatcaataatcatgtaccctgttgtatgtgtatataaagaactgtattctatagacacctatagtcttcattgagataggaatcaggtgtcaagactcaaaccataaacttatatttcaattcggtctagtggtagatgaatccattaaagttagaacttcagctcatgttcatgaacattggtggtaaacctcaccaaaatagcactagggtgctccgatctcctcccattcaacctaccaaactcgaatgtttcttgt

SEQ ID NO: 36384 - DNA, 224 bp, Setaria italica
  Peptide Sequence Number=SeqID_102358
gagaatctgagagagggggagaggtgatcaggcagcagcagcaggggaagacgcaggcagcagcaggggagactgcaccatgtgcaagctcaagttcaccaaggagcgggtgggctgctacatgctggtgatcctggtgatcgtgctcctcatcggcgtcctcttcggcctcggcgtcttccgccacggatacgaccacatcaaggacatcggccgcaaccaca

SEQ ID NO: 36385 - DNA, 332 bp, Setaria italica
  Peptide Sequence Number=SeqID_102359
ggataccaccatccatggatagtttccagctatttcttcagttcgggatatcagttatggtgattgcctgtccttgcgccctagggctggcaactccaactgccgtgatggttgcaactggagttggtgcctcacaaggcgttctgatcaagggtgggcaggctctggagagtgcacagaaggtcgactgcatcgtttttgacaagacagggacactaaccattgggaaacctgtcgttgttgacacaaggcttctcaaaaacatggtcctgcgtgaattctatgactatgctgctgcagcagaggtcaacagtgaacacccactggcaaaa

SEQ ID NO: 36386 - DNA, 547 bp, Setaria italica
  Peptide Sequence Number=SeqID_102360
atttgcttcctcctggtgtggtcatgcgaggctgccgttttgtcacgacgagggggttcttctcttcctcatctatggcgacaagctggtatatgtcatttttctggaaaactgggtgcacataagcacccttcaggtagtctctcaaatttaaagttgggtcatgcgcccgttccaatgtgtcctttaccatagcatcctgcaaggggaacttcacaaatgctggttcaaaccggcccttgcaaacatagtggaaccatatggagaggacaggaagtgggagaagagcaacagtggacttctctgcttcctgcgtgctcagcaatccgagtaggaggatttgtgatactatcaatgctatgattagccgcatgtgcacatctggccagaattgtgcaccgctttcatattgctgattatatacgttaattatctgatgtctgaagacaagatacgcgaggctgaagaacactatgatgaagggaaggagcattggcgtgacaactgcatatacaagcccaagcagaaagtacaactgtagtcgtgg

SEQ ID NO: 36387 - DNA, 480 bp, Setaria italica
  Peptide Sequence Number=SeqID_102361
aatcagagaaatgaaatccctgccgattcagttcaagtaaatctcagagatggggcaagttgagtgccctgcgcaatttgttgctgcacaagacagttttcggtatcaactcatgtgtagtagctcatttcccaacgaatgcaggctcctgcagcgcttaagtgtggcagctctttgcaacagtctactgatggtcagaggaaaaggacaaacacagaaaccttactcacagaagaagtgaagcagcttcgttcacaggtgacacttcttgcggagcaataccagcaaaaaagtcttcaggttcaattgtacaaacaaaaacttgatgagacatggcttattgttagggatgaggctgcaaaatgcaaagctgccaaagacatcataaaggttctaactgaccagtgtaaggccatgtcagagaaacttttggttggtcagcaatccgagaaccccaaaatcacatctaatattgacagg

SEQ ID NO: 36388 - DNA, 231 bp, Setaria italica
  Peptide Sequence Number=SeqID_102362
ggagagagggacagagatggagaggagcaggcggtctcggaggcaggcctttcacccccgcacccagataacgatgtgctagttccatccttcctcttaggttaatgtagctgcgggaggagttcgcggacgggatcccgccgacgatgatgacagtggcgccgccggcatgggcatagcggcgccatcatctcagccgggccagaccaccagtactacgtgagccaaccc

SEQ ID NO: 36389 - DNA, 1155 bp, Setaria italica
  misc_feature (81)..(81): n is a, c, g, or t
  Peptide Sequence Number=SeqID_102363
taaagagatttcgggagacaaggagagagggacagagatggagaggagcaggcggtctcggaggcaggcctttcaccccgnacccagataacgatgtgctagttccatccttcctcttagtcttctacttgggtttcgcgcatcagttggttcgtttccacggtcgatcgatcggttgttccgctcgacggtttgttcttgttacgtgcatgctggagttttgtaaggattgttttttttcaattcgatttagtttttgggagagtgcaattcggttcttcagtttatttgttggattctttttggtttgttttctggtgatcttttttttctgatacgatgtcgtggtggtttgctgatgagctgtgcaggtagctgcgggaggagttcgcggacgggatcccgccgacgatgatgacagtggcgccgccggcatgggcatagcggcgccatcatctcagccgggccagaccaccacgtactacgtgagccaacccaccaagagcagcgcggcgatctccggccgaccggccaccgcgagttcttctatgtcccactcccagggattccaccagggcagcagcggcgtcttcggctactcctccgatggcttcgaccgcccggactccagccaggaccaccaccagcagcagcagcagcacgtggcgcagcagagccgccgcgacaagctgagggtgcaggggttcgacccgcccggcgccggcgccgccgggcacggcctgctccccatcgacggcgacgagcatgccgagcctggggccatgttcgagcacgcggcggccgcgggggcatccaacatgctgtccgagatgttcaacttccccgcgccgccgtcgggcccctccgccaccgagctgctggccagccagatgaacgcgaccaactaccgcttcgggctccggcagggggtggccggcctgtccggcgacggcggttggttcggggccggcgcggcgggccgtgctggcctggtcctcggtggggccaacatggggtcgttaggtgagacgtcctccccgaagcagcaaggcagcatggctggcctcgccaccgacccggccgccgcgatgcagctcttcctgatgaacccacaacaacagcagcagcagcagtcgagatcgtcgccgacgtccg

SEQ ID NO: 36390 - DNA, 629 bp, Setaria italica
  misc_feature (343)..(343): n is a, c, g, or t
  Peptide Sequence Number=SeqID_102364
tacctaacctaacgtacgtaagacgaccctagacggaatacggcgacgtggatcgtcgccacgcgcttcctcctcttccggatggtatcctgctggtgcatcgcccactggtccgtcgtgaacggctgcagcgacccactcgcgacggtgatcttcatgggcgtcttgtcagcgttctggaagaagatgacagaggtctgcgttggccagtcgaggacgaagccgcccttgacgaaggcccagcagtcgctcctagcgagaaccgtggcgatgcacctcgcgccggagttgtccggcgccagcctcgcagtgatcagagccgcggaggcgccttccagcttcncccagcatgagaaggtgtacatggttgtcttgttgaggttgtagaccacgaacgccggggagaagacgccggtctccgtcgtgcgatagccgtcagggtcgtcgctgttgccgaacttgaggatgcccccgttgtacagagccggctccggctggcctctgcagtcagtgtaggaggtgtagtcgtaccagccaggaggaggcaccgccgcgacgagctcaatgccgcaatgcagcagcatccacagcgcgaggaaccccgcggcatgcagagcttggcgaggcgt

SEQ ID NO: 36391 - DNA, 1502 bp, Setaria italica
  misc_feature (1)..(23): n is a, c, g, or t
  Peptide Sequence Number=SeqID_102365
nnnnnnnnnnnnnnnnnnnnnnnccttacgaaaagatcgcaaaaaatagtttttgcccttgcaattttcttccacaacaatcacttacaaccactaacattagctactactagtatgcagtaacatacactacccgtatgcgacgaggagtcaggagagaggagcccaaaccaacacaagggctggtaggcagtaacagcgtggctagtaacaccacccgaatgaatggccgtattcaccgcgcgcagcctgacagttacatctggacgttgatgtgcctggtctcgtctcccggcgacagcgagaaggtggactgcgtcgtcctgttgttatagctcaccgtgagggtgtactccccgaggtatccgctgaagctgtacgcgccgtgcgcgtcggtctgccctccggcctgcagcgtccgccactcgttgaggaggcggtcgacgacgtcccccgtgggcaggttgttcaggttccagtccgtgaggcacatctggtaacacccgctctggtgcagcgccgtccacagcatcaccccgctcaccgccggatgcgagtaggcctcccgcatcacctgctccaggtacgccgcctgcgtctgcgcgtcgaacttgttgctgatgtcgatctcggtgaaccagatggggagccccagcgtggcgagcttgtccaggatggcgcgcatcagcgggatgttgggcttggagaagtgtccctccaggccgatcccctccaggatggcgccgccggcgcggagctccttgagcttggccacgtacgtgtccacggtggagaaggggtcgtcgcaggtctcgatcacgttgtactcgttcatgaagagcgtcgccagcgggtccgcgtcctgcgccacgctgaagaactccatggacgcgttgggccccagccgctgctcgtagaagttgtagtggagcatctcgttgttcacgtcccagtgcgcgaactcgccgcggtaccgggtcatgaggctctggatgcgggtgttcacggcggaccggaggtcgtcggccgtcaggttcttcacccaccggggcgtcgcgtcctggttctcccagaagatgttgtgcccgcgcaccatcacgcggtgggaacgcacgaacgccagcatctggtcggggacgtcgaagcggaggagccccgacatgggctccgtcgagtaccacttgagctcgtcctcgaacaccgccgcgttgaaccggtccacgaaccactgctggtacgcctggttgcccaggatggtggaggcgatcgccgacccgatcgggaagtccttggtggtctgctgcacggacacggacgcgcccaccacgcgagcgccctgcggatcggcgacgtggatcgtcgccacgcgcttcctcctcttacggatggcctcctgctggtgcatcgcccactggtccgtcgtgaacggctgcagcgacccactcgtcgtacggttgtattctttctattgggttcgtttcttttgtttcttagtttcgttt

SEQ ID NO: 36392 - DNA, 480 bp, Setaria italica
  Peptide Sequence Number=SeqID_102366
atcgggcttggactcggaatctctgacgaaaatccagtggagctagcaacagtctagttcctgaagactttcggcaagatgattgagggcaggcggcattcggtggacatccccatttcgagggccctggtggccatcatgcggtccagatccctgagggacccggacaccaactctctggccaagttctcggccaagaagaccatctggagggctgttccctcgaggaagacgagccggaggggaacaactacggcaggcacagcttcagctacaacgcgtacgatcacctccagaggcggagggaggagtttggggacagcttgaggtcaggccgtctcgccaactctcccatcaacatcatcaaggccaatgcgatggcgaaggccgcgctccataaccagagctgttgctcggcgatctctggcatgtcgagggctgcaaaggacagggctttttctttggtgatggaaggggagg

SEQ ID NO: 36393 - DNA, 416 bp, Setaria italica
  Peptide Sequence Number=SeqID_102367
gtgtgttgtgttgtacgggtttctaaaccctttaatcttcttcttaatataaatgatacgcagctctcctgcgtgttcgagaaaaaaaattaaggcaagtagcatgcattgtccatgaacagaatcgggtaccagagcaagagatatatgaacagaataactccctgatcgtcttcaataacccaaaaattgcaccacactttggtgactcttcaagatgtgtgatgagccgatgccggatgaaaaataactaagaaacagataaaagattacttacatgatatagtgagcgcccaaaccatccacaaaatgtagttggatttagaagcctcccagcttgagagtgcagtaaaatctgggggtactgtagagctgttgcttcagagatatccttgtcaaaaattatagtcatcaca

SEQ ID NO: 36394 - DNA, 332 bp, Setaria italica
  Peptide Sequence Number=SeqID_102368
ccgtcgtcacaacaaaagcctgtaaccaaatgcatcctgacagcgcaaccattgagagttcctgcatctcactttctcatccgcgtaggcacatatcgtaatgaagaaaacgacgagcgcctgaaattgaaaaattttagtctcatgaaagaaaatgtagatcaaatgcatctagatgcctatgcagttcacatgcaattctcccatacagcaagattaacagattgaagcacaatttgtgctagatgcagtaatggagcaactgctattaacttttaatttagttaattccttgatatgccaagacaatgcagtaatgcacacaacacatg

SEQ ID NO: 36395 - DNA, 1871 bp, Setaria italica
  misc_feature (1)..(28): n is a, c, g, or t
  Peptide Sequence Number=SeqID_102369
nnnnnnnnnnnnnnnnnnnnnnnnnnnncgtcacaaaaaccaccaaaaccgtaatctgaagggctacatgaatgccaagcatctcgcgggcaccaaaattactaacacgggtaaccagccaaggaggaagtaaactatcgattctagaccacgcgagttccgtggttattatgaaatagcatgtatttcatcagtaggcctacaaacgaaggggttacaagttcgagacgtctatatgtaaccttcgtagtcttacagaaagctttggccactcctatgctagttgcggtctgccagcatatccgtgggtgttatctcgtagtctccgtggaatctgaaagcagaggctggtagttgcaacccctgtttctatgcaaaccagcaagtacattagtgaggttggttctcgcagacttaactgctgactccacatttctggaaggttgggtagatccgttgctctgctcgatctgctgaagtatgttgatggcgctgggccaataaaggtttctgaagtatctgaaagccatcaccggacccatagctactgaaacagtcagagccatggtgatccagtatgaaggttgaccgcacaggcgaaacatgattgtgtacatctcaaggctcgggatggcactgagtattaagttgatcatgtagaaggccacaaagtttccccagatgagagcgatttgagggtaagtgaatgagtttgtgtccgtcgtcacaacaaaagcctgtaaccaaatgcatcctgacagcgcaaccattgagagttcctgcatctcactttctcatccgcgtaggcacatatcgtaatgaagaaaacgacgagcgcatgatatagtgagcgcccaaaccatccacaaaatgtagttggatttagaagcctcccagcttgagagtgcagtaaaatctgggggtactgtagagctgttgcttcagagatatccttgtcaaaaattatagtcatcacaggtagacttgtatagaaaacattataagccatcaggctaactgaattgaataagctagttcctgagagccccgaaaagaaggcaaacagaatttgtataaagcatataagaagtgacttgtagaaggaatactgtgaaataaatgccgttcgattgtatgaataacgaccatgaacaagtatcaacctcttcagaaacttgaatttcccaatgctataatcagcagctcttgcagcttgcagtccttccctaccactaatccctactccaatgttagcctcttggatcattctaacatcattaccaccatcgccaattgctagagttaggtacccaacggactttaggatagcaacaagctgtgctttctgcaaaggtgtcattcgacagcatattgctgttcttgacagcatcgccaacctagtgaaagattccttggaatgctttagaattatttcaagtgcccaaccatccaaaacaaatgcaagatcctttgtttcacacgtattcttcgtaattagtaatgccctctctaggcttcttagtatgtcctcttcagttttcccactgatagacaacaattggctattgggctcagaggatatgaggttacaaagcagtccaatctgaattgctgtattttgcttatcgccagttagcatccacacattaattccagcattccgtaacaacttaatggtttcaggcacaccatcctgaagacgatcctctatggcagtaacaccaagaatatgaaggtcacgctctaggctgtgacagacttcggcaattttagactccctattgtccaatgagcagctagcctcttgaaagtttttggaccattccttatattcatcttcttccaggtcacgccatcccaaacataatgtt

SEQ ID NO: 36396 - DNA, 534 bp, Setaria italica
  Peptide Sequence Number=SeqID_102370
cgtttgacggactcaccctgacgggaagcgtgccaagaatcatgccactgcagttcagagctagaatagcactatctgcttggacaaactcaacaaaggcaatgcacgtggagtgcacataatcaccaagtagcctcagacgagaaacttcaccgcatgttccctcaaagaattgtttcactacatcttctgcaacctacacaataaaggaaataagtcgtactacaatcattatatttaacatttgaacagaaaaaaaataaaacctaaaaacgacacctagaacttagcatttgaatttttttttcctcaatttcaccatttatatttaccctactaccattcagatttcaaatacttagacaaagaaaataatacaaatatatactcaggtatggcacaatacaatcacaacatagatataataactcttggatctaaaattctaaatatcacaacatctcaggtaccactttgacaaatatcctcaaccattgggattactaaaaaaataatggtgttatcctcagtacg

SEQ ID NO: 36397 - DNA, 314 bp, Setaria italica
  Peptide Sequence Number=SeqID_102371
tgtttgtaaggtcggtcgttccttggagcgactttcgttcaccaagccggcggggaacaaggcggcttcggcgagcagcatcgagccggcggcgaaggtggagggcaaggccaagcaggcggcggcgagcagcatcgagccggtggcgaaggcggagggcaagtccaagcaggcggcggcgagcaggcatcgagccggtggcgaaggcggagggcaagccgaaggccaagctcctactcacggcgggcgtgggagttggacgccaagccggagccagcggtgatctccgtcgggaccgagaggcctggggggaa

SEQ ID NO: 36398 - DNA, 378 bp, Setaria italica
  Peptide Sequence Number=SeqID_102372
ccttcagggagaacatgggagcactgatagcaccctgtgaaataacctcaacaagagtatttgggtctaagccaactttttcactcaggagcaacccttctgagaaggaaaccatcatgctccccatgaccatgttaacaacaagcttcatcgccgcaccattgcctacatcgccgagataaaatcttgactggtttcagagtaatgaaaaaaaggattagcacatttttctcgaccaaacatgtgataatcgataaggcgattgcttcttctcagataggagatattaaccttcccatgacatcaaggaggggcgccactctcttgtacaaggattcatcaccttggtgcaacagtgtttacagtttcaggttacag

SEQ ID NO: 36399 - DNA, 268 bp, Setaria italica
  Peptide Sequence Number=SeqID_102373
gtggcggtgggaagaggcgaggtggcgaaggtggcgtaggagggtgtaggcatgtaagaatcttgggtcatggaagaagaagagtagtagtggtagggggaggaagacgaagaggagtttgcaggtacatcttggcatgagctaaattatatcagacaagctgtcggttttttggttatacaccaaaaaagaaaaaagacacttgaggagatcaggcaagatctttgcccgtccttgagtgttcgccaaatctacagaatatgctcga

SEQ ID NO: 36400 - DNA, 415 bp, Setaria italica
  Peptide Sequence Number=SeqID_102374
ggctccggcggcgaacgggtacccgccaccgtaggcggcggcggtggtggaaggagaaggagaggtgggactgagagggtggtggtgttaggaagaaagacggaactaggaacccgtagaggagcagaggcatcccggataaaaggctcgagagctctcatcagctcctccccggacagatctatagcggcagccatctagactttagtagtagacctgaagaaaactctttttttgtttttttttctttctagcaaaccaagaacaaatcaggcagaacccaacagccacagtaaaaaacagatggctctgatggtagatctgcgcacggacttgcacaagggaggtgtggaaaaagaacccctcttggctaccaaactagcaacctagactgactaaaaaccagctgaagaag

SEQ ID NO: 36401 - DNA, 453 bp, Setaria italica
  Peptide Sequence Number=SeqID_102375
aaagccgaaaggaccaaagctcctaactcaggcgggcgtgggagttggacgccaagccggagccagcggtgatctccgtcgggaccgagaggctgggggaagatgaaatcgagtacgtgcggacgcatcgcatgcggaggctcaccccccccgacgatctgatccgcgaattcttccccaggtatgcagcgcgtttcccaaaagctgctgccatcgtcaacaagaccgtcgacctgcaggaggacatcttgaggcagtacgagacgaaggggtacgccttggtccgggtcgagcgcctcgacaatggtttgaagaggtggtttcgtctccccgaggcagaaactgcctaggccttcagggtttcgctgaggatgtttatcctgctgtctgctttgtcgtctgatctatctatgtgatgttactatattatattatggtggtaaatgtggatct

SEQ ID NO: 36402 - DNA, 533 bp, Setaria italica
  Peptide Sequence Number=SeqID_102376
tctctccatgacgaaattgccaaactgatcagaaaatgtcaagacatacatagccgttcctcagtcaaaatattggaggcaaggtcagacctgtactctgcaatcatcaacgagaagttgtgcatgaagatcggggatgggtcatggtgcccaagcgatccggagtggaggctggcggcctctggagacagatatgctgtgtggcacaagtaaatcattataatggcatcgatatgctctcctaaattggagtaattaccctgctaaagtgaagaacaccacgggaaaacatgtcttttagtcttgtagattaacctgggcagaaatagagtggctcacgtgtgaattgcaatgtgaattacaaaataattgagatgctgctgctatcataagtgaattgcagctagtggggattacctgtataaggatgtatctatatgtaggtaatccccactagctgcaattcacttatgatagcagcagcatctcaattattttgtaattcacattgcaattcacacgtgagtcctact

SEQ ID NO: 36403 - DNA, 534 bp, Setaria italica
  Peptide Sequence Number=SeqID_102377
atcgcaatccagatctaggtttcgagagcgagagagaaaggacggagagaaggccatggcggagccggtggctctggagatgagggagctggggctggagggtctgatggccccttcgccggatttccgctttgcgaggatcatcaccatccccaagatcaaggatgattcggcggtcgaggccgcggcgaacaaggcggcggcggggagtggcatggtgaaggcggcgtcctggagcgacttcgtcaccaagccggcggggaacaaggcggcttcggcgagcagcatcgagccggtggcgaaggcggagggcaaggccaagcaggcggcggcgagcagcatcgagccggtggcgaaggcggagggcaagccgaaggccaagctcctactcaggcgggcgtgggagttggacgccaagccggagccagcggtgatctccgtcgggaccgagaggctggggggaagatgaaatcgagtacgtgcggacgcatcgcatgcggaggcctcccaccccccccgagatctgatccgacg

SEQ ID NO: 36404 - DNA, 1357 bp, Setaria italica
  Peptide Sequence Number=SeqID_102378
gttgcctggaaatttgctgctgccctggacgacggcttcacataagccggattcagtacgacgtcacacgggattcagtacgacgtcacacgggggcgaacgagggcggactggggtctttgacggactcaccctgacgggaagcgtgccaagaatcatgccactgcagttcagagctagaatagcactatctgcctgcagaaacggaatttataaattggccaagctccaaaaaaatgaacaaataattttttgcatccttgttttgtatcaaaagaagcatttcttattaaatgaaaattcagcaatgtacagcccacataattgagaaaatcaatgtaaattcttctggtaactacacttcctttgcaaatgccacccaaataagtaccatttatctttatgaaattcacttcatctgataaacaagtaattgttacctaagatgtcactagccctcctaggcaccagataggcattaggcaacaaattcacttcatctggtatcgagtaattgttacctaagatgtcactagccttcctaggcactaggcaacactactctacacagcaaaccaggcctgcctgattgcaggaggtagacaaagacagagccacctgtctagcgtcatgccttcagggaacactaaaaaataaaggttgtttttggatgcgtgcagatgaactattttaattttgaccaaccatacattttttaccatatttctaaaaaagactttcataagttataatttgattaggtctaaacatataatgcaagattatcaccaacacagatgactagcccaggttaaaacgtggcagtgttattagatctggcaacaccattgacacaaatgactggttgaggttaagtccatgggtgaccagtccaactacatgtttcgttcaaaaattttcagcctacaagcatgtatttcaattccctgcatgcaaagtaaatgattatagcaccattttagatagctgaagggatcataaacattaaggaagctcctagtttgttagtgcacgacttgcaaggtaattgctttgcaacatggtgagcaaagttggcttaattaagcacatctccagttaaaagtaagcccacaatttgtcattcaggcacttgtatattagtatttctgtaaatcagaaactaccacaaacatatgtaatttgactcatctgtattttgctcaaaagcttgtgagactaggcatagaatgctctaatgattaggactatctagcataaataattcaagcaatcttgaaattatgcttgtaacgatacatgtgttgtaaaagaggatgcagaatatctagcaagttagacagaagactgacagctg

SEQ ID NO: 36405 - DNA, 524 bp, Setaria italica
  Peptide Sequence Number=SeqID_102379
ggctccggcggcgaacgggtacccgccaccgtaggcggcggcgtggtggaaggagaagggagaggtgggactgagagggtggtggtgttggagaagcggactggacccgtgaggagcagaggcatcccggataaaaggctcgagagctctcatcagctcctccccggacagatctatagcggcagccatctagactttagtagtagacctgaagaaaacttctttttttttgtttttttttctttctagcaaaccaagaacaaatcaggcagaacccaacagccacaagtaaaaaacagatggctctgatggtagatctgcgcacggacttgcacaagggaggtgtaggaaaaagaaacaaaaaaagagttttcttcaggtctactactaaagtctagatggctgccgctatagatctgtccggggaggagctgatgagagctctcgagccttttatccgggatgcctctgctcctcacgggtccagtccgcttctccaacaccaccaacactcccaagccacc

SEQ ID NO: 36406 - DNA, 557 bp, Setaria italica
  Peptide Sequence Number=SeqID_102380
tcgtagccggtggcgaaggcggagggcaaggccaagcaggcggcggcgagcagcatcgagccggtggcgaaggcggagggcaagccgaaggccaagctcctactcaggcgggcgtgggagttggacgccaagccggagccagcggtgatctccgtcgggaccgagaggctgggggaagatgaaatcgagtacgtgcggacgcatcgcatgcggaggctcaccccccccgaccgatctgatccgcgaattcttccccaggtatgcagcgcgtttcccaaaagctgctgccatcgtcaacaagaccgtcgacctgcaggaggacatcttgaggcagtacgagacgaaggggtacgccttggtgcgggtcgagcgcctcgacaatggtttgaagaggtggtttcgtctccccgaggcagaaactgcctaggccttcagggtttcgctgaggatgtttatcctgctgtctgctttgtcgtctgatctatctatgtgatgttactatattatattatggtggtaaatgtggatctgcttaagtggtctagttaaattataga

SEQ ID NO: 36407 - DNA, 735 bp, Setaria italica
  Peptide Sequence Number=SeqID_102381
cgggctcgtccggcccaacatcccacgacttcacgaggaggtgaggggaggggaggagggagcgagagcgacatcgcaatccagatctagggttcgagagcgagagaagggagggagagaagagggggctatcgcgagcagcatggagccggcggcgaaggcggaggacaagactgagcgcaagccggcggcgaaggtggaggacaagccggagccagcggtgatctccgccgggaccgagagggtggatgaagatttcatccagtacctgcggacgcgtcccgtgcgtaggcccagtcctctccccgaaatcctccgcaacagccgcccctggcttgcagagtgttcccaaaccactgatgccatgatcaacgagaccgaagacctgtacgaggacatcttgaggcagcacgacgagaaggggtacgccttggtgagggtcgagcgcctcgacaatggcaagaagaggttgtatcgtctccccgaggaagaaactgcataggccttgagggtttcgctaaattatggtgtgtgatgtgctaaattatggtgctaaataaatttggaactgtttaagtggttattatggttcctagtgttgctgatactgaatctagctcccagctcttctatgtgttccatttgtttcgcaagagctttcgtttgtctgcggctctggcctttcggttgttcgattttggcgaagattgatttgctgatggagataaaaaaaaa

SEQ ID NO: 36408 - DNA, 1591 bp, Setaria italica
  Peptide Sequence Number=SeqID_102382
ttggtccgtccttcgtcgtccgagcggcgcctcgttgcgcgtgccccgcacgggggtctgcgccacgcctcccgcgcggctacatatgttgctgaaaggcgtctgcagcgtccgtcgtcggtggcagtggtcattagaggctctagctgagtgcgccgcgccagctgcttcagtttggtctgagtttggatgggccagatggtttcggacgataaattcgaagaacaggcggctcgccatggtgggatcattaagaatggaagggaaatcttattccaggcttttaactgggaatcaaataagcataactggtggagtaagttagaggataaagttactgatatggcagaatcggggtttacatcagcatggcttcctccaccaactcagtcattatctcaagagggctatctaccgcagaacctgtactgccttgactcttcttatggttctctgccagagctgaaatcattgcttcataaaatgaatgaacatcatataagggctatggcagatgttgttatcaaccatcgaattgggactactcaaggatccaatggcatgtacaatcgctacgatggcatcccaatatcgtgggatgaacatgctgttacatcttgttctggtgggaaggggaacaagagcactggggataactttaatggggttcccaacatagatcatacacagacatttgtacggaaagatattattgaatggctgatctggctccggaaatctgttggttttcaagatttccgctttgatttcacgaaaggtgcagttatgcagcaaagtttgtgaaagaatacattgaggaatcaaaacctctttttgcagttggagaatactgggatagctgtgaatatagcccacctgattaccgattgaactacaatcaggataaccacaggcagaggatcattaattggatagatagcactggaggactttgtgctgcatttgatttcacaacaaagggtattcttcaggaagctgtcaaaggagagttgtggcggttgcgagatccggaaggaaagccacctggtgtgatgggatggtggccttcaagatcagttacgtttattgaaaatcatgacactgggtcaactcagggtcattggcctttcccatctgatcatattatggagggatatgcctatatactcacccaccctggcatccccacggtgttctatgatcacttctacgaccagggacagtctctccatgacgaaattgccaaactgatgcagatcagaaaatgtcaagacatacatagccgttcctcagtcaaaatattggaggcaaggtcagacctgtactctgcaatcatcaacgagaagttgtgcatgaagatcggggatgggtcatggtgcccaagcgatccggagtggaggctgggcggcctctggagacagatatgctgtgtggcacaagtaaatcattataatggcatcgatatgctctcctaaattggagtaattaccctgctaaagtgaagaacaccacgggaaaacatgtctttagtcttgtagattaacctgggcagaaatagagtggctcacgtgtgaattgcaatgtgaattac

SEQ ID NO: 36409 - DNA, 1330 bp, Setaria italica
  Peptide Sequence Number=SeqID_102383
gagtcgaagcatatgtttgaaagcccaccaccatcaaaatatctggctcctcttccgcagactttgactggatcaaggagatcgaggttgcctgttgaaaggcatgaggaaaatcatgaaattttattaaaatgcatcaaagaaaatttaggatttaaggatggaaaaccagttgcagcctgtgtcatttacaaatgccttttacactggcgtgcttttgaatcagagaggactgctatttttgatcatgtaattgaggccataaatgatgtcctaaaggggaaggaagctgacggaagattgccttattggttatccaatacctctgcattgctatgccttctgcagaggaatctacggtcaaatggattatttgccacaccatctcgtcgatctggtggagctctagcgctaggtgggaagatagtgcaaacgctgaggtctccttcaaagcttgtaggccgcagtgattctctgccacaagtggatgcgcggtatccagccatactattcaaacagcagcttactgcatgtgtcgagaagatctttgggcagctcagagataatctgaaaaaagaaatatcacctcttcttaatgtttgcattcaggctccaaagtcaacacgtgggcaacccggaaaagcatccaagtcacctgggcttggtgcccaaccggcatcaaattccaactgggacaacattgtcaatttccttgacttgcttatggatacattgcgcgaaaattacgtgccatccttctttattcgtaaacttatcacacaattattctctttcatcaatatacagttgtttaacagtcttcttctccggcgtgaatgttgtacattctccaatggggaatacgtgaaagccgggctatccttgttggagaaatggattactgatgtcacagaggagtttgcaggtacatcttggcatgagctaaattatatcagacaagctgtcggttttttggttatacaccaaaaaagaaaaaagacacttgaggagatcaggcaagatctttgcccgtccttgagtgttcgccaaatctacagaatatgctcgatgtactgggatgacaaatacaatacccaaggcatatcaaatgaggtggttgctgcaatgagggagatggtcaataaggatacccagaatcttgtgtcaaattcctttttgttggatgatgacttaagcataccattctccaccgaggatttgtccatggctatcccggcaatggattatgcagacgtcgatcttccagaatctctccagcactatacatcagtaacaagtttacttaacttactaagtaactaagtactaa

SEQ ID NO: 36410 - DNA, 1252 bp, Setaria italica
  Peptide Sequence Number=SeqID_102384
ggcaaaggcgaataacagaagccatagacattatttgttcgaatgactgtcaaggctgccatagcatcatacataatcaacctttaggtcaaagaaagaaaaaggaggtcaaaatagagctcccagcaaccatacagatgggtctgagaaacataagcgaggggctttcaactagacaactagggtttaatcaacgacaactctcttcaacgacaattgctgatccgcaacgcgacagtctctaaggctgcgcgactcgctttgttgcctggaaatttgctgctgccctggacgacggcttcacataagccggattcagtacgacgtcacacgggattcagtacgacgtcacacggggcgaacgagggcggactggggtctttgacggactcaccctgacgggaagcgtgccaagaatcatgccactgcagttacaagaagactaagaatagcactatctgcttggacaaactcaacaaaggcaatgcacgtggagtgcacataatcaccaagtagcctcagacgagaaacttcaccgcatgttccctcaaagaattgtttcactacatcttctgcaaccttcttgtcaatgttagtacaatatacagtcctggataccatttctttctcatcctcagttcgaggaagaaatttggggttcacaggtaaaattgctgtctttgatggcaaaactttgacaggataaaaaccaagaacggttccaccaagtgttagtgctgttcttgcaccaacatcatctgcaaactcgataaaggcaaaacgcagcactgagttaggatcaccacagatacggcaatctaccacctgcccacaggttgaaaaaacttcggcgagtttctgttcagttacatgctgatcaatgtcagagacatagactgttcgctgcacactggcctccctatcagctcgacgagggcggcctcccatcatccttctcctcccctgaatgaagccattccttctccgtcgattcggctggccgttggcggatccgtcgctgctggagtccctccccccggcgccgcccatgccaccgccgcccacgagctgcagcacgtgcatcggctgctgctgcggcggcggcggcgggagctggtggtgtcgcgcgtagtagtcgatcgccggcgacacgaacacgggcgcgtcggccgagaggcggcgggcgccggctgcatggccagaggaggggatggagcgtcttcttgcatgaaggactccattgctcgcatca

SEQ ID NO: 36411 - DNA, 1812 bp, Setaria italica
  Peptide Sequence Number=SeqID_102385
tgatgatgaggagacagattcttacaattaacaacagcagttgattacaacctaaagatcccaacttttttacagacagaccagtacaccaatgctgtgcacccacggaacattttacagtaacatccggagcaggacgccggtcacaaaaacgccggcgaggtccggggaccaacaagaacggaaatctacttggctacaaattacacacgggccgcgccgtgcagaatgcctaaaacctcatctgcagcaccggccatggtggatgacaaattgacaaagctacactctactactgaaattacatcactggcagattgattggtcgatgaacagctagttggcgagcagcgcgtcccagtcgatctcgtaggacgggtacttgcggagcacgaagctctcggcctcgtcccacggcacctcgccgaagttcagctgcccgatctccgccagcggagccgccggaggtgccggcaggcggggaggaagacgacatcatctcgtcgtccgacccggagccggagccctcgtcggagctgctgttgctcgccgccgcctccgcgtccacggacgggggcgttgatgggcgtggccttgctcttggccctgccgcccttggacgacgcggcggcgatggtggcgcagatggcctgcagcttggcgtcgacggcggagtccagcggcgccctggaggcggcgttgtcggggaagttgagccgcgccgcgtcgccgcggaggcggtacgccgcctggtcgtaggccagcgcggcctcctcggcggtgtcgaaggtgcccagccacaggcgggtgcggttgcgggggaggcggatctcggcgacccacttgccccagtggcgctgccgcacgccgcggtacagcttctgcggccgctgctgctgcgccggcgccggcgcggggggcgacggggaccgccggcttcatgggctgcgcccgcgggccgagacccgggttccgctgaaggtggagctgggcctggatgaactgcatctgggccggggtcaggtgggtcgccggagggtagctgagcccgtgggccccggcggggaacggcggcggcggagggaaggtggcgggcgccggctgcatggccagaggaggggatggagcgtcttcttgcatgaaggactccattgctcgcatcagatcctcgccggcgggcccaggaagatttatagcagcggccatcgaagaacaatctacttggattttttatgggggatttttctttgtctttgggggaataaaagaaagaataatagccttgttcttagctaaaatcaaagaacaggcaggacaggtatggctgtcccacacagatctactgttgaatggacacagaagcacaaggaggtgtggaaaaagagcctctcttggctaactacctacctactactggagtattccacaacaaggggtgaaaaagaaaaaaatacagagaccagaaactaaaaggctctggagctctctgctatggagggagaccaagaacaagaacagatcggtgaagatcgatgggatggagagagggtttacctggaggacgcaagaagtcgctcagagttagacctacctcgctcagacctcaccggagatggtgtgcgtgtttgtgggcgattatggctttggattgggctcggtggattggtggtggtggaggaagtgaagagggctctttttccacacctccttgtgcttctgtgtccattcaacagtagatctgtgtgggacagccatacctgtcctgcctgttctttgattttagctaagaacaaggctattattctttctttt

SEQ ID NO: 36412 - DNA, 1687 bp, Setaria italica
  Peptide Sequence Number=SeqID_102386
cttaagcagatccacatttaccaccataatataataatagtaacatcacatagatagatcagacgacaaagcagacagcaggataaacatcctcagcgaaaccctgaaggcctaggcagtttctgcctcggggtagtacgtaaacctaccttcttcaaaccattgtcgaggcgctcgacccgcaccaaggcgtaccccttcgtctcgtactgcctcaagatgtcctcctgcaggtcgacggtcttgttgacgatggcagcagcttttgggaaacgcgctgcatacctggggaagaattcgcggatcagatcgtcggggggggtgagcctccgcatgcgatgcgtccgcacgtactcgatttcatcttcccccagcctctcggtcccgacggagatcaccgctggctccggcttggcgtccaactcccacgcccgcctgagtaggagcttggccttcggcttgccctccgccttcgccaccggctcgatgctgctcgccgccgcctgcttggccttgccctccaccttcgccgccggctcgatgctgctcgccgaagccgccttgttccccgccggcttggtgacgaagtcgctccaggacgccgccttcaccatgccactccccgccgccgccttgttcgccgcggcctcgaccgccgaatcatccttgatctaggtttcgagagcgagagagaaaaggacggagagaaggccatggcggagccggtggctctggagatgagggagctggggctggagggtctgatggccccttcgccggatttccgctttgcgaggatcatcaccatccccaagatcaaggatgattcggcggtcgaggccgcggcgaacaaggcggcggcggggagtggcatggtgaaggcggcgtcctggagcgacttcgtcaccaagccggcggggaacaaggcggcttcggcgagcagcatcgagccggcggcgaaggtggagggcaaggccaagcaggcggcggcgagcagcatcgagccggtggcgaaggcggagggcaaggccaagcaggcggcggcgagcaggcatcgagccggtggcgaaggcggagggcaagccgaaggccaaggctcctactcaggcggggcgtgggagttggacgccaagccggagccagcggtgatctccgtcgggaccgagaggctgggggaagatgaaatcgagtacgtgcggacgcatcgcatgcggaggctcaccccccccgacgatctgatccgcgaattcttccccaggtatgcagcgcgtttcccaaaagctgctgccatcgtcaacaagaccgtcgacctgcaggaggacatcttgaggcagtacgagacgaaggggtacgccttggtgcgggtcgagcgcctcgacaatggtttgaagaggtggtttcgtctccccgaggcagaaactgcctaggccttcagggtttcgctgaggatgtttatcctgctgtctgctttgtcgtctgatctatctatgtgatgttactatattatattatggtggtaaatgtggatctgcttaagtggttcgtaagttattagagatgttactatattatattatggtgctaaatgtggatctgcttaagtggttcgtaagttagtagtgttgactaccaatttaagttttaacgtaaaagaaaaagaaaactttaaaacaaaaaaaaaaaaaaa

SEQ ID NO: 36413 - DNA, 2042 bp, Setaria italica
  Peptide Sequence Number=SeqID_102387
acgtacacataagctagatggattaagctgcaacagatggtaataacaagggattacacttgaccttctcgactggccgtgccgtgagaaaaaacaaccggcagctcaaccaggagattaacacggactgctactatcatcacaacactggacgatttactagctatagttactctcgcagccgccatggccgatgtctaaaatgccatcgatccaccgcagctgcaaaaacccaatgaaaattacacagagctgtcattgagctgactgactgaatctttgctgctactactacagtagttgcagttgattgctcatgagaggatggagtcccagtcgatctcccaggacgggtacttgcgcaggtggaaggcctccgtctcgtcccacggcgcctccgtgaagtccagcttcgccatctccgggacgggcgggcgccagcggcggtgaaggcggggagccggcggagaccgactcctcctccccctccgtcgacgccgagcacttgggcgagtccggcggggacgcggccgaggactcggcgtcaggggagccgctcttggacccggcgagggactggcagatggcggtgagcttggcgtccacggaggcgtggagcgggccggccaggtgcgcgccgccgcggcggagggcggggaagttgaggcgcgccatgtcgccgcggaggcggaacgccgccttgtcgtaggcgagcgccgcgtcctcggcggtgtcgaaggtgcccagccacagccgcgtgcggttcttggggaggcggatctccgccacccacttgcccccagtggcgctggcgtacgccgcggtacagtcttcgactgcgccggcgccaacggcggcgacccggactgcttcatcggctgcgcccgcgggcccaggaacgccgcgtgcaggcccctctgctgctgctgcatcatgaactgggcctggatctgctggatctggggccgggccgagctggttcaggcccatcggtccagtcacgcccgacgccgcagaagcagcgtaaggcgacgagtagagtggcggaagctgcgagaaagacgacgaggaggtggcggcggcggtgggaagaggcgaggtggcgaaggtggcgtaggagggtgtaggcatgtaagaatcttgggtcatggaagaagaagagtagtagtggtagggggaggaagacgaagaggaagcactcgttataaaaggttcgagtgctttcgcgagctcctgatccgaagaagaggaggcggcgatctggtgtgcactagtgttgtaatacttgtacatatctatggctgcggccattatgactagttggatggagctagaagaagaggctgggggcaactaaaaacggtgagaaataaaaggagctttttatgcaaattaaagtagaaaaaaagtttggaaatcagccctgttcctcaataaaagtagagaaacagcgggttttgtgcaaagaaaaagaaaaaggggtgatgaacaagaagggtattgcaaaagaaccctttcgaaaggccaaaaggcggcaagaatccagaagagaaaaaaggttctctggatctctgttcctcctaggagaggtgtgatgaggttgagaaaaaatccaaacccaagaacaaactccctttgaggagtctaataaactcaaaggaagagccttcttgaaccggacctttcttgtgcggtgcaaactttccctgctgctaaaaagaatcagagagttcagagaacaaacctgtcgccgatgatctgcttgctcggatcgctcaacctcaccgtggagtggaggggatgtggcttgtggcttcgtgttcttgtgggggtggggtgggttgaggcgtctctctgggggaagaaaagggctccggcggccaggggcttttatatagtgccaggcttgaggccgtgcacgcgaagccaagcgagcatctcttcctcgctgttcattgcgatttcttctccgtggtggattagcacaaaatgatagattaatcagcttaaactaacgtccccccttgtaaaatttatttaaa

SEQ ID NO: 36414 - DNA, 869 bp, Setaria italica
  Peptide Sequence Number=SeqID_102388
tatttgtactcttcatggcaagtatattgggccaattgctaataagtcgcgcctcaacatctgtagacaacatatgagaacttcagatatcgctatgatcaacgagccaacccatacaacaggggagttgtagaaaacatcaaggagatcttctttacacccatccctccttccaagaacaacttccgtggcagggtcctacaggagcatggtctacggcctcgtgcgacaaatggtttcatgagtccaaacatggggagagctgtcggcgacattgagatgggtagaaaaccagtggcttgggatgagccaaggatggcagctgagattggtgatttaggagcaggtctgagcaacttgttggaggacaaggatgggaggtttcgtagtgcatctccagatctcagccgtgacgccctcgctgttggaggaggcttagaagagcaaggctcctcggcaatgaaccctgggcggacaagctggggagtcgaagcaggtcgatgatggcagtgaccatgtaagcggctgtagtgagagactcagggttgttagtgccagttcactgctaatttcttgtttggtttgagatttgaggccactaatgttatagacccatgacttgtacggcggttgtttccggatttaagtttctcctttctcttagtttgagacgtctttcctgtatgttgtttgaagcagttggtttgtgacgtctccagtttggcaccgtctgctttcgtctgtatatattggtgcggtggacctgaaacagtttgagttgcttggctttggatgttaatggttgtgaacagtatttgaccttcgcagttaatgaacatcgctctatctgagcaacccatgctaagatt

SEQ ID NO: 36415 - DNA, 1145 bp, Setaria italica
  Peptide Sequence Number=SeqID_102389
tacttctgtgcattcgttgcgagggaattgatggataatttctcttatggtatgggattgtctgtaatgattgcagcagttctattcacagcatatgatctgagtcttctgcttctaacttctggaagagatccgggtatcatacctcgcaatgcacatcctccagaacctgaaggttttgatggcaatgcagaggttggggctaaccagactccacctttgcgtttgccccgagtgaaggatgttgttgtcaatggaatcactgtgaagacaaagtactgtgacacttgcatgttatacaggcctcctcgttgctcccattgctcaatctgcaacaattgcgtggaacgttttgaccatcactgcccatgggttggacaatgcataggactgaggaattacaggttcttctatatgtttgtgttctcaacaactctgctctgcctttatgtatttgggttctgctgggtgttcattgttaagatcagaaatgcagagcagataacaatttggaaggcaatggcaaagacccctgcatctattgctctaatcatctatacattcattgctgtttggtttgttggtggcctctctgtgttccacttgtatctcatgagcacaaatcagacaacatatgagaacttcagatatcgctatgatcaacgagccaacccatacaacaggggagttgtagaaaacatcaaggagatcttctttacacccatccctccttccaagaacaacttccgtggcagggtcctacaggagcatggtctacggcctcgtgcgacaaatggtttcatgagtccaaacatggggagagctgtcggcgacattgagatgggtagaaaaccagtggcttgggatgagccaaggatggcagctgagattggtgatttaggagcaggtctgagcaacttgttggaggacaaggatgggaggtttcgtagtgcatctccagatctcagccgtgacgccctcgctgttggaggaggcttagaagagcaaggctcctcggcaatgaaccctgggcggacaagctggggagtcgaaccaggtcgatgatggcagtgaccatgtaaagcggactagtaagtagaagaagaactacaagggttagttaagtagaccaagttacaactaga

SEQ ID NO: 36416 - DNA, 1989 bp, Setaria italica
  Peptide Sequence Number=SeqID_102390
cggcgtcctccaccaacctcacccctcgagtacccggcgcaccgggtccccgcagcagcagcagcatcagccgccatacgacgcttatggtgacaattttggtgctaaaaggatgcggaagcctgtccagcgacgaacagtggactacacaagcagtgttgtccgttatgttcaagctcgcatgtggcagcgggacgcgagggacagattcacattacagccaactcctgctgctgtcctagatatgttaccatctgttgcttatccggataatccttccacaagttatgctgccaaatttgtgcattcttcaatcaataagaaccggtgctctatcaatcgtgtcttgtggaccctacaggccgtcggcttatcactggatcacaaagtggtgaatttacgctatggaatggacaatcttttaattttgaaatgatacttcaggctcatgatcaacctgtgagatcaatggtttggagtcacaatgaaaactggatggttacgggtgatgatggtggcgcaatcaagtattggcaaagtaacatgaacaatgtcaaagtgaataaaacagctcacagagaatcggttcgtggtttaagcttttctagaacagacttgaagttctgctcctgctccgatgacagaactgttaaggtttgggactttgcaagatgccaagaggaaaaatcattgactggccacggttgggatgttaaaactgtcgattggcatcctacaaagtctttattggtttcaggtggtaaagactatcttgtgaaactctgggatgcaaaaagtgggagagagctaaactcattccatggtcataaaaacattgtgcattgtgtaaagtggaatcagaatgggaactgggtactgactgcctcaaaggatcagattatcaagctgtatgatataagatccatgaaagagcttgagtccttccgtgggcacaccaaggatgttactgcgttggcatggcatccatttcatgaagaatattttgttagcgggagctttgatggagcaatatttcattggttggtcggccatgaagctccacagatcgaaataaacaatgcacatgacaatagtgtgtgggatcttgcctggcatcctgtaggctatctactttgcagtgggggcaatgatcatgctacaaagttctggtgtagaaacaggcctggtgatattacccgtgatagatacaacagtggccagacacaaggttatgttgaccaacatcctgcttttggtgctcgtgctatgggtggattccagatgcctgaacctccaacacctggaccgtttgctcctggattgtcacgtaatgaaggcacaatccctggcattggggttgcaatgaccttggatggatctgatcaaggagagcagagaccatctattccaggtcttccacctgggcaaccccctctgccacccggtcctcatccatcacaacttcttgggcagcagcaacaataccaacagatgcctcagcagcaacattcccagtttcggccgccacctccaaatatgccccaattgcagccaccagctcacatgctttcacattcgcaaggatctcgtccgacacttccccagcttccaccgatgggcggaccatcaatgccatcaccagtgaatccaccacttccaccaatgcctcacccaacggcaatgcaaggttcacagaaccagatgatgccccaaatgccacagcacatgatgggcctaaatcagatgcatcctggttctgttcctcctggcaatgtacctccaatgggtgggttcccaagtgcgatgggaaacatccaaggagcatcaggttcatctggcatacaaaattttcctatgggtggcatctacaaccgacctcagggacaaatggctccacaaggacaaatgacatccattccaggtctaagctcttaccagggaatgggcaatgttggccttacacaacccccaccacctactcagcacccc

SEQ ID NO: 36417 - DNA, 320 bp, Setaria italica
  Peptide Sequence Number=SeqID_102391
gccgggctccaccttgcagaccccgaggccgccctccgccagcgccgccttgggctcgatgacgtcaagaaaccccatctcggcgccgtagtcggcgacattattgcccccgaacgcggcggcggcgccgtagacctcgctgaggcagtcgaacccaggcgccgccggatgcggctgcggctgcggctgcggctgcggctggtcgtaggaggccgtgaaggtggggaggacgctgacggtgggtggcggctggtggcggtcctggaaggagcagtccatggcggcggtgcaggcggccgccggggagaagaagtcgctca

SEQ ID NO: 36418 - DNA, 739 bp, Setaria italica
  Peptide Sequence Number=SeqID_102392
ccacctaaatcaaagatcaattctgtatcttctggatctgacacggtgaaggatgtggtgcctgctgttactgcctttcgtgaagatgccagcggttctgtggaacgcaaaaattttctaccaaatccacaaattatcccctccagttcctttggtggccctgcatctaactttactaagccatcagcacttcgaatgccctcaccttcggttggttttttcactcaggaaaatgctcatgtgtcatatggcaatgctgctaaaagaaatgtgggaaatacttcatcagtagtaaaacctcccagatataagcagcctgaggatctaaatggcagagtacatataacaaagcctctgtcaaccaattgcacagctgcttccaatgtgccacctgtaattagagagagcaatcccaacaccttggtggctccagaaaaggaattctcatcaaaatttattactagtaaatactcagcaaaatctgagtatgcaaataaccaagaaaggtcagatgttaattgcttattggctggaattggagctactatacagccaccaaatccagcaaagaatgatgctgccagatatagcacacccattgtgtacagtgacacatcacatgtagaaagaagggacatttcaaaagaagttgaatcatttgagaattcctaccctcttaaaggtgtttgtccctcaaccattgaacctgttgaggactcctcttttaaatccacttgta

SEQ ID NO: 36419 - DNA, 707 bp, Setaria italica
  Peptide Sequence Number=SeqID_102393
tgatcacaatttacaaaagaaatcaattatctcaggaagcagtagttaagagaatgtgatcacaattcacaaaagaatcaatgtaccaagtcgggactttacaatggagcagcgcagctacagatcatcctattggcaccagcagtttgtgccatcagaagaagtatacacagtatacgcctatctatctcgtcagtgtatgcctaattctccatctacctctttcacttagtaatgctcatcatactcacaggcagcagtcggactcagtttccccgagcagtgtgttgatttgggttctcacttctcacctgatttctcaccactgcagctacctcccttgtcttgacttggtcaggctctctacctcttgttagaagtcgctgtccgggactggcggtgctctggtccatgtcgcaacttattgtccagcagaaaaacatcttgctgcctaggcttgtagaacctgtcaagctcacggcatctgatccacgtcataagcttcttctccaaagtgaccatactatgggtgacataggctgatacactatgctcttcccttttcttcttcctgcgtaacttatgaagttcaacaggttctggtatcaaaggcaggtaaaactcctctaatgctgcaaatgatatccatctgagaggaccatcttcagcatgattgtccataactcgtatgtgcagttcttcccttt

SEQ ID NO: 36420 - DNA, 440 bp, Setaria italica
  Peptide Sequence Number=SeqID_102394
tttttttttaattagataacactatctcgccaccactattgcatcttcatgcatcataccaattggtgctaataacaaccaagattataaataatgaacaaacgaataagattacaaacagtagattcaatcctcaaaggctctcagaccacgacggtcacgacactagcactgcaactccgagctgctctgcacgcgctcccgcaggtggcggcaggacgctcctcctccccctcctcggcgaaccacggatgctggagcgcggccgcggcggtgagcctgtcccggggctcgacggcgagcaggccggcaaggacctcctgcgcgcccggcggacagctccggcaggccctggaacgccggccagtcgtcgaacgccttcagcccttctcgccgagcgcgcgccccagctccgtcaccctcggcgagcatggcgtcgt

SEQ ID NO: 36421 - DNA, 509 bp, Setaria italica
  Peptide Sequence Number=SeqID_102395
cgggaggggggccgggtgaggggggcgggcgggggaaggggagttggggggcgtgtgattcatctatttagtacctaattcccagttgtggaatcggtactagagggggggttcccaaccggtactagacgtgaattccctagtagtgaggggtgcattagcacccttaattactatataccttcgctagtgaggggtgcattagcacccttaattactgtataccttcgcctagttactaccgtgccggagaggaggaagaagctaatgcggatctaataagaacatccacagttgtagtgggaatccatgcttcatctttctctcctattgtgggtaccaattccagcaaaaaaaagcagaccccggggtgaatatatatgcattcatgcccatttcaattattgaataaaatattattttatagaatcaagtcggccactggccaatactttagttacatgcaaacaaatttaagctatatttgtccacagatgttactttcgaca

SEQ ID NO: 36422 - DNA, 264 bp, Setaria italica
  Peptide Sequence Number=SeqID_102396
cttaattcgcaggaccgcgccaccgcccaccgcgtcccctccccgccctccggcgatcacctccggcggccgcggccatgcggagccggggctcctccgaccgcctcgaggcgctctccctcgagatcgagcgcaagctgcagaaggctctggtctccaactcacagcgtccccagatactgcagcaattattcgcagatattgcattgaaggtggatgatcgtgcccgagatgcgattatgagcgagaatgatgatggcattg

SEQ ID NO: 36423 - DNA, 344 bp, Setaria italica
  Peptide Sequence Number=SeqID_102397
caaggcgaaatgaaaccttcgttccatggaactgaccaaagattcagagacggacagaaacagttcgtagctaattagcatatgattatttcttatatataaaagttggagcaagcataacgtccattggtctgtaagacacacgacctaggaactctgcagaatgcaggaaaaggacgccagccggattaacttccaaaagatgcaacctccaaagaattgtattcttgcattgaaggataatgacaatgtacactaagtaccctgggagagctcacagcatgcccgcccgctcgccgctgtgtgcccggtgagcctggccacgaccgccgccggcgaccccg

SEQ ID NO: 36424 - DNA, 417 bp, Setaria italica
  Peptide Sequence Number=SeqID_102398
aaaagtttaaaaggccctacaacacacattgatgatgatggtctcactgaatacactcaaaactatcataaccctgccactcaacttgtaacgaaagcaaatgtacagtatcggggttcaccaagaacagctctttctgttgtttatccttctcagagccagaaaattcgtgcagtgcaaacaaatgctgaggttagctggacagttggagaaaaccagcattcctagtggatcattgctgggcgaaaaggttcaaagaataatcaaagagtcactccactgtgaatgaacagaatggacaaagcagggtttcagtttgctagaacaaattctaagtcctgacttaacagactcttcaagttcatggttttccttctagcagacgtactatagtatctgaagtagaaaaattcatca

SEQ ID NO: 36425 - DNA, 1355 bp, Setaria italica
  Peptide Sequence Number=SeqID_102399
catcatcaatcaatacatcgccgtgcccccgatccaaccacacgagtcgacacagccccgcgatcccctctctccctcttccctcctcagattcgccgcgatctagccggcggcgggcggcgcgatggcggggcagaaccagcggctcaacgtcgtgccgacggtcacgatgctcggcgtgatgaaggcgcggctcgtcggcgccacccgcggccacgcgctgctgaagaagaagtccgacgcgctcaccgtccagttccgcgccatcctcaagaagatcgtcgccgccaaggagtccatgggggagacgatgcgcgcctcctccttctccctcgccgaggccaagtacgtcgccggggacggcgtccgccacgtcgtcctccagtccgtccgcgccgcctccgtccgggtccgatcccaccaggagaacgtcgccggggtcaagctccccaagttcacccacttcgtcgaccccgccgccgcctccggggggccctccaacgcgtccccgagcctcacgggcctcgcccgcggcgggcagcaggtagccgcctgccgcgccgcgcacgtcaaggccatcgaggtgctcgtcgagctcgcctcactccagacatccttcctcacgctcgacgaggccatcaagaccaccaaccgccgcgtcaacgcgctagagaacgtcgtcaagcccaggatcgagaacaccatcagctacatcaagggggaggctcgacgagctcgagcgcgaggacttcttcaggctcaagaagatccagggctacaagaagagggagatcgagcgccagagggccaacgccaaactattcgccgaggagcagctcgccgaggatctcgcgctcaagaggggcatctccgtgggggctgcggcaaatctgctggttgctggaggggagaaggacgacgacatcatcttttgattacctaaatcattcaatcgtggcagaaacaataagtcgatgctggtgctccagaattgtacctgttcatagagtgatggcggttttgtttcagtgatgagtaatctggagcctggtcatccaagaccctgaataatctgtacttggaaaccaaacattgccaatgaacttcagcacggagtgttatgtgcagctggtgtagtaaattcatttggaccatatttccctgcatgttcattatagttgtatttatttatttagaggtgcgtgcggattgctgtactgcacctgctctgaagtcgcagaaaatgtatttgcttctggatgtgcattctgatgcagttcgtgattttgtttccttgctcgcctgttggtctagcccctgggaatgaatagtcgatgtgcctttgtgcgtaaaaa

SEQ ID NO: 36426 - DNA, 481 bp, Setaria italica
  Peptide Sequence Number=SeqID_102400
tatgggccaggctgcactgcatgtattctcaactagatcggtcatgtgttctggcttgtcacactccttgctatgtatgaactacggaagtaattcctgattcccttccccctttgttacacttgatttcttaaccctaccaaagccaaactgtttgagtcacaatctggcacctagccaggatgagagtggctggatgagctcttgcctcgtacaacttaggggtccctcttctcaatttctttcagcctttggtgcactcaatgagtaatttggttctcataggtttatatctactagtttattttgttaatctttgaagggatattcatagctaaacctaaaagaaaactcaagtgatgcataaatagtgaaaggtgtgggcatcattatatcgtagcccccaccccatccatatgtccttcctggctccgcaattggatggcactgatgatttaataagtggagtgatatctgttat

SEQ ID NO: 36427 - DNA, 671 bp, Setaria italica
  Peptide Sequence Number=SeqID_102401
tttatttgttctatggaggggtgctagtagcagaaaatgagaaataaagtagcaagcacaatgcattgcagaaaaaattcaggtggtgccacaatttgagcaccagttcggaggaataaaaagaacacactgttcacttgtcagggatgacacactggacgtgcaccatctgagtgaccactgaccatgtctccagattgggttcattacaatggctgccggccgccaggagttgaatagaatccaatgtactcatgtttccatagcaatgaatatcatatgcaattatagccttctattgattctgtgggcttgaaaacaaacatgtgagctgatcgatccttaagtagagatacactagattgaaaagccacctcatcggagctaaattaatataaacatgtcattcaaattgtttttttacctctctttcgaacatgagtgaaggcgtgaagaaaatgagacagaatgcagggaggactgaagagaggttgtatctacggttagtggcagtggcaagtaccttcccactgaggatgtagggacactggcctcaagcgctgggtgggaacctgattagttgtgtgagaggagggtggacacaaatgggtgggaggctgtgctgggtgaggtagtactggtgggcccacatgacgcagctgattattttg

SEQ ID NO: 36428 - DNA, 325 bp, Setaria italica
  Peptide Sequence Number=SeqID_102402
gtggggagtggaggggagcgggcgtctcatgctagtggcaaaccggcagggaggtgggggaggcttggccgagcttgagcgtgaggcgtgagcccgagcttgtacgataagagagattagggtgcctggggattgaagaaggtgccgagaggcgggatctgcatgaagtgagagaaatagggtttaacagcctacagattttttataaatgctccaggtaactcaaatatgtgtgttagatcactcatgtttatccacgaaatgcagaatatggggaaggtggtccagtttctccatgtggggatgtatacagcttcggaatcgt

SEQ ID NO: 36429 - DNA, 434 bp, Setaria italica
  Peptide Sequence Number=SeqID_102403
tcggcggcagcgggacaactggaaccacctgctgctccactccaccaactccctgaccctcgcggcctccgtcatggccgcgctcgcgcccgccgcgcccggcaccgtgggcgcgctcaaggcctccgcgggggcggctcctcgccaccgcggcggtcaccatggccgcggtcaacaggatccagccgtcgcagctcgccgaggagcagcgcaacgccacgcgcctctggaggcagctggagcgcgacgtccgcgcggacctcgacggccaccacaggacggcgccgatcaccgaggctgacgtgcaggacgccatggaccgggtgcttgcgctcgacgccgcgtaccctctgccgctgctccccgggatgctcgataagttccccaaggccgtcgagcccgcccggtggtggccgcgccgccgccctcaacag

SEQ ID NO: 36430 - DNA, 243 bp, Setaria italica
  Peptide Sequence Number=SeqID_102404
tttgatagtactgtatttcggaatttattgtctagtttgttagttctttgtttaaactttagttttcttttcgggtttcgttctgaaacttgcagaggaatctggcactggagagatgagaacttctttgatccatccatctcaattctcaaagaagttctcatctctccagtgccagattcctctgcaagtgcagcatatgatcacagccactaacccagccagtgaccgaagacacggcca

SEQ ID NO: 36431 - DNA, 580 bp, Setaria italica
  Peptide Sequence Number=SeqID_102405
aaagtctgcatgcagatcttgcactgcaaggaagaagttttcgaggtgatcatcagctcgcgacggatggctattcttttctttgcaggtaaaggaaattcgcagaaagaaaaggcatggtacatcagacagtaaatgccagctgaggaaattacacagcaggtacctacctcagtatttgcaagagctatctaaaacagagaattaccaaaacgttcagtagtcagtgcagtagtgagtttccagattgcacaggggtaatgttttattaaaaaaaaggttatccattccactacttggcctttgtatccctaccacgtacagtcaaggttaggctagaacagttgggtcacgttcagatgttcctggacaaagctcaaccattagtgacggttgatgtgacaccgctaagctaatcaagttgatgtgtgcagcatgggttaagacatctggttgcagctatctatctcctgatggtggtaagctaacctacctacccactaacctacctacccactataggcgtgagccaataatgtttgcagcaaaggcttcttggtacttgtattgttaaaaacta

SEQ ID NO: 36432 - DNA, 471 bp, Setaria italica
  Peptide Sequence Number=SeqID_102406
aggcttcgaaggtggggatgaacatgatccccttcttgatagaaattcactccagctatttgtttgtgatgcgaccaccaatgagcagagttgaacacaagcacatcagcacctttccaccttgatgagctctgatctatggtatcaatccgtagtgtcattgcgcgcttttggccgattcttgctttggtttcatgcaccaaaaaatgtgtagtatgatactccacactgcaattatagtccctttttgtttagtaatcttgcggccatgagtttcacgaatccttgaaggatctgggattgctgttcgtagcaagcacatcatggattcccattggttcctgttaatggagtctccaacaaacactagtctctttcctcgcagcatctcaagcattttccttgcattgaaccagtacacattgcaatgcttaggctgccacctcatcttcatgtagctttgatccattt

SEQ ID NO: 36433 - DNA, 865 bp, Setaria italica
  Peptide Sequence Number=SeqID_102407
tgctgcaggccgccgcggcgccgggaaccccatggctcagcagcagtacatgttgatgcagcaacagcagcagcagcaacagcagcagcagcagcagcagcagcagcagcagcagatgatgatgatgaatggccatgggcacgggccgcacggccatggccaccaccaccacggccacggcggcgccggttactacggctacggccgcccaccgatgcattacccgatggcctacccaatgccgccgcactcgcacaccgacaattacaacatcttcagcgatgagaaccccaacagctgctcagtgatgtgaggtgggggaagagatccaggcctgttgcttcatcttgctgctctgatcaaagtgaatcaagtgaaggaactgaaggcgatcgtcgatcagcatcaccaattcaccatggttgaaactccttggatggatgaattagtatacatgagaaatgagtccccagctagaacctatcctcctttcccttttctctttctcttttgttcttatcttattttccgcctttctttggagaaaaggaacttccttgaatgcgaaggtaggtatagtaattatggatagttgtcataagagaggagatgatgatgatgatgattgcctttatagccaccactcaataggggcggtgcttgtggcttcatcccttcttgcttcataaggtgggctgatggtagatcaatattgtcaatctcagtaactcagtgtgcatatatgttgtggtttccattctaactatataatggtcatggaagttctacaataatggtgcttggtttggtcctgtggcgctgtcactgaacctaaaaccttttgatgctgtacatgctcatttct

SEQ ID NO: 36434 - DNA, 433 bp, Setaria italica
  Peptide Sequence Number=SeqID_102408
gaggatcctgagcgtctgcctgtcaaccacacggcctaagtcatggccggtctcgaacgggtcctcgatgcacatcagatggcggtcgttgccgacacgagtagtccagttcttctcctgcttgctgatcgtgttccccatgcgaaccgagatgacatcacgcctgtaatcatggtcgaatgcccagtagtggaagaacgcccagagtaattccgcgatgctctccttgttatcagcaccgaagtcttggagatgatgaacttcgtcgaaatatgcgcactcggtgccatcaacattcatggtaaatgtttgctccatggcctgcagacatggtagaatcttgggctctcgtagctgcaagaagttaatgcacatgagaacatacgcatagctagagagggtcccacgggaagtttcattcaccacccctcag

SEQ ID NO: 36435 - DNA, 315 bp, Setaria italica
  Peptide Sequence Number=SeqID_102409
ccttcagtagcttgttggttccaatcggttgagcgcaagtttcctgctatgcagtggcctttgttttgtcccttgcttcatgagcgttttgggaaggaccagtatcaattgttgctcaggcaactgttccgtagtaagcaactaggttcagttgctgattacatagagcacttttctggtttagtggaccagctgtcagcttatgaatctgtaccagaccctttattcttttgcactcgatttgtggatggcttgcgtgatgacattagagctgtagttcttttgcacaggcctttggacttggatactgactta

SEQ ID NO: 36436 - DNA, 1261 bp, Setaria italica
  Peptide Sequence Number=SeqID_102410
ttttttgttggtctggtcttcagtgattttatttccattgccctacttgtctagtaagggttgtagagtttcacgttgcaagcagtgctagacagaggtaattacttgattggttgcagaggaactacgctttttcacctaatgaacccaccagtgaaaacataaaaatatatgcagttattatttgtatatatgctaccgcaggaaaaattaaccattctccgttcacctctaagaattcctccaacagaagaaagctctgctcaccctgagagtgggaaatgaacttttcctcttcggtgtaaaattactgtacagcacgctaggactcagctcacttcttggacacgtaggcgtagtactgcgccatgggcacgacgaaggcgatgacgagcaggcctccgacgacgagcgtgaattgcccgcgcttctcctccgtctcctccttggtcttgaagttggactccctcttgttctccttgaacgacgggccgcccgtgtccggcagcccgtcgatcgccgccgccagccgcttcgccgtgctgaagatcgcctcgttgtacttctcgtccgtcgccagcactgggaggttctcggagacggtggcgtcgaggatctggtcgccgacggcctggacgaaggcggggccgccggtgatggcgccctccttctggctggtgacgagcacgatgatgcccttgttgctgccctcctcaatcgtcgggtaccacttctccagcacctggtccgcgtactcgaacgcgtccgctttgctcgtgagcttgcggacggtgatgaagttgaggcggatgttcttgcgctcctcgaggtcgcgggccagccgcttgacgtcggacttggtcacgcggctcagcacgccggcgtcgtccaccacgtacgagtccacggggggcccgtcgttcagcacgtcgaactcggatgccacggccggcgcgggcgccgggcccaggctgatggccagagacagcgcggccgccgccaggccgtggtgcaggaacgacacccagctcctgccgccgccgctgccggagtacccatgggaggaggcggaagcggcgagagccgccgcctgctgctgcttcttgagcgcggcgcaggagacggtggacctggccgagacgctcctggtgccgcggagaggggtgaacaatgtggagggggagaggagggtctccattgctgctgccgccgcgggagctcgggaaaagaggagaggaatcgcgcgcggttgtgagggcgc

SEQ ID NO: 36437 - DNA, 756 bp, Setaria italica
  misc_feature (753)..(756): n is a, c, g, or t
  Peptide Sequence Number=SeqID_102411
ttttttttcgtttttttttcttttttttaggttttttttccgttttttagttttctttaccttagtcccgtcggtggccgcggcgccgaagccgcccgcgctcccgttccgcgtcggacacgggttcgacctccaccgcctcgagccggacctcccgctcatcatcggcggcatcaacatcccccacgaccgtggctgcgaggcccactccgacggggacgtgctgctgcactgcgtggtggacgcaattctcggcgcgctggggctgccagacatcgggcagatcttcccagactccgacccgcggtggaagggtgccgattcttcggttttcatgagggaagctgtgaaattgatgcatgaggcaggctatgagctgggcaaccttgatgctacactgatcttgcaaaaaccaaaatcagtccattcaaggagaccatccgatctaacttgtgtgacctacttggggcagacccatctgttgtcaatctcaaggccaagacgcacgagaaagttgacagtctaggagaaaaccggagcatagctgcccatactgtagttctcctgatgcggaaatagaaaagtggaagtagtgaattgtatcgtactacagggattgaattgtagtgaacaaaaggctgttatgttataccagtacttaagtgatctagtcactatgggaatcttcatgttggagaaacaataaagctgaatgcaatgagagaagttttctctgcaacaaaattatttaannnn

SEQ ID NO: 36438 - DNA, 1312 bp, Setaria italica
  misc_feature (1273)..(1312): n is a, c, g, or t
  Peptide Sequence Number=SeqID_102412
tcgcggcgtcgggcggggaatgggcgctgaacaaggtgaccagcatgtacgcgatgggcaaggtgcggatgaccgccgcggagctcaacagcagcgacggagacgcccacggcggcggcggtggaggcggaagcggaggcaccggccacgggcaccgcggcgggaagaagggcggcaagggctgcggcggcgaggtcggcgggttcgtgctgtggcagaagaagccggagctgtggtgcctggagctcgtcgtgtccggctgcaagatcagcgccggcagcgacggcaaggtcgcgtggcgccagacgccgtggcaccagtcgcacgcctcccgcggccccccgcgcccgctccgccggtcgctccagggcctcgacccgcagctgacggcgagcctgttcgcggactcggtgtgcatcggcgaacggagcgtcgacggcgaggactgcttcgtgctcaaggtggaggcggaggcgtcgagcctgcgggcgcgcaacagcagcagcgtcgagatcatccggcacaccgtgtggggctacttcagccagcgcacgggcctgctggtgcagctcgaggactcgcacctgctgcagatcaggtccagcggcggcaccggcgggagcgtcttctgggagaccaccatggagtcccgcctcggggactaccgcgccgtcgacggcgtcaacatcgcccactccggccgcaccgccgtctcgctcgtcaggttcggggactgccaggacggcaacaccaggacgcgcatggaggaggcgtgggacatcgaggaggtggacttcaacatctggggcctgtccatggactgcttcctgccgcccagcgacctcagggagggcaaggagacccaggacgtggccgtcgtcaaggctgacgcacggccgccgccgataaggataccggcggtgaccgtgcgcgttggaccgtcgcaggtggccgccgtgaacatggacgactcagactcgctcatcgcgcggtcatgactactactcatgacagacgtacttacagtgttgagtgaagagcagaaacttgtttactataagattatacttgtggtaagatctgtaaatatgttccaggttgagattctttttccccttcgaggtgtggatttacctcagctagaaatgaggccaggagtgagtagtgagtaatccgaactaggtattccagtagctgtgttgtaatgtcatgctctgtccctgtaaatctgaaagaatatcccaattctgccctgccacaatgctagaaactnnnnnnnnnnnnnnnnnnnnnnnnnnnnnnnnnnnnnnnn

SEQ ID NO: 36439 - DNA, 256 bp, Setaria italica
  misc_feature (251)..(251): n is a, c, g, or t
  Peptide Sequence Number=SeqID_102413
taaaggcatggcctggggagccattgctaaatctctctctctgacatcagaagaaaaacatatggcttccttgctggtgggaaaaatcttatattgaccttaggaaccacgctacagtcagtaacgtgtgctcgttgcctgctgctgatgtgaaacacatgcttgcggatcattgccgagcgaaagtttggagtataacaagcatgacatttgctctttgggatgctaggactagggagctgttaaaagtntttgg

SEQ ID NO: 36440 - DNA, 354 bp, Setaria italica
  misc_feature (311)..(311): n is a, c, g, or t
  Peptide Sequence Number=SeqID_102414
cgacgaccagaaatgtgtggttgcacgcagcatgatccatcctcagtcatggcggacgtggatgctatactcgacggtggcgtcgccggtcctggcgtcgaaccaccgcgtcctcaactcgcagtacccgtgtgcgaacctgaacacgccggtgccgccgaccacggccatctccttgaccttccggtcggccgggttggggcccaggatggcgaggctgctgccgttgtaggcgccgtcgacgaagacgaagttcatggccatcatcaccgacagcgagtccttgccggcgcagacgtacatgccctgcncgcgccccaggagcctcgacgtcaggttgggccctccgtgagc

SEQ ID NO: 36441 - DNA, 582 bp, Setaria italica
  misc_feature (1)..(1): n is a, c, g, or t
  Peptide Sequence Number=SeqID_102415
ncgatgttaacaacactcagtgtgcgcagcaatctcagctttctgaatcctctcggcaatacaattccatataattgtagctccctgattataaagggagcatgaagcaacaaattaaagtgcagcagctacgcttatccatagcagtgcagcagctacgcttatccatagcatcttctcgtatgcccttaagctgaggtgcgtaacagagcatacaaaaaatccctgaaagtaaagtcaaaagacatgccttgttctgcaatacctgtggtacatcttcataaaagctgcttgccatttctttatatgactcgccaccccataaattcttagcatgaatatgctgtaacttcctgagattgatgatggtctttggcaaattccttatcattgtttgtttaatatccagcacctgcagttgcttcagattacccaatgaatctggaaggtaaaaaataatgcatcgtcttaaagaaaggtattgtaggtgatgaagcttcccaatttgctcaagatgatgatcaaatagattttctgtgttttccaagtctagtattcgcagcaaactcatcttgttagaaa

SEQ ID NO: 36442 - DNA, 1705 bp, Setaria italica
  misc_feature (40)..(40): n is a, c, g, or t
  Peptide Sequence Number=SeqID_102416
ttaccatcgatcctcactatcgattctcatacatatgtancgggtaaaacaatccagcaaccatacaagcatgcatctcgatgcagaatgaagcatggcaactatttggacacaaacacaggaaacaaacttagagatggttcagaggcctacaactattgatttgtgcgaattcgaaagaaacacacacagataggggacgagatgaaattaacacatgcatcagttcatgccttattatacacacacatttcctgcagttcagatagcctcgtccaatttagatactagagctcccgaactctttatgacgggtccgtttgggttcccgtcaagctggtcctgcacgtgtgtcaggaagtcctcctcgtacttatcgttgtccagcatgaattccttgaggcttgggagagatgccagcccagaaaacatcccggcattggaagtgctgggataaccaacaaagcatgccagcccagaaaacatcctggcattggaagtgctgggataaccaataaagctcagcagctcaagtttaggcgttgcttcttctccaaactccaccgacctgaggccaggtatgcaagccagctgcaggaccatcagactcgggaatgcctcccgatggaaagtgagattgagctcttcacccttgaacgagcgcttcaacagacgtaggatggccaggttgggtagcttgccgaggacctgtatggtggcatccaactctgacagcagggtctcctttagcttcagcttcacaaggctattgagccccccgatccattccggcaatttgactagattgcagcgcaccttgaggctctggaggttttttggaggcgatgacacgccatccaagcagccctgtaaacctggctcgctcattgaatgcactgtcagagattctaggcagcggagatcagcaagggtggaacaaaactctccacaatttttctgtcgatgccagtcactgctaacctgcgcaactgggtgagcgcttttatctcctttaggatgcccttcccggcagcgatgttaacaacactcagtgtgcgcagcaatctcagctttctgaatcctctcggcaatacaattccatataattgtagctccctgtggtacatcttcataaaagctgcttgccatttctttatatgactcgccaccccataaattcttagcatgaatatgctgtaacttcctgagattgatgatggtctttggcaaattccttatcattgtttgtttaatatccagcacctgcagttgcttcagattacccaatgaatctggaaggtaaaaaataatgcatcgtcttaaagaaaggtattgtaggtgatgaagcttcccaatttgctcaagatgatgatcaaatagattttctgtgttttccaagtctagtattcgcagcaaactcatcttgttagaaatgaaaaaatggcctccactttccaaacactgttaatgaccgtatacgattcaggtccaccgtgctctcgaagtctcttttatctccctcccaattactgcttatcgtaaggtggcgtactgtgccatgtgtgtttgatctgcaaccttcttccagtctgaaaacaagattttcctctgttgactttgagatgctaatttcacgcatgagatcatggacttggcaagagtcaaatccttttctactgtagactgactcttgacatggtaggat

SEQ ID NO: 36443 - DNA, 621 bp, Setaria italica
  Peptide Sequence Number=SeqID_102417
tggatagtgctgcagatgtttgtaaacagaggaggttcaccaccgaaatggctcaaacttttgctttccaggacgtatcagcaaagatcatgtcgttctctcagcacgggacgcgcgcggtctgcatcctttcagcgaacggcgccatatcaaatgtgacacttcggcagtctgctacctccggtggaacagtgacatacgagggccggttcgagatactgtccctgtccgggtcgttccttctgtcagagaacggcggccatcgcagtcggactggtgggctcagcgtttcgctagcagggcctgatggccgtgtcctgggtggtagtgttgccggactactgacagctgcttcaccagtacaggtccgttgccatcctcattcatccgattattagatttcggcttcacaagtactgctgaaatatgtagtaggctgtagcttcctgattttatttcgtggtagcacaaagcatctgcgacagagcgatgtcaacctctgtccgaatcttcttccggcgtcaattccacactccaattgcacagtgatcgccattgttgtttcttttacagatcgtagcggggagcttcaacaccgatggaaagaaggagccgccgaag

SEQ ID NO: 36444 - DNA, 1289 bp, Setaria italica
  Peptide Sequence Number=SeqID_102418
ttcttcctcccattttctttttccatttccccctcttcttccccgccattccaagctgccaccagcctacgctgtaaaatctgtgctgctctgttcgtcgtcaaaattttcctcggggtttatgggttcttgcagctcctagctcactccgccgctcctaagatttgctccttgcagcagagaagttgcagcctttggagcaagaaatcgttggagggagctgttgacttgtagctctgctcccgctcacttgcttagtgtggaatgatggaggtgaggccgtcttcggagcaaggggtgatgccgggaagggagccgttcgggctgccgaaaagcccgccgacgccgccgtcctccggagggccgccgcagagcctgcgcatggcgttcacgacggacggcacccccgtgttcgccccggtgagctccgcgccgccagcgacggcgacgtaccagccctttggcggcgcggctgctacgagcttggctggcgcaggaggcaatggcggggcgccggtgcacccgccgggtggcgccggtgagccggtggccaagaagaagcgtggtcggccaaggaagtacggccctgacggctccatgtcgctggcattggtgcacacgtccatggcggcggcgccggggtcggcggctcccggcgcctccgggcctttctcgcctgaaggggccaagacgccgagcactgcgccgtcagcgtcgccggacggcgcgaagaagcggggccggccgaagggctccaccaacaagaagcacgtgcctgctcttggctcagcaggggctggattcacacctcatgttatttttgttaaagccggtgaggacgtatcagcaaagatcatgtcgttctctcagcacgggacgcgcgcggtctgcatcctttcagcgaacggcgccatatcaaatgtgacacttcggcagtctgctacctccggtggaacagtgacatacgagggccggttcgagatactgtccctgtccgggtcgttccttctgtcagagaacggcggccatcgcagtcggactggtgggctcagcgtttcgctagcagggcctgatggccgtgtcctgggtggtagtgttgccggactactgacagctgcttcaccagtacagatcgtagcggggagcttcaacaccgatggaaagaaggagccgccgaagcagcagcagcagcagcagcttgctccgtcaccgtcagacccatcgccggcgccgctgaaggtcacgccggcggcgcccagcagcccgccgtccagaggaacaatgagcct

SEQ ID NO: 36445 - DNA, 693 bp, Setaria italica
  Peptide Sequence Number=SeqID_102419
attggcaaagatgctcgccgagttgataatctatgccaacgcatttatttgagctataggctattggagggaactagccattttaaagaactgcatgccattgtcgaagatgcaaaagcaagattggaaagtgaggtcggcccacttgatggaatgtcagcaaagaatgcacgtggtattgtaagcaggttctcagctggtattgatgtgcagaaactatgctctacagcaattcaaagagctgatgagtggttgagttctcctgacctgcatcttcgagattcattacctgctgcctgtagattcaaatttgtggacataacaccttcttcacttgttgtcattttaaaagaaacctcgtcatctgacacaatcaaaggttatcagctatggtactggaatagcagagagcaaccaagtgcggaaaagcctgttattgtgcccaaagatgaaaggaaaatattggtttttaacctttccccatgcacagagtattctttcagagttatatcattcactgaggatggggtacttggccattcagaatccaggtgtcgtaccaatagcaaggagatatttttccaagcgtgccacacagaatgcaggaggcacgcatacacaaaaaaagagacaggagccagtcttttaagtcaactggattcagtattcaaggtctttggaagaggatgcagg

SEQ ID NO: 36446 - DNA, 1733 bp, Setaria italica
  Peptide Sequence Number=SeqID_102420
atcggacacaaccgccgattacaacacccccgccgtcgccgtcgccgccccgcctgcttcccgagcgatctcatggcggcgtccgcctcgtccctccttgccgccgcagtgtcctcatcctgcgcggccatctcctcccggctaccccgcggagctccggctgccgcctctgttccttcgccgtcgcgtcaatcctgctcttccctccgcgcttccctcgcgaggcgccagcagagccgcttcgtagccagcgtcgctcccacgatgcagcctccggcggagtccagggtctctacggtggtcgacgtcgacctcggcgaccgtagctatccgatctacatcggcgcaggcctcctcgacgagccggacctgctgcagaggcatgttcatgggaagagggttctggtggtgaccaatacgaccgtcgcaccgctttacctggagaaggtgtcctgggcactcacccacaataacccgaacgtgtcagtggagagcgtgatcctgcccgacggtgagaagtacaaagatatggacacgatgatgaaggtgtttgacaaggcaatcgaatcccgccttgaccgccggtgcacatttgtagcactgggtggtggtgtcattggggacatgtgtgggtttgcagctgctgcattcctccgtggtgtcaacttcatacagataccaactactctgatggctcaggtggattcatctgttggtggaaagactgggattaaccacccacttgggaagaacttaattggggcattctaccagccgcaatgtgtattgatagacacggatacactgaatacgttgcctgacagggagctagcttcaggcattgctgaggtagtgaagtatgggctcataagggatgcaccattctttgagtggcaagagcagaacatgtcggcattgttagcaagagaaccaagtgctttggtatatgctattaagagatcatgtgaaaacaaagctgaagtggttgcacaggatgagaaggaaagtggtcttcgagcgacactaaacctgggtcacacatttggccatgctatcgaaactgggactggatatggagcatggctccatggggaggcagttgctgctggaacagttatggcagctgatatgtctcaccgcctggggtggatagacgagtcaatcaaaaaacgcacagttgacatactagcgcaagccaagcttcccattacacctccggagactatgactgtggagaagttcaaaagtattatggctgttgacaagaaggttgctgatggtttgttgcggctcatccttctgaaaggacctctggggagctgtgtttttactggggagtatgacaggaaagcacttgatgaaacccttcatgcattctgcaacaactgatccttctaggttttggatttcgcctctgtatactaataggctatattgatcctcagggaagagagtgcattgtatttatacccattgaattttgtgtcaggaaataatgctatcgttaggattggtttgagtttgtagggaactatatctgatcaactttgatcagtcatcttctagtaataaagaagtcctagtgcatcctttctgcctgtcccagactcccagttactgtcaaggtcatgctgtccaatcagttttagttgtccttgtaaaactattgcagtttcataaaaattactgcagtaacaaactaaattaacgtttaagtttaagggtaaaaaaaa

SEQ ID NO: 36447 - DNA, 505 bp, Setaria italica
  Peptide Sequence Number=SeqID_102421
tttttagctgagagaattgttctgttaacggtaattgggaacaaggtttgctttccagtttagctgttacgatattacatacagcgtaattgctgaacttttgtcttgttgaaaaatgaacaatattctttttgccaataactaagcgtatcattttgctgctaacctttagtttgaaatgcgtatctgtagagaaccaagtgctttggtatatgctattaagagatcatgtgaaaacaaagctgaagtggttgcacaggatgagaaggaaagtggtcttcgagcgacactaaacctgggtcacacatttggccatgtatgtattgccatcgatcatgtctagatttttatgttcagttaatttatactggcattgatagattttgggtgccaaaacctcatacaccttatcacaacagcatctatctgaattttagccaccttatgttattgcattgcaccacttattcactgatcctcacactcaattgacaggctaggtctt

SEQ ID NO: 36448 - DNA, 186 bp, Setaria italica
  Peptide Sequence Number=SeqID_102422
agtgatctgcactgatgagcagtagcagcagcagcagctagcgactggcgcggatgcatgtgcggtgtcgcggcgctggatggaggaggctgggaatggagtggtggccatgggagaggcgcggcggcacacatggttcggccccaaacaggggcgtgtaccaagtttcgcagctgcagcggcggt

SEQ ID NO: 36449 - DNA, 387 bp, Setaria italica
  Peptide Sequence Number=SeqID_102423
tttttacttttaattttagttaatttacaataaaacacaaatttcaagcagcacttcggaatacatatttctacagctggttcaaggagtgaagggttaggttggatgagataatcctgaaatgcatataaggacgactggaaagaaaagagtagcgccactaattcacagtcaagcatttgtgtgcctccgttagcatgttttctgattaacgtaccaaactatgcattggtaaacatgatcttgcatctccctggtgaacctaaaagaaatagaacttacgtgcagccttgatcaccgtgcctgtactgaatgtagtggccagaaccacacaagcagtagcaggtagcagctacaatagcaacaatggacggagtaagtaaattt

SEQ ID NO: 36450 - DNA, 218 bp, Setaria italica
  Peptide Sequence Number=SeqID_102424
gcgttcgcgacgagtgaacagggccacgctatatcaccagccgggcctcccccgaccaccacctccgccgactactgccaccgcccgctgccatagcacgtacgctgcgagatcgccgggggtgaacgcaggcgctcgccgcggcgcctgagagacagggggcgcgcgggatcttggtgcgcgcgtttgacggcggcagcatgaagctcccgctgctg

SEQ ID NO: 36451 - DNA, 595 bp, Setaria italica
  misc_feature (1)..(75): n is a, c, g, or t
  Peptide Sequence Number=SeqID_102425
nnnnnnnnnnnnnnnnnnnnnnnnnnnnnnnnnnnnnnnnnnnnnnnnnnnnnnnnnnnnnnnnnnnnnnnnnnngttagaggaaactgcaagtcttgattacacggaacacttggggagttacaggcacagtgacaaataaaacaattggtgggttcaacgacacaagagacaaggagctcggcatcagtcactcacggtgactagcacgagcaggaaaaattttcacagaatttactgaaacagcacgacacgggttcactattattcagtaaagagcgacagcgacgccgggtagtaggtgtagtcctcgaagctccacagcccggtgggcacggccgcctgcggttcctcgacggcgaccggtgcagccgctgcggccgcgctcccgccctccatgtacgggatgccgaggaagttcatgtagttctcgtaggccatcagctcctcggacagctccttgacctcttcggacacccctgcctccgtcttggggggcgggagcacggccggggcctgggcggcggtggcgggcggcgccgccctcgcccccaccgctgatgcgacgaccggggatgacgaggtgtcgttgggg

SEQ ID NO: 36452 - DNA, 274 bp, Setaria italica
  Peptide Sequence Number=SeqID_102426
tcgtccgtccgtccgggcagcgcggagtagccgcgcgacgggaatgaggacggcaacgtccggcgcgccaaggacgaggaggcggctgcggggacgacggcaggcctacccccgcggcagcggtgtaggaggcggcggcctgaggtgcggagcagcgccacccgctccatgccgtaggtgtccagcttgccggtgtgcctctgggaaggtcaggattggagttggagaggaggtgggtgcggcgacgtgggcggcgtagcttgttgcgattagg

SEQ ID NO: 36453 - DNA, 299 bp, Setaria italica
  misc_feature (269)..(299): n is a, c, g, or t
  Peptide Sequence Number=SeqID_102427
caattttccttatgtggcaggcaacaaatttaatactcatgaaactcctgtcaaactcccgttgacattggccttaggattgtgagtttgttcctgttggagtcaactgctgttttgtcgagtcaaagaattcttgtgcatacgagtcacgtagcatttagaaactagaactgtaagataagctatgatctgtatgcaatgttgccaccaagataagctatacgttggcacccaggacaatgagaactctattcattttgttcgagttnnnnnnnnnnnnnnnnnnnnnnnnnnnnnnn

SEQ ID NO: 36454 - DNA, 1081 bp, Setaria italica
  misc_feature (1)..(36): n is a, c, g, or t
  Peptide Sequence Number=SeqID_102428
nnnnnnnnnnnnnnnnnnnnnnnnnnnnnnnnnnnncttagaaatgtatgtttaatataatcttcagcccttaatcgtacatggatcataatatcacaattacacttcaaagcaggggtatgaacacaaatgcccctaatatcttcttaggaacgtcaaagcagcaaatgcataagtttcagtattggttcctaaatttttagtatacccttctttgttttttactagatctcaacagttctcctggatgaataacttgcatcagaatcgtacaaaagttacatcaaaatcaagcagctatttttttctccttttggctcattaggagggctctccagtttgtcgttcttgtcaggagctgtgtccacttcgtacacatttctgaacccaagctctgacatatcttgcttcgccatcaagtttctctccatccgacattccagatacttctttgagaactgccggcatttttcagactggaatcctgtagatttcaggcaggcaagataatctttcttctccaagtcacactcatgtaagtgatccaatgggaatacacctttttcaggaggtacaggcctgacccctctatttccaccaaaagcaccaccggcactcatttgtcaaaaagttagtctttcgatcaggagcagtcaggagcaaaggcttccaagaataaggtcgaatgtctagcaatcgtgtggccaatgcttgaaactcacggcagcgcctggggcctgtgactgtgagaatgcgcggcggcgcggcagcgagggtctctccgcccgtagggaggggaggccgctccccgcccaactccgcgatactcccgtgccgtcacgcccacgcgtcgcgtggctgagcgtgaggctgatgcgcgacggcaaagccgccccccacgcctcgacgccgtcggccgtcgccgctcgcgctcggtgctgctgccaccgtgagggttgggagggagccgcgttcagtggaggtgtgatgggctgggctggtgtctggtgacgggaggaatgtgtgtgtaggctgagccttcggagtttttgggcctcttgtggacttttacggcttttgc

SEQ ID NO: 36455 - DNA, 418 bp, Setaria italica
  Peptide Sequence Number=SeqID_102429
taggagcagtttgcacgctccataagcactgaacggactatctcgcagttaattccctcatccaccagaagctgctccagtctcctcgtgacaaattgtactgcctaaaatgattttgacattaagctgtcaggaaccaaatgcacagagatcctatgacataacttccctctgacgcggtcactgacatgcaggcctgctggacatgggcccacctgtcagtgaccacgtcacatgacgttacgtcagagtaactgctttcatactaaatgagcatagttcataaacatgatctgaaatgcatactgacctcatctataacatcaatatctatatctatgggttgcacctctgccatcaaggtgagggctctcctgagatcaaagctcttcttgttctcaaccaatatttgaaccag

SEQ ID NO: 36456 - DNA, 791 bp, Setaria italica
  misc_feature (554)..(554): n is a, c, g, or t
  Peptide Sequence Number=SeqID_102430
tttgttctattcgttatttaattttatgacctatcaatgtattgagagatacctgttaattttctataatgttgtgaactggacctcggttttgaaagctatgatatgtagacagactgcatagctagagtctcccctgaagatggccaagtgctgagctggatctttcttcatgagctgaggtatgttttttttattcaaaggaaataatagtattgatattattgactcatgtttggtttcttctctatcctaccctaatttccttaggtctaaaaggctttgtcatcgtcgtgtagcatgtagtgttcccacctaagagtaatgatgtttgtgttgttgtcatcttgcaggcggaacttgttgaattctggttatacggtaggtagtttattcgttattgtccttttttgtccagttgttgatggtccattctggaattagcctcgtttcaatactacatggtagctttgtcagggtaacgggattgttccatcattattaggttattattatttattattaagtaaaagtaaaatccaaatctaatagcngaaatggcatgatttcttcaatggaatctgcttttgtgttccagaatattgatgtcctaaacggaatagcttgggatgaaggaaaccacagattatttgtgacaggaaagctgtggccaaagctttatgagatcaagctacggccagtggttggtccagcagatggatctgtagaaaaagctttgcccccaaagccagcttttatcgctgaaggagtgcccgctcaagtatggcgtg

SEQ ID NO: 36457 - DNA, 476 bp, Setaria italica
  Peptide Sequence Number=SeqID_102431
agtagactagaagactaggaatactttacttacaatgagctgaggcggaacttgttgaattctggttatacggtatatattatataagaaaagaaatccaaatctaatagcagaaatggcatgatttcttcaatggaatctgcttttgtgttccagaatattgatgtcctaaacggaatagcttgggatgaaggaaaccacagattatttgtgacaggaaagctgtggccaaagctttatgagatcaagctacggccagtggttggtccagtagatggatctgtagaaaagctttgccccaaagccagcttttatcgctgaaggagtgcccgctcaagtatggcgtgtatattgtgctattactgctatatgatgtgggcttttgatcgcatgacttgagaaatgtggaagagaagagagtatatatacatgtttgagattcattcaggctgatttgcagctcattgtcattgccc

SEQ ID NO: 36458 - DNA, 1596 bp, Setaria italica
  Peptide Sequence Number=SeqID_102432
gatggttggggtctggctactgatggaaaggttctttttggcagcgatggtagttcgaagttatatcagatggatccaaagtcatttaaagttatgaaaatggtgaccgtcaagtatcaggataatgaagtccccaatattaatgaactggagtacatagatggtgaagtctgggcaaatgtctggcaggttagttgtctacttcctcctgactggcaattgcttattatgaagtatcttatcttagtgtgactatataacaacattggacaaggaccactatatcttcattagtatcttagtgccgccacgatgtcggttatttctcatccatgaatgcctgatctagaccaaatataaattaggtttaaaagtttcaccaactattatttgtgctgttcctcagaacaaccaagtttcagctttcctcagaacaaccaagtttcactgtgttgttcctcgtctgaaccgatgcaatcttaggtgttgtttatgaatgatcagtctcaattatctcaggcttttcttgtgctgaatggcaatttatcatcattgttgtagcagactggtagtagtagtagtagctgataaactggctgactggaaactctcataagtcataatgcaacattatactatcaaaccagttgcttgcttcgtacaaactgtgttagcttatctgtttgaattgttttcaaactcagcaataaggatggtgggacttcttctatctatctttctgtccacctgtggctagatggcttgtgtgacctggctgactgtatttccatgtaatttgttgcatcgtattaatttatgacctatcaatgtattgagagatacctgttaattttctataatgttgtgaactggacctcggttttgaaagctatgatatgtagacagactgcatagctagagtctcccctgaagatggccaagtgctgagctggatcttttcttcatgagctgaggcggaacttgttgaattctggttatacggtaggtagtttattcgttattgtccttttttgtccagttgttgatggtccattctggaattagcctcgtttcaatactacatggtagctttgtcagggtaacgggattgttccatcattatagaatattgatgtcctaaacggaatagcttgggatgaaggaaaccacagattatttgtgacaggaaagctgtggccaaagctttatgagatcaagctacggccagtggttggtccagcagatggatctgtagaaaagctttgccccaaagccagcttttatcgctgaaggagtgcccgctcaagtatggcgtgtatattgtgctattactgctatatgatgtggggcttttgatcgcatgacttgagaaatgtggaagagaagagagtatatatacatgtttgagattcattcaggctgatttgcagctcattgtcattgcccaatgagagatgggaattgctagagtctggtatagttgtagcctttgtagttgtaagatgttgtaacctgttaattggtaattagtaattaggtttagtacgtttagtacttagttttttagtaaaataagtaacgttttagactagtaga

SEQ ID NO: 36459 - DNA, 2702 bp, Setaria italica
  Peptide Sequence Number=SeqID_102433
gccgcgctggccgcgctcctcctcatcgctgccgcttacgccacctggcgagtcggctccccgccggccgccctcctcggccgcccagcggcggccagcaggttctactccttcgatctcgtccgcgagtacccccacgacccggatgccttcacccagggtctcttgtatgggggaaatgacactcttttcgagtccactggcctttaccacaggtcttctgtccgagaagtggagcttcccactggaaaagttctggttcaccaccaaatggatggggatatgtttggagaaggtttaacccttcttggtgacagattgtttcaagtcacctggttgaagaacgatggatttatatatgaccgacataacttcaccaaacgcaagagttttacccataaaatgcgtgatggttggggtctggctactgatggaaaggttctttttggcagcgatggtagttcgaagttatatcagatggatccaaagtcatttaaagttatgaaattgttgaccgtcaagtatcaggataatgaagtccccaatattaatgaactggagtacatagatggtgaagtctgggcaaatgtctggcagacagactgcatagctagagtctcccctgaagatggccaagtgctgagctggatctttcttcatgagctgaggcggaacttgttgaattctggttatacgaatattgatgtcctaaacggaatagcttgggatgaaggaaaccacagattatttgtgacaggaaagctgtggccaaagctttatgagatcaagctacggccagtggttggtccagcagatggatctgtagaaaagctttgccccaaagccagcttttatcgctgaaggagtgcccgctcaagtatggcgtgtatattgtgctattactgctatatgatgtggggcttttgatcgcatgacttgagaaatgtggaagagaagagagtatatatacatgtttgagattcattcaggctgatttgcagctcattgtcattgcccaatgagagatgggaattgctagagtctggtatagttgtagcctttgtagttgtaagatgttgtaacctgtatggatgatggttgcgttgctgtttttgaaatagtacgttttgctgtgatatgatgtaccatcacgctcacgcatttggatttgaaatgaaaggaaatgaaatactctgttgcctagcgcacacaatgcgttgtgtattgttctgccgaataataatctttttaaaaatttaatgagcaggcggtgaatatatgcaaaatctgctcagaaatcctggcaccagcagaagttgcccttctctttagactcactcagcagtaggctcgtaacccaggaacagcagtgaaactggtatttagccaggcaggccccgccggctaaaacccaggtaaaactgacagctctgcgattcccttgggcaaactctcaatctttctcagcagcgccagccggttgttgcgaattctctcgtcttccgccatgacgaaaacattattgaagaaatcttctaggggttgtatcaagagcagagaagcatcagcaaaggttttaatatcaacaccaggatggatcttgtcagcaacctccaagtaagcgtcccacaaaactttttcttcatctttctcaaatacacttgggtccacctccaaagcagactcaatttcttttccacgtatgattcttgttggccttgaatacgcttcaacaatttttggaaatgtttccgttcttgaaaatgcttccatttcagttgctgtttgtgccgctagataggggcagtttgcacgctccataagcactgaacggactatctcgcagttaattccctcatccaccagaagctgctccagtctcctcgtgacaaattgtactgcctcatctataacatcaatatctatatctatgggttgcacctctgccatcaaggtgagggctctcctgagatcaaagctcttcttgttctcaaccaatatttgaaccagtccataagagacccttcgaagtccaaatggatcgttcgtagaacttggctgacatccagctccaaacaaaccaactaggctatctaatctatcagcaaccgcaaggactatgccagcatccgttcttggaaacacatcacccgaaaaccgaggaagtgctatctcaaatagtgcttctgcaatctcttcaggaatgccatctctcaaagcataatggcgtgccataactccagcaagtgaagtaaattccgtcacaatagaagtggcaagatctgacatggccaacgcagctgcatctttgataattgggatcattccctcatttattccgagaataagggtcaattcagaaacaatattttcaacgcgtgtcattttatcgagcattgtgccaagtttttcatgaaaaagaataccattaagctggcctcggaattcagaaaatttcttttgtgtatccatcttataaaagaatttggcatcctcataccttgccctgagaacagcttcattgcctctgcggacaacttcctctttaatggcaccattggcaacggcaataaaatatggtagcagattgcccgtggacttggaggttacagcgaaatacttctggtgtttctgcataaccgtaatcagtacatctttcggaagttctaagaaggaatcatcatattgaccaaggatgggca

SEQ ID NO: 36460 - DNA, 295 bp, Setaria italica
  Peptide Sequence Number=SeqID_102434
taggcgtagaaggtgacggcggcgacggcggtgagcgcggcgaggcccattgcccagccgagcccccggagcgcgtacggcagcgacagcgacgccgggcccagggtcgccgtcgtcatgtggaacccggcctgccaccacgtccctttgggttcgattgcggtggcggcgccggcgccgacggtttgcttgccatcatcggccgcggcggcttcgacgtcggaagatggcatggtggtgtgccctcctgtagtgggcgagggcgggctgggggtgaaaatagagatggcaaagt

SEQ ID NO: 36461 - DNA, 811 bp, Setaria italica
  Peptide Sequence Number=SeqID_102435
cgaccgcgtgatgagcctccgcgacctcggccgcttccgccgcgacctcggcctcacccgcaagcgccgcctcatcgcgctcctcaagcgcttcccgggcgtcttcgagatcgtcgaggagggcgtctactccctcaagttccgcctcacccccgccgccgagcgactctacctcgacgagctccaactcaagaacgagtccgagggcctcgccgtcaccaagctccgcaagctcctcatgatgtcgcaggagaagcgcatcctcatcgagaagatcgcgcacctcaagcacgacctcggtctcccgccggagttccgcgataccatctgcctcaggtacccacagtacttccgtatcgtccggatggaccgagggccggggctggagctcacccattgggaccccgagctggcggtgtctgcggccgagctcgcggaggaggagaatcgagcaagggaagctgaggagaggaatttgataattgacaggccgctcaagttcaaccgggtgaagctgcccaaggggttgaaattgacgcggggagaggcacgcaggattgggcagttcaaggaaatgccatatatttcgccatatgctgacttctcgcacctgcggtctgggtctgctgagaaggagaagcatgcttgcggagtggttcatgagattcttagcttaacagttgagaagcgcacgttggtggatcacctgacgcacttcagggaggagttccgattctcgcaatccttgcggggcatgatcattcgtcacccagacatgttttatgtatcattcaaagggatagggactcag

SEQ ID NO: 36462 - DNA, 442 bp, Setaria italica
  misc_feature (420)..(442): n is a, c, g, or t
  Peptide Sequence Number=SeqID_102436
ggaaatgccgctcgagtcgaagcagaagatgatcatggagcagagggcgcggatgaagctcgccaagaaactgaggcagcgccgcaagcggcttgtccgcaagaggaagctcaggaagaagggaagatggccaccgtccaagatgaagaagctcaagaacgtgtgaacagcgttaatgttagctgccactctgccttggctttattgataccttgtgctttgtcccgtttaccagttttgctgttcggaatctgaaacacaatgcctgtaaaatgtaattctgttttcaagtaactgaatcttcttacagtctagtggagtcggtgtgtctgaaatttcgccctggatgacttacaggattgatgtgctttagctatggttcaggaccagcactatatatacaggcatcttgacgaaccnnnnnnnnnnnnnnnnnnnnnnn

SEQ ID NO: 36463 - DNA, 676 bp, Setaria italica
  Peptide Sequence Number=SeqID_102437
gctccatccaggggccaggaaggcaacaccacccatggcgctcctcctctccccgaccgtctccttcctctcctccccctccgctccacgctgctcccgaggtctctccgccgccgccaatgcatcctgccccgccccaaggctgcgatgtaagagcctcccgttcctacagagccctctgaatgtgactgctacttgtgcctctttggccgagaagaggctggttcttgtccatgccgccgcagagggtggtgaggctggcgcggagcagccagaagagccgaaaccggtgactaagatcgaggaaatgccgctcgagtcgaagcagaagatgatcatggagcagagggcgcggatgaagctcgccaagaaactgaggcagcgccgcaagcggcttgtccgcaagaggaagctcaggaagaagggaagatggccaccgtccaagatgaagaagctcaagaacgtgtgaacagcgttaatgattgatgtgctttagctatggttcaggaccagcactatatatacaggcatcttgacgccactgatcgcagaagatcatcacctggcttttgggctcattcctccaacttgctgttcagcttcccaagcatcttcacgcaactcggcaactgaatgttgttcatcagcagggagatgtcttcaggataccatcgta

SEQ ID NO: 36464 - DNA, 375 bp, Setaria italica
  Peptide Sequence Number=SeqID_102438
tgtcgtggccgcacccgaagacgaagcccgggagcgcgtgcgacaccgccagcgtgagcgcgtcgcggacgacggtgccgttggtgtgcgacttgtcggcgtaggtgatgtcgtaccggcacttgtcgtccgccgcgcacctttgtgcctcgactttttggcactcccgcgagccgcagggtaccgcggagtgcgtcgacgactgcgccgggtcgtagagcgggtcctgctgctcgtagcagcgcgcgcacggcttgcactgaacccacgacaggtcgctgccggtgtcgatctccacggacaagttcctcggcggcgtgccgaggccgaccgtggtgatatagttggtggtgtcgagaggtataccccagcgcg

SEQ ID NO: 36465 - DNA, 529 bp, Setaria italica
  Peptide Sequence Number=SeqID_102439
gagaacccgcgccgtactttgccgccgcctgcgaggtcagcgagaccttggcccggccgaggccgacgagcccgtcggccttgccgaacagcccggagtcgtcgtcgccgcacccgaagacgaacccctggagcgcgtcggagggccccagcaccagcgtgtcgcgcacgagattgccgtcggtctgcgactggtcgccgtagacgacctcgtaccggcacctgttgcccgacgcgcaggtcgacgagtcgagcccgcggcagtgcgggtcgccgcagggcacggcggcgtacgtggacgactgcgccgggtcgaagagcgggtcctgctgctcgtagcagtccttgcagggcttgcactgcacccacgacaggtcgctgccggtgtcgaacaccaccgagaagtccttcctcggcgtcccgaggccgacggagacgatgtagttgcccgtgccgagggacaggcccctgtgcgccggcagcgacacgcccttggaggcgcgggccgggttgatcgccggcgcggcgcc

SEQ ID NO: 36466 - DNA, 328 bp, Setaria italica
  Peptide Sequence Number=SeqID_102440
agggttccatgtcgctcaccgtagaggaacttgtccaggctaccatttgccatgtattcataaacaagtaggaactcagagcccttccgagaacaaccaagaagccggacaagattccggtgatgaacattgctgatcaacttcacttcactttcaaaatcagctttggccctgctagtttccatgactatcaacttttttactgcaaactgttttcccattttttcagcaaacccttatatacatctccaaaacctcctttctccaagtttactcttcccatttttcagcaaacccttatatacatctccaaaacctccttctccaa

SEQ ID NO: 36467 - DNA, 1472 bp, Setaria italica
  Peptide Sequence Number=SeqID_102441
tttagatataccatatatgtacagatacaaatgttgtggctacataaaaagaagtaaattcgtatacaacactttttacctggctgaaaactgagaaactgatacagtggccttggaagcagaagatgaactggaagaggatgtttcacctcgcactctacttgttgcgtccaataaagtggccttgtgggctggagttctggatcatttctcgtcaacaacaacacaaccacttctgacatcattggccttgcagcaacagctgattgagtgcagagaagagctatctccatgattctttttacctcctctggcttatattcttctggatctagtgattcgtccaccaaggccatcaagttgtcactttcatacagcttccaggcccattcgagcaggtactgtgtttcaggctcaagccttgtatcgttgctcttccgaccacttagtatttccaaaacaacaacaccaaagctgtatgtgtcaaccttctctgatagttggccatggattgcatattctggagcagtgtagcccaatgttcctgcaaattttgtgctcaaatgactatgatcatcaggaaggagcctcgccaagccaaaatcggcaatttttggctgaaaatcatcgtcaagaagaacattgctagatttaatgtcacggtgtatgatacacacatgaaactcttgatgaagatatgcaagaccacgagccatgccaacaatgatgttaaatcgctgcctccaattgagggttccatgtcgctcaccgtagaggaacttgtccaggctaccatttgccatgtattcataaacaagtaggaactcagagcccttccgagaacaaccaagaagccggacaagattccggtgatgaacattgctgatcaacttcacttcactttcaaaatcagctttggccctgctagtttccatgactatcaacttttttactgcaactgttttcccatttttcagcaaacccttatatacatctccaaaacctccttctccaagtttactcttctcattgaaattataggttgccgccttaagatcacgatagtagaaacttgttggaccttgtaattctgttgctccaagtatatctcctctccgaggctttagtttctagaccgatgtatcaataagaaagtcaacagcccaacaagagacaggaaggctacacctcccagaatgccgcctatgatggctcctttctgacttgatttcttcccggaacgcaggtacacagcgaggtccacagtcgcgttcgccgggaagaacggcctatcggagtatctcatgtagcagccggcgtcgacggcgcgtccatcggagttgggcgggcacccatcgatgttccccaccgccaccttgaggcactgcgcgcagccggcctccccgaccgtctccacgcactgcgccgccgcgtacacgccgcctctcgcggccgtccgtcggtcgtaagta

SEQ ID NO: 36468 - DNA, 390 bp, Setaria italica
  Peptide Sequence Number=SeqID_102442
tcttgtcaacacccatgtggctacacagcgcggcgccggcggtcgggccgaagccggagaccacgttcaggacaccgtcggggagtccagcctcgtgtaggaggctggcgacgtagagggcggagagcggcgtctgctcggcggtcttgaggacgacggcgttgccgcaggcgagcgccgggccgaccttccaggcgaacatgagcaacgggaagttccaagggatgatctggccggcgacgccgacgggctcgtgcagcacctgcacgtggtgcgcgccgtcggccggcaccaccaggccgtggatcttgtccgcccaccccgcgtagtagcgcatgcaccgcgccagcatcggcacctcggcgcccgccgtacttgtcgtcctagtct

SEQ ID NO: 36469 - DNA, 1343 bp, Setaria italica
  Peptide Sequence Number=SeqID_102443
cctgaatgtgaacgcattttattctcggaagaaaatgtgagctcgtttggatagatttgcattggatgggccattgtataaagagtaaaagtttcactgccacactcctctcatcactcccacaaggccttctgggcttgaagcctcgaaggaaatcggccttggtaaacgaagagcgcaggcaatgcggtgatttcagactacaggcccgtcgtccacgttaatctttcagagatagtacatcaaccagaccgccgacgctgcgccgagatttacagccaggcggcgttcctgatgggcgtgacgacggccttggtctggaggtagttccggagggcgtagacgcccttctccctgccgacgccgctcatcttgtagccgccgaacgggatgcccgcgtcgaacacgtcgtagcagttcacccacacggtgcccgcccgcagcgcccgggacagcgtgttcgccgcgtccaggctcctcgtgaacacccccgccgccagcccgtactgcgtcgcgttcgcgcgccgaatcacctcctccacgccgctgaacttgaggatggtctggaccggcccgaatatctcctcccgagcgatcttcatttcgtccttggcgtcggcgaacacggtcggctggatgtagaagccccggctgcccgccctgtcgccgccggcgacgagggtggcgccgctgtcgacgccggactggacgtaccgcaggattttcttgaattgctcctcgtcgatctgaggcccctgctcgacgccattcctgaaggggtcgccgacgacgcgcttctgggcgcgggccttggacttctccacgaactcgtcgtacacgcgctcgtgcacgaacgtccgcgaccccgcgcagcagcattggccctggttgaagaagacggcgtggtgcgcgagctcgacggcctggtcgacgtcggcgtcgtccatgacgatgaaaggggacttgccaccgagctccagggtcaccggcttcaggttgctcctcgccgccagttcgaggacgatctgccccgtgcccgtcgacccggtgaacgcaagcttgtcaacacccatgtggctacacagcgcggcgccggcggtcgggccgaagccggagaccacgttcaggacaccgtcggggagtccagcctgcgacgaacaagcacaagtaatggccacacattgatggcacaaattcgcgagcagcagaacaatggcaggttccaatgaggcagacctcgtgtaggaggctggcgacgtagagggcggagagcggcgtctgctcggcggtcttgaggacgacggcgttgccgcaggcgagcgccgggccgaccttccaggtcg

SEQ ID NO: 36470 - DNA, 253 bp, Setaria italica
  Peptide Sequence Number=SeqID_102444
acgacgtgcactagcctggatgaagctgcgtctgccggcaacagcaatggctgcacaggactcggctgctgccagatacttaccccgagcgacctcaacgtgatagatgtagattggtcgacgcacaacaactctgcatggacttatagcccctgcggctacgccttggtggccgagaagggatggtacaaattcagcctgaacgacctgaatggtaccggagagatggcatttaacgtacgggttggtgaca

SEQ ID NO: 36471 - DNA, 317 bp, Setaria italica
  Peptide Sequence Number=SeqID_102445
ccccctttcggcctgagcaaaccctgctcttgggacaaattcttcaaactctcctgcaatcgtagctttagccctccaagaccgtacttgggcaacgtcgaggtgatggacataacggtggagacaggcgagatgcgcgtctacagctccgtcgcgcaccgctgcttcaactcgtcgaaggaatccggccatcgtccatcacagaggtacaacttcaccggcacgccgttcctggtgaagccggggaggaacgagtttacgggcatcgggtgctacaacctggcggtgctccgtggcaaggaagacagcagctactt

SEQ ID NO: 36472 - DNA, 776 bp, Setaria italica
  Peptide Sequence Number=SeqID_102446
gcctggtagaaggatccaataccaagtagccatgactcaactgcaggttctgtggcttcttctttctcccgccctagtactctcccaggtgccagcaccggttgtctctgaaacgctgcgagcaccaccaccgggctgcaataccactaccatgtgcggcggcgtaaccattccctaccccttcggcctgagcgaaccctgctcttgggacaaattcttcaccctctcctgcaatcgtagctttagccctccaagaccgtacttgggcaacgtcgaggtgatggacataacggtggagacaggcgagatgcgcatctacacccccgtctcgtaccgctgcttcaactcgtcgaagaccgtctccgtcgtcagtaattcacggacgaggttcaacttcgctggcacgcctttcctggtaaagccagggaggaacgagtttaccggcatcgggtgctacaacctggcgctgctccgtggcaaggaagacagcagctacttcagcgcctgcttgacgacgtgcactagcctggatgatgcgtctaccggcaacagcaatggctgcgcagggctcggctgctgccagatacaattgccgaccgagctcaacatgatccgtgtacaattgccggagcaagacgacaacactacatggaatttcagcccctgcagctacgccttggtggccgagaagggatggtacaaattcagcctgaacgacctgaatggtaccggagagatggcatataacgtacgggttggtcacagaagcgtccccg

SEQ ID NO: 36473 - DNA, 649 bp, Setaria italica
  Peptide Sequence Number=SeqID_102447
ggggaggccgtctgtacagaactgagaggcaggcggtggtctacagattcctcgagctcagcacacacacatcccgggggaaggagcgacgcgacaacaccaattcctactaaatttggcctgtgcctattgttttacggaggagaaaaaatatcatttgttcctgctccgggtgtactataaagttttgtctaaaggtggcgtcgccattgcggcactagcagtggcactagctggggaggttgaccgagactccttccggatcctgaaataaggccaccgctcgtttcccctcccttcactcccttcccttgcattttagcctcccgcggttctggagccgcgggccattcccaaccatcgttccggtggtggccggtattggccgagacccatgggcatccaggtcgcggcggtcgtcacgccgccgccgtgctcttcttccccctcgtcctcctccccggcgtcgccttcgtcctcggccattaccacgtcgctgcggcatgccgcgccaggcgtcaggctggcgaggagccagtcgtcgctggcgggctggagcgccggcctcgccccgcggcgcgccgggcagcacgcgatcaggcgcaccctcagcgccagcattgacagcgtcgggagcgacggcggggac

SEQ ID NO: 36474 - DNA, 831 bp, Setaria italica
  Peptide Sequence Number=SeqID_102448
ttacctttaacccttaacccgtttactttaccttaatttacgttacttatgctggccgccccaccgcgcctctccatcactcccccgacgccatgagcctgtagcccagcagcggtcgccaaagaagccgccatgggcaggtccagaggcggcaagggcgccggcgactcgaagtcgttcccgtcgccggcgtcgtcctcggcgtcgtcgtcggagttcgagttcacggtcacgctgtcgccggcgtccaagcagcggtcggcggcgcagctgtgccccgccgacgagctcttctacaagggccagctcctgccgctgcagctgtcgccgcgcatctccatggtgcgcacgctgctgctgtcctcggcgtccacgtcctccgcctccgactccacatccacgtccaactcgtcccgcgactccaacggcagcacctcctcgtccttctccgccgactgcgccgcgctcctgctcccggactccgcggcatcatcgtcccgccccagctccgccaccgaggacgaccggcacctgcacccgctctccgccgccgcctcgttcgccggcctgccgccggccaagcgcaccgggaagcagtacctctcgtccttcgccacccgcttctcctccgtcttccaccgcggcggcgctccggccgccaagaagcagccgtccaagtcgctcgccaaggaggtgatcaagaagtacgccaagaaggtgaagccgctgtacgagaagctctcccagatccccaagaaccagaacaacgtcaacgtcaacgttaacggcgccagtagtcgtccggtcgtcctaactaacctagtccgcagc

SEQ ID NO: 36475 - DNA, 253 bp, Setaria italica
  Peptide Sequence Number=SeqID_102449
cgttcttgtcgacgccctggatcatgcgccggcactgcgcgacggtagcggcctccccgatccccctgaggacgcgcgcgagctcggcgggggtgatgaggccgttgccgtcggcgtcgaagaccatgaaggcgtggcgcaggtcctcctcgacggcggcggcgtcggcgtcggcggagcgcacgagcgcggcgattctggagagccaactccaacgaatagaagttcttggtgttgatgatacaataagcaa

SEQ ID NO: 36476 - DNA, 658 bp, Setaria italica
  Peptide Sequence Number=SeqID_102450
agcttcggcaggatcgcctattcttagggcaaggcagtagcgacggaacctgccctgcttcggctctgcaatgccctaagaataggcgatcctgccgaagcttcctccggcggccatcatgagcttgaactcgtcgaaggacacgagcccgtcgccgttcttgtcgacgccctggatcatgcgccggcactgcgcgacggtagcggcctccccgatccccctgaggacgcgcgcgagctcggcgggggtgatgaggccgttgccgtcggcgtcgaagaccatgaaggcgtggcgcaggtcctcctcgacggcggcggcgtcggcgtcggcggagcgcacgagcgcggcgaactcgggcaggctgatgcagccgtcgccgtccgcgtccgcctcctccatcatgcgggacacctcgtcgtcggtggccgcgtggcccacgctctcgaagagcgccgccagctcggagcgcgagatctggccgtcgccgtccgcgtcgaacttacggaagacgcgctccatctcgtcctgctcccgcggggcccccgccgcgttcctcggggacggggaggaggagcggggcgaggaggacgtgcccgcgcggaagctgccaccgccgccggcgcgcttgccgctgcgggagaagaaggagcggaccttg

SEQ ID NO: 36477 - DNA, 1083 bp, Setaria italica
  misc_feature (1)..(24): n is a, c, g, or t
  Peptide Sequence Number=SeqID_102451
nnnnnnnnnnnnnnnnnnnnnnnnttttttttttttttttttgtaaaaattgaaagccgttttttggaactgaaattggacaatccattaagcctccatacaatggatgatgcacatttgcaatatatgcatatatacacaaaaccaatcgtgctttttatccgtgtaatctggacctactaattactactttggtgataatctcttgtcgctgttatggggtatgtacaataaaacgaatcgaatttgtgagagcagagcattgcagagccgaagcagggcaggttccgtcgctactgccttgccctaagaataggcgatcctgccgaagcttcctccggcggccatcatgagcttgaactcgtcgaaggacacgagcccgtcgccgttcttgtcgacgccctggatcatgcgccggcactgcgcgacggtagcggcctccccgatccccctgaggacgcgcgcgagctcggcgggggtgatgaggccgttgccgtcggcgtcgaagaccatgaaggcgtggcgcaggtcctctccgacgggcggacggacgtacggcctaggcggcggcgtcggcgtcggcggagcgcacgagcgcggcgaactcgggcaggctgatgcagccgtcgccgtccgcgtccgcctcctccatcatgcgggacacctcgtcgtcggtggccgcgtggcccacgctctcgaagagcgccgccagctcggagcgcgagatctggccgtcgccgtccgcgtcgaacttacggaagacgcgctccatctcgtcctgctcccgcggggcccccgccgcgttcctcggggacggggaggaggaggagggcggcgcgctggcggccgcggaggaggagcggggcgaggaggacgtgcccgcgcggaagctgccaccgccgccggcgcgcttgccgctgcgggagaagaaggagcggaccttgcccatggcgctggtgcctggtggtgtcgcgcgcgcagggaaagaagaagaaagatgtcgctggtggcgattgatgccttgcttgttgcgatgccttgaagctaggaagcactcgtatgatcgtagctgctgctcgccga

SEQ ID NO: 36478 - DNA, 554 bp, Setaria italica
  Peptide Sequence Number=SeqID_102452
ccagcaattcactattatctctgctatggcaggatcaatgttatctggaatatcaaggcgacgattctgaaatccaactgctccgacaacttgcatggcgttcattccttcccaaggttgcaatagagtacatagctcccataatatgactccatagctaaaaacatcgcatttttcgtctgatggttcattacgaagtacttctggagccatccactccgcctgcacatcagcacaattgttcagtagtgacttaacgtagcacttgaaccaactacaacttttaaagtggtatacgaacagatagcacaagttaacctaaacacacttaacagtgctcacccaggttaatcttatcagcagagttacagttgtctctagaatctagacagttagtagtttttggacttaactgaaatctcacatgcagaaggcagaagctaaaggtaggagaggattgctcctagagcatgagagtttgcagagccctacgaaagggggaacagccttttgactttatctaaaaaaggtagttgttttatttttgtctactt

SEQ ID NO: 36479 - DNA, 1563 bp, Setaria italica
  Peptide Sequence Number=SeqID_102453
gattcttcatcatcttcaccatctacgtcagatatgggcagcactccagctttccggagaatgaaggtgaaggacatttcagaatacatgattaatgctgccaaggaaaatccacaattagttcagaagatccatgaggttttacgtgaaaatggagttgtggcaccacctgacttgttttcagaggattccatggaagagcctaaggacctcattgtatatgacaccgcgctgtttcaaagcaaggatgaaatgaaaagaacgatgaatgagttcgagtcaaggacatacacagatagtggccatgctccttcattgcctcatcatcctggacatgaactccaaccaaaagttgttcctcaccgagtacctctggaatcacttaagcctgttgagggcctgggcgtctaccatccccatgatatcagagatattgcgtctccctttgtctctcaatatgaaccttctgcacctcctcaggaagctccggcaccacttacaaagcaattgcctgttacagcagctgctgttgcaactgctgcagtggttgcatcctccatggttgttgctgcagctaaatctaacagtgacgtgaactttgacgtgcctgttgctgcagcagctactgtcactgcagccgcagttgttgccacaactgctgctgtgagcaagcaatatgaacacttggagcctggtaatcagctgcttaacttatcaagtccctctaaaggaaatgaatcggttgagaaaggtggagatgatttttgggataaagacaaccttgaagctgatcatccccaagataatgctctggatcaagaaattcctcaggaagctgaacgaacctcagataaatcaagtgggacagagagtgcgaaatctgatcttgctttggaggacgttgcggagtttgaaatccaatgggaagaaattgttattggtgaacgaattggcctcggatcatttggagaagtttatagaggagaatggcatggaacggaagttgcagtcaagaagtttctgcaacaagatctttcaggtgatgctcttgaggagtttagaactgaggtgcgaataatgaagaggttacggcatcctaatgttgttctcttcatgggtgctatcactcgtgtgcctaatctttccattgtcaccgaatttcttccaagaggcagtttattccggttgattcatcgacccaacaaccagttggatgaaaggaaacgcttaagaatggcacttgatgtggctcgtggtatgaattatctgcataattgctcaccagttatagttcatcgagatctgaaatccccaaatctactggtggacaagaattgggttgtgaaggtttgcgattttggtttgtcaagaatgaagaacaaaaccttcctgtcatcaagatcaacagctggaacagcggagtggatggctccagaagtacttcgtaatgaaccatcagacgaaaaatgcgatgtttttagctatggagtcatattatgggagctatgtactctattgcaaccttgggaaggaatgaacgccatgcaagttgtcggagcgcga

SEQ ID NO: 36480 - DNA, 979 bp, Setaria italica
  Peptide Sequence Number=SeqID_102454
gagcaaccttttctctttctttttccttggttgacagcacattactgttgacatttacacataaatacccaccatttggtgacgcacacaacgaaagaaaaaggagagatggtatgaacaaagccccccattccgcctgccacatcagttcctgattcaagcgttccactgtgccaaaaacattattgttcggcacaatttcttgctttgatcataccccttcgccccttcgtcttctttcacgggtataccagcgttggtctcaaatccggatcaatggcaagcgggcttgacgtcacattgccactcttaaaacttacaccagtagttggatagagtagcaaacagaccaacatcacagatttttctcatctttgaccacaagcttgctgttactgtacagaaataatcctataagttacggacgttggccagttgctaatctcctcgtcttactgatctgtttgttgagctgtctgccttggtgcttgattgctggtcaggttcttcaacaatggttttaatgtggccatgatatctgcaaacgatggccgcaactttgggtccgtatgccagcaattcactattatctctgctatggcaggatcaatgttatctggaatatcaaggcgacgattctgaaatccaactgctccgacaacttgcatggcgttcattccttcccaaggttgcaatagagtacatagctcccataatatgactccatagctaaaaacatcgcatttttcgtctgatggttcattacgaagtacttctggagccatccactccgctgttccagctgttgatcttgatgacaggaaggttttgttcttcattcttgacaaaccaaaatcgcaaaccttcacaacccaattcttgtccaccagtagatttggggatttcagatctcgatgaactataactggtgagcaattatgcagataattcataccaagaggcagtttatttccggttt

SEQ ID NO: 36481 - DNA, 276 bp, Setaria italica
  Peptide Sequence Number=SeqID_102455
tccctccatctcagggaggcagaggctgatgcagctgatggaaggagaacccgagccgcctccgcccgccgcagagcacccccgatcctccgcggcctcgatcacatcatgatgctcatggcgtgcaggcccccgacgcgtccccacgccaacgagtccgggggcggcggcggcggccgcggccgcatgatgcactcctccagctcctgcagcctggccaccagcaccacgagccgccggcacggcacgaacaccagcgtcatcgggatgatccag

SEQ ID NO: 36482 - DNA, 259 bp, Setaria italica
  Peptide Sequence Number=SeqID_102456
acagtggctgtaaactgcttgacattttttttgaaactaatgtaaactgcttgacattgaagttgattcctttttttagaagtgttattggctcatcaaaatatcaataatgacacatttaaaatctttccattgtctcagtttatttaaataccctgtataaattgcttgctgctcgcggaatgagatgaatccatttattcaagcagaattgttagtgtattgcttgcctagtctgccgcaactggaaacaaataaa

SEQ ID NO: 36483 - DNA, 1657 bp, Setaria italica
  Peptide Sequence Number=SeqID_102457
ggctttacatgtcatatctcatatggaaggtacttggtcactattaaaaaaattgtatgcaaccattattgcaaatattttatctgctaaacatgccatgctagctcctcaattcctcatgatcttggagttcgatacttgatttgccttgccacatatctcagtttccttttcaattccaaaatggacttttgtctctccctggcaaagtatttcattgaccctcgtcgttggacctcaattgatctttgcagcgcttctcttttcgttaagagattactagacgatgatttttctgggcggcgatagttttttccccggtaaagtattatggcatggctggttgtgagcttttctactgctattaatattccacctgtctcaacctcaagcagattcgctgtgtacatgatctggcgggcttgattctgcttcgtaattacttttacaacctctttatgtttccagtgctgatgaatctcttcaattacaccatcaaagatacctcgccttcctaggagaacaagcccatccattttgcggccaatcctgcggaacatagccttttcctcttcggtcaaaagttctctatcagcagactgctccgaagggctccaagaactgtgaagctttgccaatgcctggttggatccttcaatcttcttgtttagaatggaaagcttccattcctggtctttcagttccttttccaatctatgcttctcagcctctagttcaattatgttggagttttcagtattttcgtgcacatggtcagcttggaaatcctgatactccctaaaagttcctacagaactttcttcagatgataatccaccaaccatctgaagtgagtcaactgctttcaatcgagcttcctcttccttcacctgttcatcatgtacttgagcctctcgttgaataacagtttgagcaactccaccaggaagaaaatccttgcctctatatagaataatgaaatccttgtttctcaatattacagtgcctcctgtaagatgcttaaggttccatgccatttgttcattatttgtattttggataccaactttcactgcaatttttgctataaggcttttttcccaaagcttcagtatagcagcagccaaaccctgcagtcttgaatttcgaccaagggcaaaatgtgtcggcaaaggacgtgcaagcttgcgcaagtatgtcagctcctcatctgctagtgttggtctcacaccaggagggcactgcctaaatggagtcttaaagcccggaacaaactctgggaggagatcagcatccacaggcaatggtgtgttccaccaccaatcaacaaatcgagggcccaaactgtccaataatctgttgacttctctctcatagagtgttcccttgattggttcttcatccttctgaccacaaacactttgatcattttcttgaataacatcatcacctttgctattaccatcggttagcacttcaccttcattaccatatttaatctgggctctatgaacattgtatttcactggagacacattttgaacactagccagagaatattgactatgcttcatgttctgctgataattgcttcctctgtaaacaaaatgtatatcttccttttgtccaaattactaagcctcctgtttttatctcc

SEQ ID NO: 36484 - DNA, 301 bp, Setaria italica
  Peptide Sequence Number=SeqID_102458
ccggagatgtttgttgagatagtcggaggatgctgctgctgctgctgcgccgacggcgtagctgttgctgcaatcaagagccgagctcttggccgtgcaggagtcctgcgcgcagatggcggcggcgacgccgtcgggctcgccggtgccgttcccgcggccgcagtcgtcaggagagggcagcgattggtcgacgagcgcagcggagagcttggcaccgacgaggaggaagcggctgtgcttggcggtgaggtcgttggcgctgtggatggggtcgtcgcagtcggcgcacaggatggcg

SEQ ID NO: 36485 - DNA, 421 bp, Setaria italica
  Peptide Sequence Number=SeqID_102459
agagtctctgctcatcaccaccaccgacacccaccccaaaacccccaagctccgagagaaagaatcatctccaatggcattggggggaggggcccctcggcgccatcatcggccgctacccctccgccgccgacgagcaggacccgggcgggggagtcattcgccacgaccgcaagtgccgggactggcccttcctcctcctcttcgccgccttctgggtcgccatgattgtcaactccagcttcggcttcaaccagggaaacccactcaggctcacattcggactggactacaaagggaacatatgtggcagcaagcatgccgtaccagatttgcgtgagttggatgttcgctattggatgaaccccaaccaggtctaccaaagtgggctcaaaagcagtcgcatcaatctacctgacgt

SEQ ID NO: 36486 - DNA, 384 bp, Setaria italica
  Peptide Sequence Number=SeqID_102460
gtgccgtgatcatcttatgaaacacatgagtgttccttcacgccaacatcaaccatggtcaaattcttaccatgatagacctttattcaaagagataagaatgcaatttaattagtcaaaagactcaaagcatacagtacattatttcaatcagaataacctgtcaagttctaactcaattgttgacatcgaaacacagtatttctcaacagaaaatcacatttgatttctgaatatattttttctaatttgagcatgctgaacaaccaaaatcacaaactcccctgaaaccaaggttcaggagcaatgacatatctcacctgcatataagatttttagatcaaggaaacactaatacatccctatgctctccactacttgttg

SEQ ID NO: 36487 - DNA, 362 bp, Setaria italica
  Peptide Sequence Number=SeqID_102461
agcagggcaccatgctgaagctgctcatcctcgagaacagcttctccggcgggatcccggcgacctacgcgagctgcaagacgctggtgaggttccgggtcagcaagaacaggctcaccggcgaggtgcccgatgggctgtgggccctccccaacgtcaacgtgctcgacctggccgagaaccagttcaacggcagcatcggcggcggcatcgggaacgccacggcgatgacctatctcatgcttgccgggaacaggttcgccggcgcgattccgccgtcgatcggcaacgcggcgagcctcgagagcatggacgtgtcgtggaacgagctctccggcgagttgccggagagcagcgggagg

SEQ ID NO: 36488 - DNA, 637 bp, Setaria italica
  Peptide Sequence Number=SeqID_102462
ttagttacgtaattttgtctaattgtaggttcgtactttaaactttcagttcaatagccatgtctcttgggagaatctccagatgcggtggtcgtatgggttttcgaggttacaagtttctcaggaagatgtctagtggcacccagtctgaaggatcacaccaacctgcttcaaagcgtgctgtgaattcatgccgaaagaatgtaccaggcacttcattcgtctcagatttgagagatcacgtccacgagttcatccatgcctctgcagatgaacaccggacatgcttcacaaagactatcaagaagatgtttgggatgtcaaagattgtcgcagagaaatctgcaaaagtagaggaagctggacctgaaagtgtcttgccacttcagaccacagtgtctcagtagaaatatcgccactttgtattgtctcagtacaaatagaatgaaatgttaataactagggggttctctggtgagaggttttagctgtcagtaagcatagttctcttgtgtagataacactttttttccatacttttgactgatataagattatgtacagttacatgaaacgtgtctgtagcaacttcactgtgcaaaaacaaaacctatcagaagagagatgcatctcttcc

SEQ ID NO: 36489 - DNA, 302 bp, Setaria italica
  misc_feature (253)..(302): n is a, c, g, or t
  Peptide Sequence Number=SeqID_102463
ggccgtggttctggccgcggcgagcagcctgctgtaagaatatatatccgcggactaggaatggatcgtcgtcccaacaaacacggcgagagcctgcgtgcatgtgtatgagtagttcttgttgcgatttcattttcctctcctcctcttgatcttggatttgtttgttgctatcacctggtttggagaaaaccggggcacgtgatcccgatccctgaatgatgctcagttactgcgatgtttatttcaaccnnnnnnnnnnnnnnnnnnnnnnnnnnnnnnnnnnnnnnnnnnnnnnnnnn

SEQ ID NO: 36490 - DNA, 267 bp, Setaria italica
  Peptide Sequence Number=SeqID_102464
ccgaatcgacctcaacctcctccagctcgcgctcaagtaccgccagcacaagatgatctgccgcaagtgctacgcccgcaactccagcagggccgagaactgccgcaagaagaagtgcggccacaccagcgagctgaggccaaagaagaagctggatgccaagagagaatgaagcaacattggaaaatcaccaaaagcgatgaagtgccaagcgtcagttgaaccagttttcataataagagttgtcagtcctattagagtacttgt

SEQ ID NO: 36491 - DNA, 797 bp, Setaria italica
  Peptide Sequence Number=SeqID_102465
ctccgccaccccaccccaccccacccactccctcaaaaccccattcctccggcgagcaatccccgagctccggcgagatgcagatcttcgtgaagacgttgacggggaagacggtgacgctggaggtcgagagcagcgacaccatcaccaatgtcaaggccaagatccaggacaaggaagggatcccgcctgaccagcagcggctgatcttcgccgggaagcagctggaggacgagcggaccctggccgactacaacatccagaaggagtcgacgctgcacctggtgctccgcctccgcggcggcggcggcaagggcggcagctaccccaagatcgacctcaacctcctccagctcgcgctcaagtaccgccagcacaagatgatctgccgcaagtgctacgcacgcaactccatcagggccgagaactgccgcaagaagaagtgcggccacaccagcgagctgaggccaaagaagaagctggatgccaagagggagtgaagcaacattggcacaaagagcgagagaaacgaagatcaatccatgttatgcatcagttgaaccaactatctgtctatcttagcactttatccatgtcagagaccatactagagtcgtgggaactcggaatttaattttcctcattagttaagttttgcatcagttgaaccaactatctgtctatcttagcactttatccatgtcagagaccatactagagttgtgggaactcggaatttaattttcctcctagtttaaatatcctgctggagtactcatcttatgcagagcagcggt

SEQ ID NO: 36492 - DNA, 314 bp, Setaria italica
  Peptide Sequence Number=SeqID_102466
cagatcactggctgggctcagctggctcagttcatgccagccttgcactccccacacaacgaggggtaattcgatgtggcctcccacagttcgttcgagcaccaacggcctcggccagtacgcatggtcgggctttcggtggaggattccctttacaaccgaccaaataacgtcgagcatcaacccaagcatcggattgttagggtcatgttcggttaatcctggattgagagggattaattccctatagacttatatgagaattaattccttcttacttcctttcttttcttaattttcccttttttcgttta

SEQ ID NO: 36493 - DNA, 567 bp, Setaria italica
  Peptide Sequence Number=SeqID_102467
acgtacaatagtgtcctacggggtgtgacggagcttgctgaggctgcttcactggactcagcccttgatgtttgtaaggaatagcaaggatctcgcagcgggcgggcatttctcagcaggttgactagagaaccgacttgtgcatcttgagatttatgggacgaaggacctgcctgatcacctttttccttcccatcactgctcctatatgcagggaagttgtcacagtgctactgtggtactgcctactgagaacacaaaaggtgtcgtatttaattctggaatgtatgctcttttagtccaggttgggagactggtgtgtcaacatcatcgcagaaaaaaggataatcatccgaatcatcttgccgaggggaatcacatgaggagagcgcagagaacctgccagattcatctttattctcctttcccttatgtctgggtgacaaggttgaatggggatcagctatccgaagtccttccaacttcccaatcaaccggccactctctgatggagactcctgagcacctgctgtccccatctctcctcttctcggagaaggcggtgga

SEQ ID NO: 36494 - DNA, 1236 bp, Setaria italica
  Peptide Sequence Number=SeqID_102468
tttttttttttttgttaactgtcattgcattaagataggggggtaaaagacaagataaaacaacaccaaaacacaacaccagatatatctaattctcttttcctactgcagacagcaatccataactttcgagttcaaacagaaagagcaaagaaaaactagtcttctgaagggcttcttcaaagatcggtgtctactgaacacttggttccgagcagtttacataatttacacacgcgcacacactagagcacatcgttcatccatcacaggctccctctcacctacgtgtatcggcttaacttcccatatgcacaaaagagtatgaacagcagcggatcatggccctcactcgttaagaatggtgagtgagtaattctttagctgaaataagttgaagctggtgccttatcttcaaccaaaagcatcaatttcagcagtcatatatacatgagcacctcaacaaaagtttccttagctcaccatgcatcctgtattgtggtttggggtctcttctcagcggtgatgttaagagaaacgaaggaaagaatgactatggtttccctggtggctcttgatgttttgcgctgctccgggacagcagtcgctcccttatctctttgaaggactggagctcctcgagcgcgtcagatgtcctacggggtgtgacggagcttgctgaggctgcttcactggactcagcccttgatgtttgtaaggaatagcaaggatctcgcagcgggcgggcatttctcagcaggttgactagagaaccgacttgtgcatcttgagatttatgggacgaaggacctgcctgatcacctttttccttcccatcactgctcccaggttgggagactggtgtgtcaacatcatcgcagaaaaaaggataatcatccgaatcatcttgccgaggggaatcacatgaggagagcgcagagaacctgccagattcatctttattctcctttcccttatgtctgggtgacaaggttgaatggggatcagctatccgaagtccttccaacttcccaatcaaccggccactctctgatggagactcctgagcacctgctgtccccatctctcctcttctcggagaaggcggtggcagcgtgttctggcggtgcacagggctcctcctctcgcccccttgtggtattggcactggcgcagactcccccctaaagagacgacgcgattgcagatacccacctggaaagtggggaggcgagg

SEQ ID NO: 36495 - DNA, 284 bp, Setaria italica
  Peptide Sequence Number=SeqID_102469
gctgtgctgcttctgctgctacgagacctgcgagtgctgcctcgttgcagcagcagcagaggcagtcgaggcagcactcgcaggtctcgtagcagcagaagcagcacagcgccgtgaagatgcaggcgtagaggcagcccttctcctcgtggcgcctctggcagtggtcgtagtaggacatgtcctgtggcggcggcgcgttgtacatcctcgctcccttcttcttctccttttctcctcttctctgcggccgcagttctactgcttgtacctcagttctctta

SEQ ID NO: 36496 - DNA, 582 bp, Setaria italica
  Peptide Sequence Number=SeqID_102470
tttgggctttacagataaaatttactcgaacaaatacggtgactttagaatcggaacgagatgctaacaatacgatgcggcggttcaaaccatggttacagtaccagtagaatctttgttcaggacacacgaatgctcgctcatactgacagaataactacgacatggtttattatgttcttcgcaaccagagtaaagcaatcaagcaggctactgaaacttcctcatctccatccggccttgtggagctgcaggcaggcggcggcctagttgcagcagcagcagaggcagtcgaggcagcactcgcaggtctcgtagcagcagaagcagcacagcgccgtgaagatgcatgcgtagaggcagcccttctcctcgtggcgcctctgcacatggtcgtagtaggacatctcctgcgcggatggggcgtcgtacatcttgcctggccggctggtgatgaactactgaagaagtgaagaagaagaagaagaagaagaaggaggagggcaagggtcgtctcgtctcccctgatcttgttctcatggaaagttagaacagagacaaatgagaggaagcagagttaag

SEQ ID NO: 36497 - DNA, 1368 bp, Setaria italica
  Peptide Sequence Number=SeqID_102471
tttttttttttttttttcttgaccaagtcttattgtttatgctatctttcttcccctgttcctggtacaatgaacacttaccatctgcacgagcaggtgcagagcagcacatgatttctctcgtatgctccgccaattttgcaaaatcgaagaagcatacggacaggtttttcttgaaaaataatttctttttcatcgaacaaatgaaagaatcctccatccactactacaaggtacagagactttagccgtgtggaacactctccacaagcaacacaccaccctcacaaaaccactagccccgccacgaaatctaccccaaggtggcgcacgacgacgtgtccgggtccacgagcgccgggaccaggtacctcctcccgtgggccccgttggcattgaagctggcaccgctggcctggtccaccagcagcgagcccgcgtagccggggtacgcgcccttgccgtacacgccggcgcacgccgtggcggcctccagcggcgcgtcggcggagccctcctggtagaacccgttgccgaacgggttggtcaccgtgccgacgatcatggacgccagcgagatcaccatcccgtcggccccgacgtcgccgttggggggcgtgagcggcgccgcctgcgggccgtacacgggctggtggaacggccacgcgcactggccggggcactgcgacgccgggttgcccacccacacgtacgcgaaccggccggagcgggaccgcggggacgcgccgtgcgtgccgcaccgggacatgcagaacccgtcgacggcgacgtcgtcggcggtgagcaccacgttgatggcgcggcttggggcggcccttggcggcgagcttgaggaggtccccgtccgtgaggcgcttgccgagggagtaggacgagtcgaggacgtgggtgccgacgtacagcgccgggaaccgcgccttggagttggcgtagtacttgcgcgccgtcttgaaccaggtggcgaccgacggctccggctgccccgccgccgccgggggcgcggacagcgacgagacgaagtcggtgatcaccgcgcgctgcggcgcggagaagttgccgtaccagatgaagttgacggcgatgcggcccgacaggagcgcgcccctgtggtacttcatggtaatggctggctcctgcacgagcgcggtgagccgcctcccggcgaggcaggcctggaacaacagcgcgaacgccagcagcgtcgctgctagagatgcggtggaacaagccattggtgatgtggtggctccaatccaagaacgaaacttcttctactggaggtggggggtgttcttgggttggtgctttcagagggttcttcttgcttggtgctcgaggtttagttac

SEQ ID NO: 36498 - DNA, 596 bp, Setaria italica
  Peptide Sequence Number=SeqID_102472
cgatgatgaggccggccgaggcggccggcggctggtctgatttacctgaggccgaaggagaaatggccgccgccggcgctgctgctctcgcccggctcgctacgggcgagcgtgaaggaagatacgcgggaggacgagctgcaagtgcaggcggaggcggaggccgccatggagacgacgaggtcgacgaacgcggtgacgatggcggggtgggtgtccctgccgttggcgccgaggtaccacgccagcatcctctccagccactcccagtcgcccacgccgtgcgcggacaccatctcctccatggacgcccggaagtcgcggtacgggtcggcggagtcgaacgccacggccacgccgtcgccgaaggacgaggacgacgcgtcctcggcgtggccggcggcagcggtggcccgacgcgtggcgggaccgggcggcttcctctcgaggatggagcttgagggcgcctgcggctcgaagaggaggcggtcgtcggagcgaaggccgcggacgatagcgtcggccatgtcgtcggccgcggagggctcggactcggtggacgggctgtcgtcggacgcgcagacgacgcggtgcgt

SEQ ID NO: 36499 - DNA, 309 bp, Setaria italica
  Peptide Sequence Number=SeqID_102473
cccgttatcccatctctgcatttcaggcatttgccatctgcctgagcagctttgacaccaaaatcggttgtgaatgagtcaaggtatgattctttcttgcttttcccccttcttgacttgccaaatggctcagttattgattcttctgtgctgatgggctggtggtccattttcaaaactgctcacacacatattcaatccaagattttagccagctgtttgttatatctaccaccaatttatctttttaaatgctctccatcaccagcatgggggtttctacacacacatatatttcaacccaaaccg

SEQ ID NO: 36500 - DNA, 419 bp, Setaria italica
  misc_feature (1)..(14): n is a, c, g, or t
  Peptide Sequence Number=SeqID_102474
nnnnnnnnnnnnnngatcatgttgggactaaactggtggaatttattcagagcttgttcatttttctatgtacattacaatgtagtatggttacatatcttgtcatgaaaacccacgctgctcttgatgaatatgaccagtgcagcaatttgtgtgatctataccctgaataaatttcagaatacaaacataactataataaccagtgatctataacctgaataaatttcagaacacaaacataactataataaccagaatcggaatctctacgcctaacaagtaggataagccagtcacctttgctggctaagatgtcagaagcttgtgtcatcaggactgcaactattcctccggtagttgattgggtggcagtgtcttgatgagtggtttcagggattccatgatactggcaaaag

SEQ ID NO: 36501 - DNA, 351 bp, Setaria italica
  Peptide Sequence Number=SeqID_102475
aaatctgcaagcgcgagagcgcagagcgcgcacgctactgagaggcgggcctgctcctggcccccgttggctagcggttcgtcgtctccccagcgatccggcagccatgaacatcttcaagaagaaggtcgaccccaaagaggctctcaggaccagcaaacgtgaaatggcggtggccacgcggggagttgagagagagattggctccctgcaaatggaggagaagaagctggttgcggagataaagaagactgccaagaccggaaatgaggcggcaaccaaaatattagctcggcaacttgtcaggctgaggcaacaaatcctcaatttgcaaggcacacaggggatagg

SEQ ID NO: 36502 - DNA, 397 bp, Setaria italica
  Peptide Sequence Number=SeqID_102476
tgtggtgggtctccatcctgatattcaggaacccggtaacattcgtggggatgctaggctacgggattacagtcgcaggtgttgttttgtatggcgaggccaagaaaaggagcaagtgagctcaagcaaacaagctacctcctgtgtttcagtctttgagctcatgctatacatctttcgctggtgccctgagttagcgctgatcgaaccatagcgatggtatgactaagacaaccgcatttttgcatgctccagaattgcaatctgagctgctaaacagtaggaaactggtatgttgttagctttgtattttggctcatgtcattggagatgtatttatccttgtaacagtgtttatgtacaatccagatgtacaaccagtgaactcgctgttttg

SEQ ID NO: 36503 - DNA, 375 bp, Setaria italica
  Peptide Sequence Number=SeqID_102477
tcccctcttggggtgtctgttccactagacgtcagttcttccttgtaatcatcttcagagtattgactctcagagccgccgctttgctgttcattgcagttctgacctgtcttgatccgagaacgaactctacttgtaaccttggtagccaaagttgttatcttggaggcgatagaagattggagaggttgctgagagtcaacagaacttttgtttaacaaactgcatttaggccgattgttgacttgaaaacggagctttgctggatgtgaatacgatttcgttgaagttgaagggcccattatgtcctccaatgtctgtgtatcaactgagagacaaatgaggcccaccaagctaccatcatcatcatacaaa

SEQ ID NO: 36504 - DNA, 568 bp, Setaria italica
  Peptide Sequence Number=SeqID_102478
agacaagactaggaaataccaaactacaagaatagaactacggtaacaacaaattaataaattaacaccgggcggagggacgacagccggccacggctactggggggggaggagcaaaaacccgattggtttagggccgaccaagtcacgacgatgcacatgccgggggggtgtactatggtggctgtacaacatggcgcggttgtgatccttctgattttatgctctcgccatcacatgaagtagctcagtgcttttttcttccttgacccaccttcaccatacaggtcattccattgaagtagctcattcatatttgccgaatcagatagaaaaacaactacgcacaaacctgctcatgagcagatttgaagtcatctatgctaagaggacgaatgtcctcactgccatacaatgcaggctcaggcttaccttctgattttgctaaattcttctcctgcatacaatggaaccaaaccaactaatttagaaatataattcatgatttttacctaatgtgcataaattcaacgtcaatacttctcactgctgcaatggataatcatac

SEQ ID NO: 36505 - DNA, 465 bp, Setaria italica
  Peptide Sequence Number=SeqID_102479
ttaaaaccatgcaatcaaagcagcaattaaataattctcccacactgaaagaaactacagttacctgcgggggaacctcctaatcacagcctcatctaggtcaaaaggcctatttgtagcaccaagaaccagtacacgctctttatcttttgtgcgcagcccgtcccagtttaccataaattcatttttcatcttgcgcattgcttcatgctcccctggattctctctccttcctagcatactatcaacctcatcaataaatataacactggggctattttacttgctagcgagaaaacagccttcacatatttctctccttcaccaaaccactttgatgtaatgctcgacattgatatattgatgaaattagcacctgcttcagttgccactgctttggcaagcatagtttgccagtagcagtcagacactttttgaccttttcccggatagctttggtaacag

SEQ ID NO: 36506 - DNA, 288 bp, Setaria italica
  Peptide Sequence Number=SeqID_102480
cactgtatgcaacaaaaaagttactgtaccatactgtcccataacaggatgaagatgtcttatttcccatgtctcccttcatcctagttactgtaccatactgtccataacaggatgaagatgtctttatttcccatgtctcccttcatttcacatgtacagaggtacacaacggcctatagccaaagtccaaggacaatggctgcaacaaagttaacttgctaaaggcgaagaaatagagtattaagttatgctgccattgcccctctgcatcctattcctctattt

SEQ ID NO: 36507 - DNA, 244 bp, Setaria italica
  Peptide Sequence Number=SeqID_102481
tgatcaaaatatagcattgtttgtttaagaaattcaaactcttgaaaacaagcttgaggaatttacatttcaatgacatgatggaaataaacccaggccataaagcacaatgttccgttttattctgctgcttaccgcacgaatgctaccaacatttgatttcgctttaagggtttcaacatcacgatccaactgctgcttccaatctgtaagtagagcttcatcctgcggaagctggatcgat

SEQ ID NO: 36508 - DNA, 1032 bp, Setaria italica
  Peptide Sequence Number=SeqID_102482
tttgttattgtaacttccttcttttccaagtgtatgaatgcgcatgataagagcacatttttggtattctcactgagataataaggaaaagtctcaaaggtgacatcaatatcacttggactaataattccttgtttcatcccgtccttaaaggcttgacatctacttggaggcacactggctgaaagatccctgatgatatccctctgatcttcaagagcgatttccgcaccaagatgagcatcaggcacaaagccattttgctggcagttatcgtttgcagcatcatcaggagatacgggggctgcagccacatccatagaagagtcttcaatattagaattaacctcgttagcattttccccattctcaaactccttgtcagggctgatagcgtgcccttttgatttatccgaagcagaggatgccattgggcgcactaccctttggctattctctcctgctgacgcaggaggtgctgctgctatgtcctttggctgattacatgcagatgccaacatctcagtaccagcaacagctgaagtgtctcctgctctcttatctgtgcggatgcgcttggcactagcaactggaggttctaaaagactaacagcagatgatggcactgtcttaggaactttatcgttcaaaggatgctgaaaaatataagcatgcctacggcatgaactgaatatgacttcatcccctccagtaaggggaacttttgtgcctggacttatgggtcttccatttaattggaccacacccttcttgcctacaacttctaactcacattgacccccttgctcaaggcgacgcagcttgcaaagcattttgctaacaggtatgtctttcagccataaattacagcttttgctttgaccaacagaaaattgaggggcactgatgggatggtgaggagtctgagagcactgggatagcagcttcgcccatggcgccgcaggctgctgttgctccggctcctttctcctcttcgaactctcggccgccgcagcagctggcttatccgct

SEQ ID NO: 36509 - DNA, 1153 bp, Setaria italica
  Peptide Sequence Number=SeqID_102483
ttattccagtgaatgatttctctacatccttaagtaacactatcagaggtccagatttgttttcttctgaaatgacctcaattaactcagccatggctagcctttcaacttcttcaccagtggaaaagtctgggcgaagtaattcagcagaacagaagaagccatgatcttcctcacacaaaccgccaagatcattaccatcagggatctgcttgtcaaatcggactccaatttttgaggatccattgtcttcaaaagcaagcatcactctgcctcgataaccataacttggtcccctttgtgacaatgagggtggctgagctggacccacatatcttaccctatcaccttctctaaaagtatagctcttggatgtagctgttgacgattcctgtttgggtagtgatgcagaatgcagagtggatgttcccacaatatcagcattcacacttgaagttggtgcagctggcctcctgaagtgaacagcatctgccaatgaagaacgatgcttctgatggaagtaatccctgtccagcttctggaatattgcaaacttgtcaccacctgccttgtcccctgatttatcagacttcccaacatctttctgggattctggatccttcgaaggcgccccaggcagcacaagtgaatccacgacaagaagtctagccccaaaatgtttggccagtgcctttatcaatgtctcctgataaatctcagaacctgctggaccagataacaaaattcgctggtttattgacgaaatctcagcaaattgcttgatgaactccttcttttccaagtgtatgaatgcgcatgataagagcacatttttggtattctcactgagataataaggaaaagtctcaaaggtgacatcaatatcacttggactaataattccttgtttcatcccgtccttaaaggcttgacatctacttggaggcacactggctgaaagatccctgatgatatccctctgatcttcaagagctttaaaaacatcaccagtcaaatcgaactcgggtacagttgatcctgtaaacatcctcaggactggcttacttttaattactttaattaaggtttattagtcttctttggtattgttagtcttgtttgtacgttatttccttgttttgggtttagttgt

SEQ ID NO: 36510 - DNA, 2595 bp, Setaria italica
  Peptide Sequence Number=SeqID_102484
ttttttttttttttttttttttttttttaagcataaaaatcatgagcatcttaattcatatgctagcattattcattccacaataatccccaatcaactcaagatacaaataaattccaactgactgcacaggcgcctttcataattcttatgacggcaccggtccaatctaatccatggtcagtcactgtatgcaaacaaaaaaaagttactgtaccatactgtccataacaggatgaagatgtctttatttcccatgtctcccttcatttcacatgtacagaggtacacaacggcctatagccaaagtccaaggacaatggctgcaacaaagttaacttgctaaaggcgaagaaatagaggaataggatgcagaggggcaatggcagcataacttaatactctggaacctcaagcagctggaatccaactcagatgactcggtacacaattataattacaccgggcggagggacgacagccggccacggctactgggggggaggagcaaaaacccgattggtttagggccgaccaagtcacgacgatgcacatgccgggggggtggtactatggtggctgtacaacatggcgcggttgtgatccttctgattttatgctctcgccatcacatgaagtagctcagtgcttttttcttccttgacccaccttcaccatacaggtcattccattgaagtagctcattcatatttgccgaatcagatgaaacactcgcacaaacctgctcatgagcagatttgaagtcatctatgctaagaggacgaatgtcctcactgccatacaatgcaggctcaggcttaccttctgattttgctaaattcttctccttcttttccttctccagaatttctcgaatggggtaatgcgctgccgtgacacacagattcttcaggtcgcttcctgaatatccatcagtcatattggcaagtgagtccagatcaacatctggtcccaactcttcttttgccaaaattacttttaaaattttctccctatttgatgcatcaggtaagtttaccattaacctgcgggggaacctcctaatcacagcctcatctaggtcaaaaggcctatttgtagcaccaagaaccagtacacgctctttatcttttgtgcgcagcccgtcccagtttaccataaattcatttttcatcttgcgcattgcttcatgctcccctggattctctctccttcctagcatactatcaacctcatcaataaatataacactgggggctattttacttgctagcgagaaaacagccttcacatatttctctccttcaccaaaccactttgatgtaatgctcgacattgatatattgatgaaattagcacctgcttcagttgccactgctttggcaagcatagttttcccagtgccaggaggtccaaaaagcaatattcccttgcaaggctttgttaactgccctttgcagaacaattcaggcctttgtaaagggagcatcaccagctcctttaatgtgtcctttacattctccaaggctccaatatcatcaaaggtaactccaatgtcattaggtggtataacatccgtcagaagccttttctcaaattcattctctgtgacaacatccttcagtgattttttggagctcttgttatcactttgcacgctctgtagcatgttgagcccatgcttaaggctttcacttgtaagtacaagtttagcatccttggagttggaagtttcaactttattgtgcttaaggtgataactcactgcatacccaacgatcttgtccacattttcattactcagtgactggtccttgatgaataattcttcaagttcattgcattctattccattacggctcagaaacgcacgaatgctaccaacatttgatttcgctttaagggtttcaacatcacgatccaactgctgcttccaatctgtaagtagagcttcatcctgcggaagctggatcgatattttgttggggaaaagtttattcagatgtttcatagcctttggactttctttgttcctctcatgcaatctgttaccaaagctatccgggaaaaggtcaaaaagtgtctgactgctactggcaaactttgtgaaaaggaaacccccaggatgtgccttctctttgcggctgtccatctgggtgtgggatcctataataaggacaccagatggaagcgattcaagtttgctcctcaaagatgaaagtgactctgttattccagtgaatgatttctctacatccttaagtaacactatcagaggtccagatttgttttcttctgaaatgacctcaattaactcagccatggctagcctttcaacttcttcaccagtggaaaagtctgggcgaagtaattcagcagaacagaagaagccatgatcttcctcacacaaaccgccaagatcattaccatcagggattggacaaagtagaagtaccaagaatacaaacaatactaggtacccaaactacttacttttagacaagcgaattacaaagtttagactacctacaaaagaatagaaaagtagaactactagttaattaccaagtagaaatagaatttactactaacaat

SEQ ID NO: 36511 - DNA, 306 bp, Setaria italica
  Peptide Sequence Number=SeqID_102485
tttttttaagtaaaaaagaaagattcatagtttcatatacaatatagtatagttgcatatggaggaatcttttggaggagccggtcttgcatgtacacttgtacactactaacccggctgaccaagcccatagttttatcttttatgcatgccaccgagttcatccaaagtgctaactaacgaccctgccctggcaaggcagatgtgagatgagatgcccaataattgcgcgcaaccacaactgcaaagaccaatgccaagctcccccaatcagtgcggtccatctgcaactgcaatactcatcac

SEQ ID NO: 36512 - DNA, 989 bp, Setaria italica
  Peptide Sequence Number=SeqID_102486
acccggactagaccgatctcaacgccggccggcctcaaccccaagcagtaaaggcctcaatagctgcgatcaccgacgtcctcccttattccgacgacggtaagtgggcggaaggcgaagcagaggagaaagcaagcgccaggtaaccgccgccggaggaggggaagatgatactcccggtggcgaagctcgggacgctgttgctgaaaacgatgtcgaagcccatcgcgaccaggctcaagacggaggccagccgccaccccaagttccggcagctcatcatcaacctcgctcaggcaaatcaccgcatctccacaaacatccaaagaagagtctatggtcatgcaactaatgttgagattcgaccgttgaacgaggagaaagctgttcaagctgctgccgatcttattggggagctctttgttttctcggttgctggagctgccgtaatctttgaggtgcaaagaagtgcaaggtcagaggcccggaaagaggaggctcgaaaaaagaaattgaggcaataaggcaaaaggaggatcagctggctgaggagatactgaatatgaagcagaagcttagtgaattggagcgctttgccaactcgcaaggtctctctggactgttcaggagcagcagcgtgccagaccaaacgaaacccacatgacctgtttgtttgactagaataaatttaccgcttcatggccaaaactctaaccaggtgaatcaaaaatactcctgcccagtttcttgaagctcccaccatatgggtcgcatgtgttatccccaatgaccattatgggatgatcccgtcaataggtctttggggttcaaaagatcggagtttctttttctgcatttatcaacttggttcttgcaagttgtaaatgtgagagatataacacctcgaatttgtcgtggaaaatcgctgccaaaatgtttgtagcaactcccattcagatgccatcattgtggagggttccctcttctat

SEQ ID NO: 36513 - DNA, 1224 bp, Setaria italica
  misc_feature (1)..(11): n is a, c, g, or t
  Peptide Sequence Number=SeqID_102487
nnnnnnnnnnnagaataattacaataatggaaatgatatatttcattccatatgaatatcaaactggcatcgttcatatgcagaagataacaaggttttgccaccggatagctctttggttctatcccatattccagtacagaaagaagtttacatagccaaattatcataatctaattaatcataactggtttgctgtacaacgaatgttgagctgcagcgtcacatacagcgagtacatccaaacagcaaacgacctcctgtgtaatcgctgcagctcccaggtatacctttgaccgcctccaattcaattatgatacacagtaaagcagcttctgaagagatcttcatgacgacggtgatatgtgattcatggaggtataaccatcagtagagacattcatggacccatcactaagttaccagcactactgtaacataagttagctgaacgatccaatggtgcagctttgaaagtaaacccttcatttcctttttcttctctggaaccatacatactgctagctgcatttccaggtactgttgccactgccattcctggaagtcccatgctactgtaaacaggagccatgtgttgcatttgatactgcattggttctggaaccgaaggctgcatttggtttgttgcgtcgctgtggttcgggctgataccaacaccgaggtcgagactgatggtgtcactttcggctgcctgagaatattgattggtgaaggcccttgcatcgcatgctctcatcatgccaccaaggcccggcatgttgctgttaataggatgcacagcaggcttcatgggagctgtggacatttcatggcttgcattcctggaagctgggacttcatggttatgtttcccttcgtatgttgtgatcactgactttgggtcatgtgatgctctctcaacatgcttcctgaccgggcatcccatatgtgtgcatttgtagtaactccgtggattggggtttcctttcactactttctgcccatacttgcgccagcgatacccatcatccaatatatcaacttcactgacagtttgtacaacaacacggggctcgcgatttggtttacccatcaaagcagcatcaattccagcggattccattttcctgcgtttcgagtccaaatcatcatcctcattagtgtcatcccctgggtagggtcttccgcctccagcatcaacgtcatcatcactagcttgatcct

SEQ ID NO: 36514 - DNA, 245 bp, Setaria italica
  Peptide Sequence Number=SeqID_102488
gtgaaacattaagcacacttagatttgctcaacgtgcaaaagctatcaaaaacaatgctgtagttaatgaagaaaaagttgaggatgtaaatgcgctgcgtgagcaaatcaggcagttgaaggatgaacttcaccggatgaagtctaatggaggcttagatggaaaacaatggcagtagtgccactggatggaaccctaggcgctagtttgcatctgctagaaaatgagtcgttgggtccgtcct

SEQ ID NO: 36515 - DNA, 369 bp, Setaria italica
  Peptide Sequence Number=SeqID_102489
cacttcttcatcttgtcattcagatgcctccactcgatgcgctgcacctcatcgatgctgagccgctcgacaccgagcacgttgaggcactcttcaagcaggtcgcggcggatggcacagtacacctgcgcgagctcgctggcgtaccccgcgcgcaccatccggtccgcgatggcgcgcagctcgtccacggcctccgggcgcacgaggtcgaacacctggtcgtcgaaggggttgttccccgcgatgccggcgctgcgggcggtgtccggcccagcgccgccgtcctggctgtgcggggtggctgggtcgaactcggaggaggtgtcgaggtcgtccatggatccgagtcgagaggtcggtcgtcta

SEQ ID NO: 36516 - DNA, 346 bp, Setaria italica
  Peptide Sequence Number=SeqID_102490
ccactatcattgaagaaattacacgcgtgtttgaatcttcaatccactgctggagagatggacagttgggttacacgcgtgtttgatcttgatgaatccgctgctggagtgatggccagttggggacgtcagaaatcttggtgactcgtcagaaatcaggagtagacgggtagcagtctttcaacggcaccggcctccggcaaactacgaagatgcaaacgaaacgaaaaaaaagaaggtaaaatcaacaaaaaaaatcagcatgtatgatttatgagtcagaagtagctggttaagatctcatctttcgtgaagaaatcaatgggaatccgattgattttcttcg

SEQ ID NO: 36517 - DNA, 476 bp, Setaria italica
  misc_feature (476)..(476): n is a, c, g, or t
  Peptide Sequence Number=SeqID_102491
ggggttggtttcacatacacttcctcctctatgaaaccatttaggaaggcacttttcacatccatttggaagagcttaaaacctttagccacagagaaggctagaaggattctaattgcttccaaacgggcaacaggggcaaaggtttcctcataatctatcccctctttttggctaaaaccttgggcaaccaacctcgctttgtttctcacaatcaacccatcctcaccttgtttgtttttgaaaacccattttgttcctataggatggcaatttggaggtggttcaactaaaacccagaccctgtttcgctcaaagttctccaactcctcatgcatggcattaacccaatttgaatcagatagagcatgtccaatatctcggggttcgaaagaggcaacaaatgcagaatgtgcaaagtgtgaaatctgcctagagctgtgcctagtggtgcgttcatgtaagttaccgattan

SEQ ID NO: 36518 - DNA, 603 bp, Setaria italica
  Peptide Sequence Number=SeqID_102492
cgcgccacttcacggaccagtccccggtcatgggctgcggcgacctcatccagtccgtcctcgcgcccccgccacagcagatcgccggcggcggcgccgagaaccatgccgcgtcgtcctcgtacatgggctccatcatggcgcccgtccctgagcaggacaggcagctggtcctcgaccttgctgccacggcggctgacaccctcgccaagatgtgccgcgccggcgagccgctctgggtgcggtgccgcagcggcgcgggctccgaggtcatggtggccgatgagcacgcgcggatgttcagctggccggtcgacagtgggaagcagggcggaggctccccggtcgccggtgccaggaccgagggttcaagggacagcgccgtggttatcatgaacagcatcacgctggtggatgccttcctggatgcaaacaagtggatggagctgttcccttctattgtgtccaaggcaagaactattcaggtcataaaccatggagctgcttctggccatctgggcagtggatctctcctcttgatgcaggcagaggtgcagttcccatctcctctggtgccggcgcgggaggtggtgttcttccgct

SEQ ID NO: 36519 - DNA, 358 bp, Setaria italica
  Peptide Sequence Number=SeqID_102493
tcggtagacgccgacgccgtagaccgaaagaccgaccgaatagacggtacggagactgaacatgcccacggagttgccgtcgcccggccccggcgtcagccccacgggcggagtgccgccggtgctcatcgcggcgttcctgtcgatcggtttcttggccggccggcgagcgagccaagtgagccgctagctgaaacgcggcgaggtgaggcgtcggcgttggtgttggtgaggacaacgatccgtggctgtgctttcgatcgtttggtgcggttttgtttgggtttgaagggagcttggatccgaagctgccaagctggggaggttgcgagtgcgacgtcaacgctttgcatgttgc

SEQ ID NO: 36520 - DNA, 451 bp, Setaria italica
  Peptide Sequence Number=SeqID_102494
ctcgcgttgcttcttcttggccttggggcttggggtttcaccccatcgatctgggcagctgctcgtcgttttgcagtgttggtcatgggcttgaagccgttcttctgaagctccttttccacgtccaccatgtcgcgtggtaactcaatgtcccggaagagctgtttcagatcatcatcaaccttgatcttgttcttaggatcattagggtacacgatgtcctcctgggagtccatgtttgacaacagccaaacttcacctgctgccttcagagcctaaaatgcagcagtaactcaagattaaccgcgtactcgaatataaaaaaatagagtatttagctaggttgcttgtagcatgctaatgaaatcacatatacaagccgatttcttccgcaaactcgttaagacaatgcaatacctacttggaaaggaaatacatgagctcgcagaca

SEQ ID NO: 36521 - DNA, 1682 bp, Setaria italica
  Peptide Sequence Number=SeqID_102495
ttttgtatgtacacatcaacataattataaggtaacgaacctccagtttcttaccattgtagcaggattaagtgttgagattctggaacagctcaggcagatgggcatttgtgagcttggtccgtttcgtgatctcacgctgcttcttcttgggtttagccttcggtttcaccccattgatctgggcggctgctcgtcgtttcgcagtgttggtcatgggcttgatgccgttcttttggagctccttttcaatgtcgaccatatcacgtggtaactcaattccccggaagagctgcttcagatcatcatcaaccttgatctttgcttttggatcattagggtacacaatgtcctcctgggagtccatgtttgacaaaagccaaacttcacctgaagctttcagagcctagaccacagcaaatactcaagattataggtatatgcttaaatataaatagtagaagatttagcttcgccacttgtgattctagcacgctagttgagattgcacctacaaaacataaggttaagcaaactacataaaagaacttcattaggacagacagcacaaccatcatggataggcaatacataagacccctgactaaactaacacatgggttacctttgtggttatagagcacattgcttcttctttttctttttcttttttttgtgaaaatagagcacattgctaacttaacttggagccattattttagcagcatttttgtaaccaagttggatacctttctgaccagtgtcagcatcatgttatgtctggaacaacatcttaagtataagatgaggaaattagtcacctgcagatcttccagtacattggggtatgcatccttgacttccactacagcaagaccttctgggaaccttcttgtcaaaacaagcagttgatcttttcccttcagatcatgcttggacttgtaagagaaacgcctcccatcatagcttactttggggttgttcctcaagctgtcaaagacagctttattaccatggatatcaacataagttgcttcatttatctgctctgcagtaaacgcttgtcttgtcttgtaaagcagttcgatgacaagtttcatttgtgctccaacaggagatttcctaatcgaattaatgtgctgcagcctttctgtatcatttgaaaacttgataggctgtgatggtcttgctggagcggatggagcatttacaggttgggccctgtgctttggttttgaagccgaagcagctatgctcgccaatgatgactggcatctctcctgctgttgcttaaatttggagaggctatccttgaggtccatcttggaggatagtctgtgggcgccggattttagggcctaggcaacggtgaccctcggccacctccttctggcgcagctgcggggacggacggccctccgggtcctggaccttcttccgtcgtgccgcgggaaggggaggacggcgggcggaggaggtcgtcgctccaaggaacggccaaaacggagggggccggacctccggagaaggccggcgagggccggcggccggcaccaggaaggggcggcggccgtaggggacaaaaccctagccgcgcgatacttgagtcgcctgcgggacggaaagaggagaggggagaggggcgacgcgaatggggcgctgcgggacgaccggacgagcgg

SEQ ID NO: 36522 - DNA, 1371 bp, Setaria italica
  Peptide Sequence Number=SeqID_102496
ttttcaactgggcacacgcacatggatcttttatcgtagtgatatacatgaacttgtgatcaatccgccgttcatcaaacatcaatcaagattctcaaagatgtaagcgaagcaaaacagacatattgcatcacaattttgtgaggtgccatagacatgcacagttcccatgctcttcaattaaactagaagttactagcaccaggtatggtatggcatatgaaatcctctttatgtattggaagggaaaggaccccaactctggaggcccgaccaaacttgtgcacagcttacaccgtacagggccataaactgcacacaaaacggttcaatcttgcatgtatacaaaacattgcaataatcagtggttgctttggtgacaaccataacctgattaagtgttgaggttctcgaagagctcgggcagatgggcattcgtgagcttggtccgttttgtgatctcgcgttgcttcttcttggccttgggcttgggtttcaccccatcgatctgggcagctgctcgtcgttttgcagtgttggtcatgggcttgaagccgttcttctgaagctccttttccacgtccaccatgtcgcgtggtaactcaatgtcccggaagagctgtttcagatcatcatcaaccttgatcttgttcttaggatcattagggtacacgatgtcctcctgggagtccatgtttgacaacagccaaacttcacctgctgccttcagagcctgaagatcttccattacagttgggtatgcatccttgatttccactacagcaagaccctctgcgaactttcttatcaaaacaagtagttgatcttttccattaagatcatgcttggacttgtacgagaaacgcctcccatcatactgtattttggggttgttcctcaagctgttaaagacattcttattaccatgaatatcaacataagttgcttcatttatttgctctgcagtaaaagcttgtcttgtcttgtagagcagttcgatgacaagtttcatctgtgctccaacaggggatttcctaatcgaattaatgtgctgaagcctttcagtgtcatttgaaaacttaataggttttgatggcctcgctggaacagatggagcatttatcggttgggccctgtgctttggctttgaggtcaaagctatgctagctaaagatgactggcacctctcctgctgttgtttgaatctggaaaggctatccttgagatccatctaggaagcaggcgccgatcggcgaagacggtgcggcggctggtgccggcgaacttcgccgccgatgacggcgataacgcctccgcttccctcttccagaaacgccggccgcttctcaggtatggtttccttccttaccc

SEQ ID NO: 36523 - DNA, 777 bp, Setaria italica
  Peptide Sequence Number=SeqID_102497
acaaggttaattatggtgcctttatgtcgagttctttcgagaagtcgtaatattgttctgagctcttcttgtttgagtacattggaattaccttcttactatagacttggtaatttgatcaattgtttacccatactggaggctgcttttgcgccaatactcaaaataattttctctgttggaatcaatgatcagaacaagccgctgtggtcattttgcatgaacctatttcatgattttagtaaatcaaaaagtaggcacagagaggatttgtgtactccagtgaattggaatttggttgcccaatcttgcatgcatctcaaggccttgctggattttcagcatatcaaatggttaccatgggacattggttgctttcatttccaactcgacattcttggcacaattctgaatccagaactgtttcaggatatgattcctgaaaagatgctgattgttatggattctgcaacagagatattcaagtttcttctaggaggagttcaaattgaacttaaagaaaagtgttcttatgaacaagttaggctttgcattactgatgtttgcaagtttgtaaagacaaagttgtttctggatcatgtaggaaagcatagtggtaacaagtgtgcaatgttactggaatttggtctccagtttgtggaagttattgtgggggagttggatcattctcttttaaattctgaaaagattgagatatgcttggacatcgaacacatatagaagatccaaatatgccgaatgcactcggaagttctt

SEQ ID NO: 36524 - DNA, 220 bp, Setaria italica
  Peptide Sequence Number=SeqID_102498
gatgagaagaatgaaagaagaatcttggttaacatattcatgtccaactcaggatagacacctggagaaagcttgcggtaaactgtatcttgcagcgctccaatctggaattgaaatcatgggaaagcatgttactgtgatcgggagaagcaaagttgttggattgcctacttccttacttttacagaggcatcatgccactgtcagcgttatccatgcc

SEQ ID NO: 36525 - DNA, 277 bp, Setaria italica
  Peptide Sequence Number=SeqID_102499
cggttcctggtggagttggaccagtgacgattgcaatgcttctcagcaacacacttgattcagcaaaacgggtttatggcctaagtgactgaacccctgaactgtaattttgtcatgcctatcctttgtaaattagttcatcttttcctttcctccttcagtttggttgccatattttcacaactgtaattttagttgtatgagggccgggatgtaccatatttttgctcaataaatattgtacgcttagcattgtacacataaaaaaaaaaaaaaa

SEQ ID NO: 36526 - DNA, 405 bp, Setaria italica
  Peptide Sequence Number=SeqID_102500
actacaaattagtaagttttaattctgtaatatgaggtaaatatgccaacccaagagcactgccaacgccaatgctaatggagaaagaatgaccccacaaataataatggatgatcgagaagaatcactgcctgactgttcatctttaggaacactgtgcagaacgctccctataatcagaatagtacaaagaccaagaagatcttgtagttctcgtgcccaacacagttattaatccaaatgcaatgatggtccatttttagaacacatctcttgcaaacacggcaatggtgtgcccgtggaggtttatagtggcagcatttctggcaatatctcaagtcaccacccttgcgcttgatctcgtggacggtgctctcagcgtcctcgacgtcgggcacgaagccc

SEQ ID NO: 36527 - DNA, 640 bp, Setaria italica
  Peptide Sequence Number=SeqID_102501
ttgccctgtatcgaatactgtaggaccccagaactgaaataagattctcatagacaccaaggtcatatggatgatgatagagatctccacccttttctgccaactacaagttgagtaccatgaaggggttagagcgatgtggttggcagaactgaaataagattctcatagacaccaaggtcatatggatgatgatagagatctccacctttctgccaaccacatcgctctaaccccttcatggtactcaattgtagttttattctgtaatatgaggtaaatatgccaacccaagagcactgccaacgccaatgctaatggagaaagaatgaccccacaaataataatggatgatcgagaagaatcactgcctgactgttcatctttaggaacactgtgcagaacgctccctataatcagaatctgagatcaaaatgaaactttttaatgcgctaaacctcaggaaaaatggatgctagaggaaatcaaagaaactatactaccaatgcataaaaacttgcaactacagcatacagtacaaagaccaagaagatcttgtagttctcgtgcccaacacagttattaatccaaatgcaatgatggtccatttttagaacacatctcttgcaaacacggcaag

SEQ ID NO: 36528 - DNA, 1016 bp, Setaria italica
  misc_feature (23)..(23): n is a, c, g, or t
  Peptide Sequence Number=SeqID_102502
gattgcaccgcgactatcattgntggcaatccattgcggaagacataaggttacatattgctgaagaagttcgtcaaatgaaaagtgtagttggacatgtgcctggtctagctgtcgtattggttggtaatagaagagattctgaatcctatgtgcgatacaaaacaaaaggttgtgaggaagttgggattaaatctttgctggcaaagttgcctggaaattgtacagaagatgaagtgatggattcagtatcaagatttaacgaagatccttctgttcatggcatcctagtacagctacccctaccacagcatatggatgaggaaaggattttgagcgccatcagtctagagaaggatgttgatggtttccatcctttgaatgttggtaatcttgctctcagaagccgaaaacctttgtttttgccctgtgctgcaaaggcttgcattgagttgttgctccaatctggaattgaaatcatgggaaagcatgttactgtgatcgggagaagcaaagttgttggattgcctacttccttacttttacagaggcatcatgccactgtcagcgttatccatgccttcacaacaaatccagaggccattacccgtgaatctgacattgtgatatcagctgctggagtggccaatcttgtaagaggaagctggttaaagcaaggtgcagttgttattgacgtggggacaaatccaattgaggatccaaccagtgattatggttatcgcctaaccggagatgtctgctttgaagaagctgtgaaggtggcctctgctataactccggttcctggtggagttggaccagtgacgattgcaatgcttctcagcaacacacttgattcagcaaaaacgggtttatggcctaagtgactgaacccctgaactaatttacattagttaggaattaagtaaccttaaattaaccttttaagttaaaaatttaaaagttttaacttaaaatttaaactttttaaaccttttaaacctttaaaccttaaa

SEQ ID NO: 36529 - DNA, 1194 bp, Setaria italica
  misc_feature (1)..(87): n is a, c, g, or t
  Peptide Sequence Number=SeqID_102503
nnnnnnnnnnnnnnnnnnnnnnnnnnnnnnnnnnnnnnnnnnnnnnnnnnnnnnnnnnnnnnnnnnnnnnnnnnnnnnnnnnnnnnnagtttcttgcacataacactatacagagatcaagcgcaaagtacaccagatgtcatatcctgaacaaatgtacacaatctgggaaaattgtttttcacgacctttggctacattacatcattacatggctctcaaaaacatgaacattaatgttacaacagaattgcctttactcagtttcttgtaagcacagctactccagattacaaacaaggtacaatgaattttctcatcaaatatgtgaagaatgaaagaagaatcttggttaacatattcatgtccaactcaggatagacacctggagaaagcttgcggtaaactgtatcttgcagcgccccaattcagaatggttcagaacaagctcgtcctagcagctgaacaggaaaccatttcacaaattagcaactacctattgtgaatgtactgctatctttttatcacaatggctgtgtagatattggaatatcataagatgtacggtatcgaaggccatttcctacagtattcgatacagggcaaagccagcagaatatgttagaccccagaactgaaataagattctcatagacaccaaggtcatatggatgatgatagagatctccacccttttctgccaaccacatcgctctaaccccttcatggtactcaattgtagttttattctgtaatatgaggtaaatatgccaacccaagagcactgccaacgccaatgctaatggagaaagaatgaccccacaaataataatggatgatcgagaagaatcactgcctgactgttcatctttaggaacactgtgcagaacgctccctataatcagaatcaatgcataaaaacttgcaactacagcatacagtacaaagaccaagaagatcttgtagttctcgtgcccaacacagttattaatccaaatgcaatgatggtccatttttagaacacatctcttgcaaacacggcaatggtgtgcccgtggaggtttatagtggcagcatttctggcaatatctcaagtcaccacccttgcgcttgatctcgtggacggtgctctcagcgtcctcgacgtcgggcacgaagcccggcggcacgcggcccgggtccctgcgcacggcg

SEQ ID NO: 36530 - DNA, 552 bp, Setaria italica
  Peptide Sequence Number=SeqID_102504
cctgtcgtccaaccagctcagcggcgaggtcccggcggcgctggcaaaccccgccaacgaccagagcttcttgggcaacccgggtctctgcgccgccgcgtcgttggtcgggagcctcaagggcgtgcgctcgtgcggggcccagccaaccgaccatgtctcgccgagcctccgtgcgggcctcctcgccgcgggagtggcgctcgtcgccctcatcgcggcgctcgccgtcttcgtcgtctgcgacatcaggaggcggaagcggcggctcgcgcaggccgaagagccctggaagctcaccccgttccagcccctggacttcggcgaggccgccgtggcgcgcgggctcgccgacgagaacctcatcggcaagggcggctcgggccgcgtgtaccgcgtcgcgtacaccagccggagcagcggcggcgcggggggcactgtggccgtgaagcgcatctggaccggcgggaaggtggacaagggccaggagcgcgcgttcgcggcggaggtggacgtcctcggccacatccgccacagcaacatcgtgaagct

SEQ ID NO: 36531 - DNA, 953 bp, Setaria italica
  misc_feature (916)..(953): n is a, c, g, or t
  Peptide Sequence Number=SeqID_102505
ggagattgctcagcaggcaattgatgcagcacatgtggaggctgttagcgctgtcaatggtgtaggccttgtcaaactaatgggcaggagtacaggacacattgcgcttcatgccactctgagcagccgtgatgttgactgctgcttgattccagaggttgatttctacctggagggcaagggaggtctgtttgagttcctatatgagcggataaagaagaagggcatgctgtcattgtagtcgctgaaggagctggtcaggaattgattccccgtactgatgatcagaagcgtgagcaggatgagtctggcaacattgtgtttcttgatgtaggcccctggctgaaatctgagctgggtagatggtggaagaaagagcatcctgatgaactgttcactgtgaaatacatcgatcctacatacatgattcgagcggttccggcaaatgctaccgataatttgtactgcaccttgctggctcattcggcaatacatggggtcatggctgggtttactggcttcgtgcctggtccgattaatgggacatacagttacataccattggaagacgttgctgtggcgaagaaccctgttgatgtgaatgatcacaaatgggcatgggtcagatcagtcacaaatcagccagatttcctgatatcccaagcataagacctgaagctcagtggtgtcgccaaattgtaaagatcactgatcctccctgcacatgttaaaatggatttctctgatccagttgcttccccggttattttctgttcaataagatggtagatgttgtcccctccagtttgtgtgcttgtggaactcttctgagaatgtaggtagcaagctgtgcatgtacgaatgtttaaattgtcgttcttatgaataactgatgcatgatgaagcttttgttcgnnnnnnnnnnnnnnnnnnnnnnnnnnnnnnnnnnnnnn

SEQ ID NO: 36532 - DNA, 362 bp, Setaria italica
  Peptide Sequence Number=SeqID_102506
aatcattatcatatagttttgttgaagcgatcaacaatgtcttgctcccaaacatcgtcaagtaggatcaacatgctccttccgaccaatgctgtctggagcaagtaacagacatcatcaagatcctttcccacctcctcgttgacagtcatggaaccaatctgcacaaggaacttgcaaatcttcctaaccagacgcttatggtattcgcttctgctcccattacatgctgttctgctgcaccaccgcccgaaactgacctcaattgccccatctacaaagttactaggtggatcagaagctatctgccgagcgagacaagacttcccaatgccggataacccgacgatgaggacaacccg

SEQ ID NO: 36533 - DNA, 515 bp, Setaria italica
  Peptide Sequence Number=SeqID_102507
gataacaacagtggtgctggtgaaaagaaactgcgcaggctgaacgtgcgtgcacgagaaagtatttaatgaacgaagggatgatcctgtctcaaatagcccacgaaaacgtcatgaaacttttgggttattgcttggaaggtgatactccaattttcatatacgagtatcctactaaaggtagtctctctgatattctagatcgccaggaagatttcccactatatctacgcgtgaagattgctgttaagattgcagaagcattagaatacctccattcatcaacaactggtatcattggtcttggtaatgttgcactatccaatatacttctagatgataacttcatgccaaagctctcagatttttccggggcatgcaagctcattcaaggagagcgagactaatgcctgtggaagtgtccttagtagctgctctctatttgttgggttcaacaaaataagaaatgatgtgtacagatttggcgttgttctcttggcactcattaatagtgg

SEQ ID NO: 36534 - DNA, 526 bp, Setaria italica
  Peptide Sequence Number=SeqID_102508
taggacttttaaataacatggcaaccccctaattttatggtactttgcaggttgcaccaaaaacaagtttgcaacagcggttaactgcagatgcagtaaatgctagatgtcacctaatcaactactgataatcacagtaactacagaacgtcactagttagctagtgaacattgcatagagcctagattgtcatggagctacatctatacgatccctagtcccaagatacaaatcacagtcaacgggccataggtgataaggtgaagcacaacagcaaagccaccaaaatgcaggggtcctggtagagtgaagctacaaaacaaagcagaggttactcgtcttggtacattcagagttgttcgtcagttctgggtaatctttgcgttggcttcctgttattttcttccatttccagcatcttccaaagtgcggtggatgctaaagccctttagttcagcctcttgagcttgcctcagacaccttagcagctgcctttccacaaagctcactggtgctaggtaggaa

SEQ ID NO: 36535 - DNA, 234 bp, Setaria italica
  Peptide Sequence Number=SeqID_102509
cagtgcggtgtgacatttggagatttatcgctgaatccatagcgcggagagatgatgcttcaatgctaaagcaattgcaagtttggcagtgccaagtaagagctggagtgaacacggtgtagctagtcttttggattggccctgttccatgagctggcgtgtgtggcaactgcatggttcgtgagctgtgggcacggaagggaaaaaaggtgacctcgttggggctggcaccat

SEQ ID NO: 36536 - DNA, 496 bp, Setaria italica
  Peptide Sequence Number=SeqID_102510
ttgtagctggccgccgaggaggtgttgtcagcggtccccgtcggcgccagcgcgtcggcggcgatcacagctttgacagaaggcagcggcgggtccacgacgtcctgggttccagcaacggcgccggccctgccgccggtgctagcgccccgggggctgccaggtggaccagagcaccgggttgcgctggcaggatcgagtaactcaggttcaggctcatgtcactgcatggactcctgaagtatgaagctgcagtgcagtgcagggtagtcggtgatgagcccgtctgccatcaccgccgaggagtaggtgacgatctcgacggtcgggtcagcgaagtagtcgaagccaaggttcatgaactcgttcttgagcacgccgatgaacacggtgaggttggcggcctgcaggctgccgaccgtgtcggtgaaccgcgtcataaagtacccggtgatctgcgccaccgagctccggttggtattccttctaccccgtt

SEQ ID NO: 36537 - DNA, 279 bp, Setaria italica
  Peptide Sequence Number=SeqID_102511
cccgccgcctcccgctccctcctcgcgctcggcctctcctcccgcaagaacctctgcgtccacccgcaggcgtccgccgccgcggcccgggactccgtcgacaccgcgtgccgccgcctcacggcctcctgggtccgcgagaaggccgcctccgacccggagtccacgccgctgtgcgagttctacgagacgttcgaccgcgccgccgccgccggggacctcgcatccctcatgccgcccggggtgtacaccctcgctgacctccgcgcgctcgggagg

SEQ ID NO: 36538 - DNA, 245 bp, Setaria italica
  Peptide Sequence Number=SeqID_102512
tacctccgggtggttggcatgggcgatggtgatcctgtgcacagtgctggccatcggcgtcatcgtggccggcgttgcggtgttcgccgtgtacatcttcttcaagcccaagatgccgtgcctggtcgtctcggacgcgcacctagtgctgctccagtatgaccagggtggcaccgttcagaacctgcagatgtcaatcaccgtccgggccgagaacaacaactccaaggcggatgccgcctttt

SEQ ID NO: 36539 - DNA, 659 bp, Setaria italica
  Peptide Sequence Number=SeqID_102513
cagtttcatatggacatgatcttgtctcaagaagaggatcatacagcgatgagtggcatgcagatttacttggctgctgttcagagccagctctgtgtatgtctattaatcttatctttgaacaacggagattcgattgtcataactttattcactctgttcagtatttagttcaatgatttcactgttgtattttacatgatattttaagaacacttgttcagccttgtatctagcttgctcctacttgtcctatttataactgctcagtttatgatttactcaatccaggcttggagattattcctatgagtttacgtttcccttgtattcactcgttatgataacataggtttgaagacattgtttttcccctgtggaaccttctcgagaattgcttcagtcgccaaggacagaccaatgtcttctggagaggcttgcaatgatattatggcatactccctgatattatcctgctgctgttatacttgctgtgtaaggagaaagcttcgccaaagttggacattgcgggaggctgctgtgatgacttcctttcacatctgctgtgttgttgctgcgcccttgttcaagaatggcgggaggttgagattcgtggagcttatggtgagtttcctactcaaatgcttctagcaattagt

SEQ ID NO: 36540 - DNA, 1824 bp, Setaria italica
  misc_feature (1759)..(1824): n is a, c, g, or t
  Peptide Sequence Number=SeqID_102514
agaggcgataggaggaatgctgctgctgtgatcttccagatctgcccggtcgcggcgtttctccgcaatcaagaaccgaaagcgaggttcttggaaccatggccggcgggtggatgcaccgtggctagtagaattggccgggtctccctgatcttcgccctgcgcgcgagttaggcgagagaccgagcgactcgtgcgtgaagtgaaggagaagaattcaagatcgcaatggcgtcatgggacaacttaggggagctctccaacatcgcgcagctcacggggctggacgccgtcaagctcatctccctcatcgtcaaggcggcgtccacggcgcggatgcacaagagcaactgccgccgcttcgcgcggcaccttaaactcatcggcggcctgctggagcagctccgggtctccgagctcaggaagtacccggagacgcgcgagccgctggagcagcttgaggacgcgctccggcgcgggtacctgctcgtcaactcgtgccaggaccgctcctacctctacctcctcgccatgggctggaacatcgtctaccagttccgcaaggcgcagagcgagatcgacaactacctccgcctcgtcccgctcatcacgctcgtcgacaatgcccgcattcgggatcggcttgagtacattgagagggaccaatgtgaatattcttttgatgaggaagacaagaaagtgcaagatgctctgttgaatcctgatccttgtacaaatcctacaatagtgctcaagaagactctgtcatgttcctatccaaacttgcctttcaatgaagccctcaagaaggagagtgagaagctccaggtggagcttcaaagatcacaaagccacatggatctgggctcatgtgaggttattcagcacctgcttggagtaacaaaaactgtggcatgtaccattccagaggaagaaacaaatgcaaaagtttctgaaaaggattcaaattacaaggaatccaaaggagatgttgcaaaatcgtatgatgatgatgactatcctaagaagcaaaaagatgcctgcagtacacaacgatgttcttcaccagtttcatatggacatgatcttgtctcaagaagaggatcatacagcgatgagtggcatgcagatttacttggctgctgttcagagccagctctgtgtttgaagacattgtttttcccctgtggaaccttctcgagaattgcttcagtcgccaaggacagaccaatgtcttctggagaggcttgcaatgatattatggcatactccctgatattatcctgctgctgttatacttgctgtgtaaggagaaagcttcgccaaaagttggacattgcgggaggctgctgtgatgacttcctttcacatctgctgtgttgttgctgcgcccttgttcaagaatggcgggaggttgagattcgtggagcttatggcgaaaagacgaagactaccccacccccatgtcaatacatggagcactgagcagccatgacaggggacctggacttctgtaaagatattgacaaaatatattctgatatcgtacttccagagtagtgatactgatacgacaatattttctgtgctgtatttatgcttactgtccattgtcctcctggtacttccattccatgatcctgttatatcagtatatgttggggcatagctctgcacagtatgtactttgtaaacataccagtaacaggcctgttagagcctaacatcggttaacgtcgtcagtacttgctttgtcctnnnnnnnnnnnnnnnnnnnnnnnnnnnnnnnnnnnnnnnnnnnnnnnnnnnnnnnnnnnnnnnnnn

SEQ ID NO: 36541 - DNA, 442 bp, Setaria italica
  Peptide Sequence Number=SeqID_102515
tggtgtcagcacatggtgtggaaatcagagctctaaatctgcttgggtgtgaggttgtgatagtgtggatactgacagaattgccactgtacaagatgttttggcacgtgcctggactctccgctgcatcacctgtggatactattttggacaaggaaaattttaagttggaggatcttcttgatgaggatgaaataatccaggagtgcaaagcactaaatacccgcctaatcaattttttgcgggacaaggttcaagtggagcaactccttcgctacattgtagaggaggcacctgaagatgcagaaaagaaaggatatttagatttccgtttatagcttgtgaaatattcacatgcgaagtggatgttatcatgaagacattagtggaggatgaagattcttatgtaattttactttctccttcctcaatctgaccaccc

SEQ ID NO: 36542 - DNA, 416 bp, Setaria italica
  Peptide Sequence Number=SeqID_102516
ccgcgccattgagctccaggaggccgataggcgccagcgccgccgtcctggcgccaggacgccggcgtcgcggcgcccggctgtcggtctacgccgtggcttccgagacgccgcgggccgaggaggcgcatgcgccgtcctgggagggcgcgttcgactggctggaccagtggtacccattcgcccccgtgtgcgacctcgacccgcgcgcgccgcacggcaagacggtgctcgggctcagcgtcgtcgcctggtacgaccgcggcgccggcgagtggcgcgtgttcgacgacgcctgcccgcaccgcctcgcaccgctctccgagggccgcatcgacgacaagggccgccctccagtgcgtgtaccacggctggtgcttcgacggcgccggcgcctgcaagttcactccccacgg

SEQ ID NO: 36543 - DNA, 419 bp, Setaria italica
  misc_feature (397)..(397): n is a, c, g, or t
  misc_feature (408)..(408): n is a, c, g, or t
  Peptide Sequence Number=SeqID_102517
ccagcacggccgcgtcagggttgctgtcgaaaatggactcctgcggtggcggtgacggcggccggcgcttggtggcgaaggggctccagcccgacttcttgttctgctggccgaggctctgcgcgccaccatcggcggcgccaacccccggcgaccgacaaacggcaagcattactagaggaaatcaagagactcctacagaaactatagggggtgatttctgttgtacatagaatgaatcgaatcaaagaaagccagagaaaaagaaagggggagtacatagcaaaatcagcaacccattcaccattcaccattgtgaagaacagattgatgtgtatccagtattgttgaagtgatatgatagaaatcgttagtgaacaaaaaaaaaaaaaaaaanaaaaaaaaaanaaaaaaaaaaa

SEQ ID NO: 36544 - DNA, 888 bp, Setaria italica
  Peptide Sequence Number=SeqID_102518
cgatttctatcatatcacttcaacaatactggatacacatcaatctgttcttcacaatggtgaatggtgaatgggttgctgattttgctatgtatccccctttctttttctctggctttctttgattcgattcattctatgtacaacagaaatcaccccctatagtttctgtaggagtctcttgatttcctctagtaatgcttgccgtttgtcggtcgccgggggttggcgccgccgatggtggcgcgcagagcctcggccagcacggccgcgtcagggttgctgtcgaaaatggactcctgcggtggcggtgacggcggccggcgcttggtggcgaaggggctccagcccgacttcttgttcttctgctctgcactggatccttcaggtttctcagatacgacatagcggaggacatccatgaagaaggccgtccctttgtctgcgaaattcttgacgtagaagctaatcagttgaccggatttcgccctcagatgcagtagcctctgctcaatgtttggttcgtattgcatcactatgggccgaagaaaggtgtcatatacaacatcacttccctttgtttttgggtaccagaggtagacaaagaaagctaacttcatttcggaatacattggcatccaagagatcacgctctcgaaggctataaccatggccacaataatccagtactggcaccagaagcggagcatgtgcgcgtcgttggggcgcgtctcgaccgttttgaagcactcgaacgccggcatcgcgtacccgaagagcagcagcaggatcttcgagaggagctcccccaacatctctccggaccagaaatgcctgcgcgcgcgcgcggcgcctgtgggctacgacggcggagcgaaatcccccggg

SEQ ID NO: 36545 - DNA, 223 bp, Setaria italica
  Peptide Sequence Number=SeqID_102519
tatatgtattgttgctgacccaacaactctggctcctactaagctagtagctcagcaagttcatgatgatatgagataagagaactaatggacttagaaacatatgattttgctgtgtattattagctctctcatggttatcattgtgtgatttcatgaattcatgttgttctatgagatgataatttagtgacatggttcttgagccttgatgagcttgttg

SEQ ID NO: 36546 - DNA, 1123 bp, Setaria italica
  Peptide Sequence Number=SeqID_102520
ccgccccctgcctagtctcccccctcccctcacgcctggactggactgaagccgggggggaggagaggaaaaatactcccccagggccgcgggcagtcgccggtctcgccggccttctcagaccacccgcattgcgcttccccgccccagctataagtagtcgccggacaaggcggccgactcatcccatcccatctcatctcatctcatccatcccggagcagaggcaatccaaggaaaaggcgcttcttttccctgttgggagcagagttgcaggagaagcgtttgggaggcttcttgttctttcctgggtccagtggtggcagctgctgctgcggaggtgaagattcgagcttcgaggtgttcttgggggggaagagtgaggatggcattcgcggtctccgacgagattctgggcacattcgtgccgattgcggtgtactggctctactcggggctgtacgttgtgcttgacgggctgggcatggacgactaccggctccaccccaagggggaggaggtcaggaacattgtttccaagtggacagtcgtcaggggcgtcctcgtccagcaggcgttccaaatcgccgtctcacagttccactctcatcaccttggtgatgagagtggaactgtgaggaagcaaccttccgctctggtaatagctttgcaatttatcatcgcaatgttcgtcatggacacatggcaatacttcatgcacagatacatgcacattaacaaattcctgtacaagcacgtccactccaagcatcacactcttgttgtcccttacgcctttggagctctctacaaccacccgctggagggactcatcctggacaccatcgggggtgcgctctcgttcctcatctccggtatgaccccaaggacaggcatattcttcttctccttcgcgaccatcaagaccgtcgatgaccactgcgggctctggctacccgggaacatcctccatctcttcttcagcaacaacagcgcttaccatgatatccaccaccagctctatggcaacaagtacaacttctcgcagcccttcttcgtcatgtgggacaagatcctcggaacatacatgccttacactctcgagacccgcaagggaggcggg

SEQ ID NO: 36547 - DNA, 453 bp, Setaria italica
  misc_feature (22)..(22): n is a, c, g, or t
  Peptide Sequence Number=SeqID_102521
caacaatgaagtgtttggatanctttaacattcgaacagcttgtacaactctccccgcacttcaggaaggccatgtgattggatatagaaagatgctcccctcagaatgctgtttggacaagtttatggagctttgtttatttaagcatgggttagatacaaactatgattaccatgtagcagtcaaacttacttatggagcttcattggaaacaaaatggtggccttcttcattagttctccaaggtccagggcttcaaccagccttaaaatctgtaagagtatcaaaggcaatgtctgccttgcaatcctttgtagaattattgaaagcttggagtttctttggccataataaactaataattaaggaacaggttctactgaactgctcttcaactctgcctacttgggataaggctgcaagtaacctgacattacacagttcaaaaaata

SEQ ID NO: 36548 - DNA, 279 bp, Setaria italica
  Peptide Sequence Number=SeqID_102522
ctcgagggcggcagcagcagaagctcaacagttcacaagatggctcttcatgtaaagttattaactttaaccgcagtctatctttacctcagctgtcagaagaaagacacccatagcagtccgatcatcttgccatttgaaacacaatcactggagaaatcatcagctgtcacatcagtgcttctaagcatggcccctgaaatagtcagtagcatgaatgaagctttgccaaacacagagatggaacagcttgaaccatcctatggatacacagatgat

SEQ ID NO: 36549 - DNA, 294 bp, Setaria italica
  Peptide Sequence Number=SeqID_102523
ggtgcaccaactctatagaaactatactacatggatgcttaagaaaaaattttttgttgctaaattaaatcttcgctattcgaaaagattgagttaggatattagatcacgggatcactgaactttatgtgtaccttaatcatctttaagtgttattgagtttcaggttattcctgtacagctgctgagattagttcacaggatcactgaactttattgagtcccttcatcatctttaagcttattgagtttcaggttattcctgtacagctgctgccctgtaggattgaagag

SEQ ID NO: 36550 - DNA, 2860 bp, Setaria italica
  misc_feature (2792)..(2860): n is a, c, g, or t
  Peptide Sequence Number=SeqID_102524
cgcggagcgcgcgcgggccgccgacgccgctggcgtggccgataccatctatgacatggtcgccgccgggcgctcccgtcgtctgccctccttccacggccttgtcgccgcgcacgtcctcgccggcgacgccgaaggagccatgcaatctcttagaagggaactaagttctggagtacgacctctacaagaaacttttgtggccctggtccgtatttttgccaagaagggtctttctaccaggggcatggagattcttgctgctatggagagatataagtatgatattcgcaaggcttggctaattcttgtagaggaactagtcaagaatcgctatctggaggatgccaatacagtatttctcaaaggggcaaaaggtggcttacgaggaactgatgaaatttacgatcttctgattgaagaagattgcaaagccggagatcactccaatgctctgacagtcgcataccaaatggaggcttttggaagaatggcaaccacattccattttaattgccttctcagtgtgcaggctacttgtggaattcctgaagttgcttttgcaacatttgaaaacatggaatatggaggtgaagattatatgaaacctgatactgagtcgtataactgggttatacaagcatttactagagcatcttcttatgacagggcaggggatgtggcagaattactagggatgatggtggaagaccacaaacgtattcagcctaatgcacgaacttacgccctattagtggaatgcttcacaaagtattgcatggttaatgaatcaatcaggcatttccgtgccttacggcgaattcctggaggaacaaaagttctttacaatgaaggaaattgcggtgacccactttctctctatctacgatcgttgtgccttgatggaagacctgttgagttgcttgaggcattggaggcaatggctaatgacaaccagagtatcgcgcctagagcaatgatcttaaacagaaagtaccgcacattggtaagctcctggatagaaccattacaagaagaagctgatgttggtttcgaaattgattatgtggccagatatattgaagaaggaggtcttacaggagagcgcaaacgttgggtgcctcgtagaggaaaaactcctctagatccagatgaatttggatttgcctattcaaatccaatagaaacatcttttaaacagagatgctttgaggaactgaagttatatcatcgcagactcctaattacatttaggaatgaaggtcctggtattctgggtgatgtatctgaagacgatgtacgcagagttgttgaaagattgaaaaagttagttgtagggccaaagaagaatgttgctaagcccaaggctgcaagcaaaatggtagtatctgagttgaaaactgagcttgaagctcaaggattgcctactgatggaaccagacaagtactttaccaacgagttcaaaaagctaggagaatcaatcgttcacgtggtataccactttgggttcctcctgtagaagatgaggaagaggttgatgaagggttagatgagttgatctcaagaatcaagctagaagatgggaacacggagttttggaaacgtcgttttctgggagagactcgaaactatctttgtgaagaagatagtaatgaagatgatcaagatttagatgatgaattggatgatgacgacgacgatgaagatgacgacgaatccacaaaagaagcagaagaagatgagatagatgatgaagaggctgttgagcaaactgaaaaccaagccggtgatgagactaaagataaacaagcaaaaggacccaatcagcatcttcaaatgataggggttcagttattgaaagatctagaaaagacgtctgtttcttcaaagaaatcaaagaggatgcccgagattgacgatgatgaagattggtttcctgaagatccaattgaagcctttaaggttatgcaagacgagaggatgtttgatgtatcagacatgtataccaccgcagatgcctggggatggacatgggaaagagaaataaagaataagatgccacgtaagtggtcacaagaatgggaggttgagttagctatcaagatcatgcataaggtaatagagctgggtggtactccgacaattggtgattgcgccattatattgcgtgctgctatgagagcaccactcccatctgcttttataccaatattgcaaacaacacacagtctaggttataagtttggaagcccactctacgatgaagtagtcctgttgtgccttgatctggaggaaattgatgcagccattgcagttgttgcggaaatggagacgaacggaatcaaggtgcctgacgaaaccttggacaaggtgcttgcatccaaacagtctggaaactctgcactcccaccgccaacagaggagtaatctgtttggacctgggaacctttctcagccctcgcgtcgcctgatctgacacaagacaatcacttggcgccataccatgcaaagcctttagcttccctgggggaaaaacatcttgtatggcaatctatcaacgctgtatttctgtaacgtcaggtagaggaaatgtgaagttgatagttgatgcctggcatagtagcatgccatggcatccttcattagtctggctcacttgaatatttatatgaaatatgagaaaagctcgagttatttaaatggtgaaatgcaatagaatgggttcatttcttttaacatgttaagagttgtgctgtatttctaacaaatctcatcgatccaattctgaatnnnnnnnnnnnnnnnnnnnnnnnnnnnnnnnnnnnnnnnnnnnnnnnnnnnnnnnnnnnnnnnnnnnnn

SEQ ID NO: 36551 - DNA, 742 bp, Setaria italica
  misc_feature (713)..(713): n is a, c, g, or t
  Peptide Sequence Number=SeqID_102525
tgctggttgtgattgggaaggacgggagtggcatgaagaaagttgtggtgggcggcggctggtgctggaactggtggaggagggggccgggcggctgcgcaccgagaagagagggagaccatagcatagcagcttgcagcagcagcaggagggagggaggagagagagagagagagaacagagcagaggcacaaggcaggcaagggcacgcggtgctcctgcttgcccccacccctcctccctgctctatactctcgcacgccccccgtcccccaccccatcagaagcgccgcgccaagaactcctcctagccataagccatcccgggttgcgctgcgctgctccccagatctcgccgccagattatgtgggattaggtagatgagggcggcgctgttcggtgccgagcggagcggggcagcagacctcgtcggcggcgggaaggtgctgttttggccggaggggaaggcgagagcgctggtggagccgagatccgtgctggactgcacgctgagccacagccccaacaactccaaatcgacgctgtcgtcgtccctgggcggcggcgccgcggactcgaccggcgtggcggcggtttcggacagcagcgcctccgccgccaccgaagccaccaaatggggatcccctggtgagcacggcggcggcgggaaggaggactgggccggcggctgcgagctgccgccgatccccgntgggctcgacatggggctcgtcggcggcg

SEQ ID NO: 36552 - DNA, 2179 bp, Setaria italica
  Peptide Sequence Number=SeqID_102526
taggaaacacatattaatcctgtaccacagacacattttataggttaattataccctctcctcacaagcagtgtttcaaatgacatgagaatgcctgaagtgagcagagagcaagcacggtaaaaacctagagcaacatcattacactagagacactggcaccaacatcgctaaacccactagttctagctaataagctgcaaagagaatcaacatgaagtgttcaacaccaagatattagttttctttgcaacaattaattgcaagacaaaatacacattactggagttgaagatgccagcgaatggtgaaacgtcggtgagcacgggcgcggattgctgatcagcaccgccatgctgatacggtgacaagttcgccgcgctgccaatagagtgtgagcccaaccccacatttctccacatggaagccacggacctgcacccgcttcaggaggcagtcagcctgtgcgtccgccaggttgctgggaggaacaggcgcaaacccaccagctgcaaatgcactcctccatgccattggcttgtccgccttgccccgcccaagcaccatgtcctcaattcttggctgaatcagaaacttctcgatcttgaaagcagaatcaggatcaatgccggcagcatcaagtgaatcaaggaggaacacacaagactgaaagcaattcaagaagtgctgcgagaatggaaggtcagcacgatcgccgccatggtctatggcaatcacaatcttaggacctagctgtttcaccaaccgaaggatcgctggcaacggtggtgcacgagcagagcaaccaacagggaggacaacagctacaacttcatcgcctgtggtagaaatgagctccgcaggattgatcgtatcagcactgacagcattgaactcaaaggggattccaaggtctgcagcaaactgtgcgatgttatcccgggtaagacgcagctccagtggatggtgcgaagcagttgatacaaaggcagtgagcttaacgaacggcagagctgcaccacctgcgccgcggcggtgtgcaagctcctgcaagaaggaagcccactggcctccaacaccgagatcaaaatcaatgacatggatgcaggcagctgtgctgccggcaatttcgtcaagaagcgcctgcgttgcggtgaagttggtgaactggagcacgggcgagaggtcagagaaagacttgtatgccgctagcttgagggcaacatcgagtggtgatgtgaggcggcaggcgccgtggtggccttcggcgagcgcgaggaggagggcctccttgaggtaggaggcggagcggaggaacggcttcccgagcgggggaagctggtgattgagccgcgccaatatctctcgcgcgccaacggaattgccggcttcggcggcctttgccgccgcggccagctcgtccagcaactgctgctgcgccgcctccgcagccgtcgtcttcatcgctccgtggggcggtggcggcgaaggctggagctggaatggagcagggccatgcagtggtggaaaggggagaccctgcgccgccgcggccgcccggtttctggcgagatagaggtcgtcccccatggattgatggcgtttgggcggtggctggaggagtggggactgctggttgtgattggggaaggacgggagtggcatgaagaaagttgtggtgggcggcggctggtgctggaactggtggaggagggggccgggcggctgcgcaccgagaagagggggctttgtgtcgataccttcgtggaacagcaccggaggcgggggcggctggagggaggcggactccgtcgagaagaggccgaaggctgaggacgccttgctgcccccgccgctgttggtagtgtgcgacaccgcacccggggacgacatgtcggaggcgacgccgccgaggtggggatcgagcgagaagcccggggggtccgcggccgggaacccgaaccccgcattgtcaaggagcggctgctggtgcacgggaagcggcggccccggctgatccaggtcgccggcggccccaatgatccagttcaggaaggtctggtcctgccccgcggcggcggcgttgccgagcacggcgtcccagttgtcgccgccgacgagccccatgtcgaggccagcggggatcggcggcagctcgcagccgccggcccagtcctcc

SEQ ID NO: 36553 - DNA, 288 bp, Setaria italica
  Peptide Sequence Number=SeqID_102527
gcgagacgaggaatcgccgccgacgccgacgctccggatcgatcagattgagccgtcggggtgggactcggatcccgcgcctcagcagcatccgcctgtcgagcccaccggatgggactcggatccgcccccgccgccgccggcgcagcagcagccggcgccggcgccggcggaaaagccgaggatgtcgtgggcggacatggcgcaggaggacgagctcgccgcggcggcggaggaggacgcggcggccacagcggccgacgacggggaggaggggggcgaggttgg

SEQ ID NO: 36554 - DNA, 893 bp, Setaria italica
  Peptide Sequence Number=SeqID_102528
tcttggacaccccggtttacaagagtcagcaagtggtaatgaagtggcccctgcatctgaaagctcctcctatttcactggcagaggtgctggaaaaccaggattcatctcgtttcaaggaaacagcttccaaaagacagctgtggagggtgtgccacatcctggcaaggaagcatctagattagtatggtttattggtcccactatccttgtgtcattcttggttcttccatctctttacttgcgcaaggtactctcagccatgtttgaggattccttgctgacagactttcttatactattctttaccgaggctttgttttatggaggagtagcaatttttgtcttcttgattgataaagtctggagacctttgcagcaagtagcaccgaagagttacatttggtcaaaatccagatttttccgcatttcctcagtaactacaatggttttgagcttgataataccacttttaacaatgggcatggtgtggccctggaccggaccagcagcatcagcgactcttgccccttatttagttggacttgttgtacagtttgcattcgaacagtatgcacggcatcggaaatcaccttcttggccagttattcctattatcttcaaggtgtacaggcttcaccagctgaatcgggcagctcagctggtgacggcactcacattttctgtcagaggaacagagacaacaaaccaaactctggctatcatgaactcattaggagcattactgactgttcttcaaattcttggcgttatttgtgtatggtctctctcaagctttctgatgaggtttcttccctcttcagacattccagatccctgacttattgcagctttggtagaaccttaaaacatggggatagcttccctattag

SEQ ID NO: 36555 - DNA, 335 bp, Setaria italica
  Peptide Sequence Number=SeqID_102529
cttgtctgggggatgctgttggtggactcggcgccgtcggggagcccgtcgacgcgcggcagcggcagcgccacgaagtcgacgcccagcgccggcgggaggcgggcgacgttgcccggcgtggagaccaaggtcgcgcggtggccccgcgacgccaggcgctcggcgagctccaggtgcgggagcaggtgtccgaacgcgagccacgggaagagcacgacgcgcagcggccgctgcggcggcccggcagccatggcctgcgagcgtgccgaggacgtcggctttgccgctgctgcctagctgagaatcagcataggatttgtggttttgtggtg

SEQ ID NO: 36556 - DNA, 276 bp, Setaria italica
  Peptide Sequence Number=SeqID_102530
ctacgagaatttgtgaaaaaacaactactaatcgtcttgtcgttaatttgcttggttaatcatcaaaacactaaccagcaccggcaccggcaggaaggcatcgagagatttgctaggcgatcgattgcggggcacgcagtggagcactagccgcagcgggagccgggagcaccactggcacgagcacgatcatcaccggtggcagtggcagcactactcgatcgccttctcctcctcctcctcatccgcctacgttcgttccttaggttaacttaa

SEQ ID NO: 36557 - DNA, 417 bp, Setaria italica
  Peptide Sequence Number=SeqID_102531
caagatggaccagatcaaggcggagatgaaggatgggttgctcaaggtcaccgtgcccaagatcaaggtcgaggaccgcaaggacgtgttccaggtgatggtcgagtaggggaggggatggaacccggtcagtccagatctcgtagttcagtagtagcagcgcgcaagaactagtagtaatttagtggagtagttgatgccgatggagaaggttgcgaacgagagggagacgtgttttttggtggtggtgattgtctcgcgcctgaagatgtctgaggcagcccggtttgcctttcagttcgtcctgttttggtttcgtgatggtggcgactcctgatgatcttgctatgaacttctcatgagtaatggcgtaagggcatctatctgtgttcctgtgcttgagttcttgtgaattct

SEQ ID NO: 36558 - DNA, 1003 bp, Setaria italica
  Peptide Sequence Number=SeqID_102532
atttgcttcgtttcttataagttaaagcaaatattgaactgttgttagacattagatcactcacctaacatgtcggcacgcgaccaagcttgcatacacataagtgcttctaccattgatggtgcaagcctactacgatgtggactaataattctatcactagtactaaagaccaacttagatgccactgttgtcacaggaattgcaaggatatcacgtgcaatctttcttaaaataggatattttagccctccaacttttcaccattgtatgacatccaactcttgtgtcctaggcagcacctcctcctccaagtacaaatccaactctgtgcgcacataagtggtgcatacatgtggcttttttgacatgtaatcatcaaaaacctccatccaatcttcaactactgagtcaacaggaacactagtttgcctagtttgagcaccatcagttgtggcaacactctccatggaatcttggtattccaaaaccaaattgtacagcaaatctttcactttatggacagcatccgtagctatactttcagactcatgaatctttatgaaaaaaacattcaataggtgtagtttatacctaggatctaggacagcaacaacagctatcaaaccatgcacatctaaccaatatttgttaaatttgtccttttattttagtagacatttcttctaccttggggaaagaactcatttgccacttcctaatagcaatataatttttggtgattttgggaaagaaaaggtttgccgtgacatagctagtgcctgacagtagctcagttatatcatagaacatctttaatctatcacaaagatctttagcaaactgccaatcttcttgtattggtacacatggagcatgagcagcaaggcgttcaaaaacatcttggtacaacaatgcagtgctaagtattatataagtggagttccatctaattttacaatcaagtgctattcttttttaatatttatctttcatttgtatt

SEQ ID NO: 36559 - DNA, 365 bp, Setaria italica
  Peptide Sequence Number=SeqID_102533
gcgtgctcggcttcccccgcccgcccggccgacccatctgtgtttaccgggtccagtctccgccccgaatcttttccctcctcgcgctccgctgcagcaccaccgccacccactcgccccacgcctccgtgctcgcgcgtgcagcgtgtcggggggcggaccaatactacgggggatagattgagatgtgaccggggctcggctgtcggtccgaggtttcggttgccgttggaccgtggtgcggggaggaggcaagctggcagggacatggggaggctcggaggaggaagaggaggaggagggggaggtctgggcagctgcggcggcggctgtgctctcctcgccgccgccttggtatctccgcg

SEQ ID NO: 36560 - DNA, 409 bp, Setaria italica
  Peptide Sequence Number=SeqID_102534
tgttaaaactagggtaaaacaggtgcatttaatctttgatctcctattggacattgaatcatgtattccattagaagactatgaacacaacaacaaattgttcctgagcaatattgcaaatgatttacttcgcctgggtccgcgatgtaaagggagatatgtacctttggcttctttgacaaagcgattgggtgccaaatctcttctaagattgaaaccaaacctgctttcagaaacagcttatgcatacatagaggatgatgtttgttgtgctgcgacaacatttctaaaatccttcctggagacattaagagatgaatgctggaatgatgacggtgtcgatcaagggtacgatgccttcagagttttgaatttccggatacaagtccccgcatcaaaggaggcaagc

SEQ ID NO: 36561 - DNA, 195 bp, Setaria italica
  Peptide Sequence Number=SeqID_102535
agatgctacaggatggcataaaccaatcaataataataagtggtgaaagcggagcaggaaaagcttcaatcatgcatacacatgagggtcgtccttggtcttttgcttgtactgcatgattcgaagcttttccatagagtggaacctcttttaatgggatgctacaggatggcataaaccaatcaataataataa

SEQ ID NO: 36562 - DNA, 329 bp, Setaria italica
  Peptide Sequence Number=SeqID_102536
tttgttgcgactggcctttgactccctttcattctgcaagcacttgtatttcctcctggctaggcacccacgcatcactgcagaaacataagaaaaaattgatgagatagatacactaatctggggcaatataatgataatggaccctcttttatcgcatggattacctgactgaagaagaacgatatgtttcagttgatcattaaacatggtagcggcgagtcgacgcctagtgtacttctgtatgagaacagctgccctccatctattgacaagattatcaaagtgtattcttgctctttcaccacgtataaatgactgcaaagtca

SEQ ID NO: 36563 - DNA, 326 bp, Setaria italica
  Peptide Sequence Number=SeqID_102537
cgggtctgctcatcgcgcttctttatcgtctcgagcaagacctcaagggagctcttctgtgtggctgcggcaggtgccatcacggcggccgcagagagcatcaccaccaggaaatcagcaagccaccagcccaaaccggtgacttacaccaaggttcagataccgaaacacagaatccaacagccgaattgcacaggggccagaaatttccccattccgcatcaaaacagcgataacttcagaggcaagagccccctaactcaccaagggctcaaaagtggcaaccccccaaaacccaaatcccacacacagactcaaaattcctc

SEQ ID NO: 36564 - DNA, 507 bp, Setaria italica
  Peptide Sequence Number=SeqID_102538
gcgacgtgaagccggaggaacctgctcctggacgagcgcggcgacctcaagctcactgacttcgggctctgcgccttcgccgaccgccagctcggcgccgacggcctcacggcgacggcctgcgggtcccctgcctacgtcgctccggagatcctcctcaagaggcgctacgacccaggcaaggccgacgtctggtcatgcggcgtcgtgctcttctcgctcacggccgggtacctgccgttcaacgacggcaacatcatgggcatgtaccggaagatctgctcggggaggttccggtgccccaagtggttctccttggagctccggtcgctgatcgggaggatgctggatcgggaacccaatacacgcatcaagattggtgagatcttagaccacccttggttacgcaaagacggcatgtcatttgttatcacggcaactacgagctcttctcatccgactccagaggtggtgaaatgggaggcggaatcagagctagcaagggag

SEQ ID NO: 36565 - DNA, 269 bp, Setaria italica
  Peptide Sequence Number=SeqID_102539
ggatctcgccgccgtcggcgtgccgttccccgtctgcgacgaggccgccgcccaggtgcaatgcgctgccgccgcgggtcgtcgtcgtagtcacggccgcgggtcagagcgggaaaggtacactcggcactggatcaccgtccgcccgaccttgaaccccggcaccacagtgaacccgacggcgagctgcccctgcccgcccggagccggcgccaccgtcccgccgccgccgtccgcgtcgctggcgctctccatgaaccacctccgag

SEQ ID NO: 36566 - DNA, 456 bp, Setaria italica
  Peptide Sequence Number=SeqID_102540
taaattaccctaagttaaattggaatgcggtcaaaggatgcatccgaaggcatacttggaagaaggcatccagattctgcgtaaaaccacaagaccaatcactaccaaggaataaatcgatttcttttcagtacagctcaatgcattggatgatgtgaagtctaatgtagtaagtttgagcataaaattgtaaaaagctaggaagtattgcagaattgatctgtcagctaggtaggcaaaatataaacctacaaagccagattacagaagcaatttctcaatgaaaacaaggtactcaataatagatgtgcttagaatttcagcttctacatgcagttccattatataaattccaggtgaatcctagtcatcatttccaattccaaatagtagttcctgttcttgcttctacttctaagagagcataatagtaatttaacccctggacaaaaaact

SEQ ID NO: 36567 - DNA, 1791 bp, Setaria italica
  misc_feature (1)..(4): n is a, c, g, or t
  Peptide Sequence Number=SeqID_102541
nnnnggtgcaccaatatgatcaattgaacaatatgaatgttaaccaatgctgaaagaacccgttccctcctgccaaatcgccatgcactttggattcaccaccccctctttctcactatacaaaacaaatataaattattgctatcattatattatatgccttacaacaaattacactaatatatagctaccaggagattacaaaaacacaaaacacttgtgaacctacaacactttgatgcgaccaccagatcgcaaaaactcaagctcttcaccaacacttccagttagctctcctgaatgaatctcaataattgccaaactggactgcactaaacttgcaccacgagcaccagaacaagggagaccagagaaacaagcaggcttagcttcaggttcttgtggttcacaccattttgtgccgatgtcgcagcaggtcgctctggaatattgacagatttattgcacgatgaggatggtgcttgcatggaagatggccatggggccgcaatgttatcattcagatcacatgtgaagctaatcccagaaatgcggtcaaaggatgcatccgaaggcatacttggaagaaggcatccagattcttgagatccaacttgaagtgaaaaatcctttagtgttatttgacaagagctatagacattcgtgctgacattcatcttttgcaactttgccccaaggaaagaagcacaatttaaagcttgcaaatttgttatgaagctttgcttttgcaaatgggctacataacttaacatagccttgcaacatgtagtaccgttcttgattattccaccacactcttttgccaccttactagtgtctggaaagcttagcgggcaaactccgttgacattgcagttagatatctgcctcagcatttgctttgcggacggtgggtcaagcctgctcgacaaccatctgagaacaacgttcctgcaactatcaattttcaggctcccagtgtagctcgtcaaacctccatccttggacgagattttctgggcagcctcgtttatagcactctgacatgtctgactgcagcattcgttaacagggtcaatctttcgacaggcctcaaggagcttggacgagtcaatgacactctcaaatgcatccacagtgctgacaggacatgatccctcggtgacattcgagaggtgaaccgagcaaaggctgtggaggttatcgctggcaccttggctcagcagcagctcctggacatccgacaggcagtagttggcgacggtgggatccaacgcgagagaccctgtctgcttgctagactgccctatgaggatggtcagtgttgcctgaagctgggggcagcaaatgacattggccaagaaaggagcaaacgaggtgaagcagtcgacagctgtggtggtcatcagcttatcgacagcggtaaagttcaatgtgcatttccctgagagcttgggcgtgctgttgttaaagaagggcgcgagcggagcaggagccaggaagggaacaaatggcttcggtgagccgctgggggagagctcgggcatgggcatgaggccgctgggcgggagctccggcatgaggccgccgtcattttcgcctgcgtgaacgatccggtgaagcggcaggtggctctgagcaaatgcagtgcctgaatcacgcaatagaccctgcaaacagaggacagagagggcggctaccgcgaggagccgcccggccggggccatagggtaccgcggcagcagcgggcggcggcggcggcggatgggtggaggcggaggagaagggaag

SEQ ID NO: 36568 - DNA, 509 bp, Setaria italica
  Peptide Sequence Number=SeqID_102542
ggataaataggagaaccacgtgaagaaggcaccgcattgaaaagttccggatggtggaatttacaagtatttgcatatttacactgtcctgtttttaaataatatgcacactccttttcgttcgggcggagtggatatcctaatgtgtttagctgcaccttcctgcaattccagccttttccctgggatggtgaaatttgcatgttgggccaaacttgcatgttccggtcttcagataatactgacattctggctgtcccactctctcaggatattctcccttcattctggcagaggcaatagccagattcctatccggagggtgattgaacctgcagctcatgccaaatctacacaatccagtcctgaggtagtaagtgcagtccggttcacccggccgctcaggatatggcccaggttgcatagtggcaccgctgttcatggccatctgttgccacatcccctctccatagagcgcggaggggtcgggggaggacgtgtcggcggcg

SEQ ID NO: 36569 - DNA, 674 bp, Setaria italica
  misc_feature (672)..(672): n is a, c, g, or t
  Peptide Sequence Number=SeqID_102543
taatatgcacactccttttcgttcgggcggagtggatatcctaatgtgtttagctgcacccttcctgcaattccagccttttccctgggatggtgaaatttgcatgttgggccaaacttgcatgttccggtcttcagataatactacatgaaaaatgttcagaaattttcagcttcgatcttgcacaaagtataacctaaagattgtacgatcaaacacaaatacccagggaaatgtcaagactaacagaaatacccaaatgactaaagtatgagtacaatcacaatccagattatcgttcagaaatctgaagactatgcctcagttccattctagctgcatgaataactaagggaccagaacattgatctcttctgatcttgtctataactatatgaatcttttagctacattgatattcttgtctctgcttcttttttaattgaaagtgtatgaaccagctaagcaatttcttaaaatcatcctacaagaaaaacagaacagatttggtcagtgaccacataggtagtgattggtaggctgcactagttgctagccatgctaactttaacccaggccaattttgaccaggctaaatcaatgcaaaggtagctcgtgttttggtttggtggctaaagatagcctggtttgctatgctcatgtttggttggntg

SEQ ID NO: 36570 - DNA, 1235 bp, Setaria italica
  Peptide Sequence Number=SeqID_102544
cagattgctgtaattactcccaaagatctggattaacaaaaaaaaagggctgtacatctccggtagcaactcaatttacagaacttgattccggcggggagttaggagaaacattcacagcgcctgagacgacgcggtggattttatacatcacaaggtaggtcaacagaaaaaaaaaggcgtctaggatgcgtatccagaaccagatggggatcccagaaggcgccgagccataggtacattagttgaagcggatgcaggagaagctgatgctgagaaaccataagcgtagactcccattggagcggtcattggatggtcgaacttacagttggctccaaacttgcagatgccataacgtgaatagaatttgcagagttcttcacctggacgaattggaagacccattggacttaagacacaatctggaggcggcagtgatctcaccctgggatgatggaacttgcacactgcaccaaatttacaatctcctgtcttcatgtaatattggcattctggttgatcaggtctctcaggaaatacattctctctctgcagcgcatattgaggcacaggaaacgaactagatctgtagggtgataacattccctggtttcctgcgctaggttccccttgttgagaggttccataggtttgttgagcccctggtgactgcagttgaccaggatatgaattccagcttggcacttgaacaagaccctgaggtacaatcattggtgcataatttgaaggactttgccatctggggcttgggatataagaagctcgtggaaaagcccaacttgccatagttccagtataggattgcggaccagcacttgcagaggaatgtacagaaggataaataggagaaccacgtgaagaaggcaccgcattgaaaagttccggatggtggaatttacaagtatttgcatatttacactgtcctgtttttaaataatatgcacactccttttcgttcgggcggagtggatatcctaatgtgtttagctgcacccttcctgcaattccagccttttccctgggatggtgaaatttgcatgttgggccaaacttgcatgttccggtcttcagataatacacccatatctctccctcttctctcatctgccccgtcctcgcttccacctagacgtgccccgccaccgctgacaggctcctcggtgccccatcccctacctccatcatcacctccttcccacttctcctcctcc

SEQ ID NO: 36571 - DNA, 778 bp, Setaria italica
  Peptide Sequence Number=SeqID_102545
aacaataaaaataaagttaagtagttaaaaactagttaaatgctggtcgaacaatgtgatcacatttacttggacagcacgccatcttgacagttggtttcaaggatctgaacatatggtcagggaggaatatgctgtgctcctactggagttaaattgcaagatcctgaaggccttcttggacttcttgaagagcagaccaaaagctgctaggttgtccttcatcagtaacaaggcctttatacttgtttctaatccaatcctgtgagcacattagagcctccagcattggagaagtcagcctgctgcgatgctcactaagaactcgcccactagtggtaaatgcagattctgaagcaactgtggttataggaattgcaaaaatatcccttgctatcaatctcaaagtaggatagagcgttcctgccactttccaccaatctaaaatatcaaagtcctttgtatgtatgtccaccgagagagtgaagaatactgcggctggacttcttggagagagcttcagcttccttagagtgcaagcgccggtgctttggatcaacgcccttggccgcagttggtcggggtcgaggaagtcgcttcgggtcaccggccacgattagctttggtggacgatggtcgtggagccttcttcttctctggtggtggtggcttcttcttctcaggaggaggtggagcatcgacttgaagattggatccggcagcagcgacgacgaccggccgccgccggatccaacgaagacaagcaaggccgttgtcg

SEQ ID NO: 36572 - DNA, 552 bp, Setaria italica
  Peptide Sequence Number=SeqID_102546
tagttagtgttaaactgttaatgctggtcgaacaatgtgatcacatttacttggacagcacgccatcttgacagttggtttcaataatatgaatatggtcagggaggaatctgctgactgctgtgctcctagcctcctactggagttaaattgcaagatcctgaaggccttcttgaacttcttgaagaacggaccaaaaactagcaggttgtccttcatgagtaacaaggcctttatacttgtttctaatccaatcttgtgagcacattagagcctccagcatttgagaagtgagcctgctgcgatgctcactaagaactcacccactagtgctaaatgctgattctgaagcaactgtggttataggaattgcaaatatatctcttgctatcaatctcaaagtaggatagcgtgttcctgccactttccaccaatctaaaatatcaaagtcctttgtaagtatgtccaccatctcatcctccaagtagcgatccaactcagatctgaatcttatggcggctggctttgtacttgcaacacgggcactaaagg

SEQ ID NO: 36573 - DNA, 1182 bp, Setaria italica
  misc_feature (1)..(96): n is a, c, g, or t
  Peptide Sequence Number=SeqID_102547
nnnnnnnnnnnnnnnnnnnnnnnnnnnnnnnnnnnnnnnnnnnnnnnnnnnnnnnnnnnnnnnnnnnnnnnnnnnnnnnnnnnnnnnnnnnnnnnnaccctaatcaccatcattccattagtccattcaccagttcgagacttccggttcaccacacagacatttacattagataacagcagttctagagttctagtcatccactgaccaacaacaattcaacttagtatcaagttcatggcagcagcagcaaaagcaagatagtagtagtgttatcacacatcattcgttacaaccaaagcttacataaatagttagtgttaaactgttaatgctggtcgaacaatgtgatcacatttacttggacagcacgccatcttgacagttggtttcaaggatctgaacatatggtcagggaggaatctgctgtgctcctactggagttaaattgcaagatcctgaaggccttcttggacttcttgaagagcagaccaaaagctgctaggttgtccttcatcagtaacaaggcctttatacttgtttctaatccaatcctgtgagcacattagagcctccagcattggagaagtcagcctgctgcgatgctcactaagaactcgcccactagtggtaaatgcagattctgaagccgagagagtgaagaatactgcggctggacttcttggagagagcttcagcttccttagagtgcaagcgccggtgctttggatcaacgcccttggccgcagttggtcggggtcgaggaagtcgcttcgggtcaccggccacgattagctttggtggacgatggtcgtggagccttcttcttctctggtggtggtggcttcttcttctcaggaggaggtggagcatcgacttgaagattggatccggcagcagcgacgacaacggccttgcttgtcttcgttggatccggcggcggccggtcgtcgtcccttgatgagggacgtcgaggtcagtagaaaaacgctgagctcgaggacaggaggaggaagaagggattcaccggctgccaatggtggatcccgtagcctccatggacaccgaatctctcactctctcagttcctcaccgacacagtggattgggatgactaggggagaggtgaggggcgaactggagaagaagtgacggcggcagcgcagccgcaagggagttggg

SEQ ID NO: 36574 - DNA, 576 bp, Setaria italica
  Peptide Sequence Number=SeqID_102548
cagtggtgatcaagactctgttgtgcccttgctgggcagccgaacccttgtgcgagagctagctcacaccatggggttacctgttacagttccctacagtacttggttccgcaaaggccaggtataccttttgttctatcactatattttattgcacttatacaaattagctgatattgtataaaatcatgattctaaagaaaatataagttaactgaccatggaactatctatatctatttgaattcaaggttggaggctgggtgacagattatggcaattttctgaccttcgcaacagtgcggggtgcatcccacatggtgccattcgcacagccggaccgggctctcgggctatttcgatcaatcatacttggacaaagactaccaaacacaacaaatccacccattgactaattgtacctatgaaagaagcaaaagatagaatcgagtagcataggttttctgttttgctacagtagagtagttcgtaaagactaccaaacacaacaaatccacccattgactaattgtacctatgaaagaagcaaaagatagaatcgagtagcataggttt

SEQ ID NO: 36575 - DNA, 1647 bp, Setaria italica
  misc_feature (1644)..(1644): n is a, c, g, or t
  Peptide Sequence Number=SeqID_102549
cgtccaccggacaactcacctcctctcctccctcccagttccgctggctcctgcaagagtaacaatggcggcggcttcctggagggaccttgctctggcaatggcggccgtgggctgggttcttggcggttgtcttgtgtgggcgttcccggcggaggatttggtggccaggctgccggggcagccgccggtgacgttcaggcagttcgccgggtacgtcgacgtcgatgtcaaggccggccggagcctcttctactacttcgccgaggcgcaggaggacgccgccgccaagcctctcacgctgtggctgaacggaggtcccggctgttcttcgattggaggtggtgctttcacagaactaggtccattttatcctagaggagacggcaggggtctcagattgaacaaaaagtcatggaacaaagcgtccaatctattgtttgtcgaatcaccagctggagttggatggtcttactcaaacacttcatcagactacaacactggcgacgtgcggactgcggatgacatgtacagatttttgctgggatggtacaaaaattcccagagtacagatcaagagccttgtttcttactggagagagctatgcagggcattacataccacaacttaccgatgtactacttacacataatgagaaatcaaagggtttcaagttcaatatcaagggtgttgctattgggaatccgcttctgaagcttgatagggatgtccctgcaacctatgagtatttctggtctcatggcatgatctctgatgaaatatttctagcgatcagccacagttgtgattttgaggattacaccttcaatgacccccataatgagagcaagtcatgtaacgatgccatatctgaagcaaacactatagttgggcagtacgtcaacaactacgatgttattctcgatgtctgctacccatcaattgtgatgcaggagctacggctgcgaaaatatgcaacgaaaatcagcgtgggagtggatgtttgcatgacctatgagaggtttttctatttcaatcttccagaagtgcagcaggctctgcatgctaataggacacatttgaagtatcaatggggcatgtgcagtgatgtcctaaactacagcaatacggatggcaacatcaacatcttgcctatccttcaaagaattgtggagcacaaaataccactttgggtgttcagtggtgatcaagactctgttgtgcccttgctgggcagccgaacccttgtgcgagagctagctcacaccatggggttacctgttacagttccctacagtacttggttccgcaaaggccaggttggaggctgggtgacagagtatggcaattttctgaccttcgcaacagtgcggggtgcatcccacatggtgccattcgcacagccggaccgggctctcgggctatttcgatcaatcatacttggacaaagactaccaaacacaacaaatccacccattgactaattgtacctatgaaagaagcaaaagatagaatcgagtagcataggttttctgttttgctacagtagagtagttcgtaaagatgtgttgggtgctttaataagttctttattgttctaaggggcaaaaagtacattccaagtattaaaaaaaaaaaacaanaga

SEQ ID NO: 36576 - DNA, 411 bp, Setaria italica
  Peptide Sequence Number=SeqID_102550
gtttcctgctgtgcattgctgccaccagcccaccactcgtccagtcgccatcactctttcgattactaccagctttaccgaaatttttctccttttctgtggtggaaggagaaaaggtacatacccgtctcgcctttctggttatttttggtgtgtacgtgaatggtccagaatcttgaagagacggcggcgctctgatctctgacagcagtattgcaggggcatttgatccaacgcggcggcggcggcagaggacacgatgtcgaagtcgggaacactggatcttgcgtctggccttggagggaagatcgacaaggaggaagtcaagtcagccgtcgatgagtacgagaaataccatggatattatggagggaaggaggaagcaagaaagtccaactacactgatatagg

SEQ ID NO: 36577 - DNA, 515 bp, Setaria italica
  Peptide Sequence Number=SeqID_102551
agagatcgagccatccacacccccgtcgtccgcggctctcatctgctccctccccgcttgctccaaccagtcgcccctcctcgaatccctcctgcactgccgcagggtggatctacccacacggccctgggatagtctcctctccccagtcgcccaccactcgtccagtcgccatcactctttcgattactaccagctttaccgaaatttttctccttttctgtggtggaaggagaaagtattgcaggggcatttgatccaacgcggcggcggcggcagaggacacgatgtcgaagtcgggaacactggatcttgcgtctggccttggagggaagatcgacaaggaggctgagactgcagccgtcgatgagtacgagaaataccatggatattatggagggaaggaggaagcaagaaagtccaactacactgatatggttaataaatattatgatcttgccactagcttctatgaatatggttggggtgaatccttccactttgctcacagatgg

SEQ ID NO: 36578 - DNA, 1845 bp, Setaria italica
  Peptide Sequence Number=SeqID_102552
aatccatcgagatcgagccatccacacccccgtcgtccgcggctctcatctgctccctccccgcttgctccaaccagtcgcccctcctcgaatccctcctgcactgccgcagggtggatctacccacacggccctgggatagtctcctctccccagtcgtattgcaggggcatttgatccaacgcggcggcggcggcagaggacacgatgtcgaagtcgggaacactggatcttgcgtctggccttggagggaagatcgacaaggaggaagtcaagtcagccgtcgatgagtacgagaaataccatggatattatggagggaaggaggaagcaagaaagtccaactacactgatatggttaataaatattatgatcttgccactagcttctatgaatatggttggggtgaatccttccactttgctcacagatggaacggagaatctttacgtgaaagcatcaagcgacatgagcattttcttgccctgcagcttggtttgaaaccaggaatgaaggttttggatgtgggctgcggaataggtgggccactaagagaaattgcaagatttagctcaacttcagttactggattgaataacaatgaataccagattaccaggggaaaggagctcaatcggctggcaggagttagtggaacctgtgattttgtcaaggctgacttcatgaagatgccatttgttgacaacaccttcgatgctgtctatgccattgaggcgacctgtcatgcacctgatcccgttggctgctataaggagatatatcgtgtgttgaagcctggtcaatgctttgctgtatatgagtggtgcattaccgatcattatgatcctaacaatgcaacccacaaaaggatcaaggatgaaattgagcttggcaatggcctgccagatattagaagcacccggcaatgtcttcaggcagtaaaagatgccggttttgaggttgtttgggataaggatcttgctgaagattcccccttgccgtggtacttgcccttggatccaagccgattttccttgagtagcttccgtttgacgtctgttggacgtatggtcactcgcacaatggtcaaggcgttggaatacgttggtcttgctccacaaggcagccagagggtctccaatttcctagagaaggctgcagaaggtcttgtagagggtggcaagaaggaaatcttcacaccaatgtacttctttctggctcggaagcctgaatgagtccctttagagcacatttcagagagaaagcaaggaatcatttcgaggaagctaaatgaaggtgcagaatgaaaaatatgtgatcaagagactggagttcttctctaggaaaagtagtggaatgtgttaactgctgagtatatgtttgttcagttgttttgtttgcgtgagcctcctcggtagggtgcttttgctgttcttggactgacagtttgaatccctttttcttgtcctaagctcagtagcacaaaataagtgcctgtacacgactcctttgattgatgtagtaaatgttgaattaatttcgggtgatgattaacctccccagtcggtaagcaaccccttctcctcgctgaaatcgattgccccttgatcgaatgccagttaaattttccatttttttgggttctgtcacatcgcgccttctttttttgcccaatctgggggaatccgtttgtttcctgctgtgcattgctgccaccagcccaccactcgtccagtcgccatcactctttcgattactaccagctttaccgaaatttttctccttttctgtggtggaaggagaaagtattgcaggggcgacttagttgtcgtacttgtagttct

SEQ ID NO: 36579 - DNA, 249 bp, Setaria italica
  Peptide Sequence Number=SeqID_102553
taattcaggcgactaattagtttttgaaattgcttcagaaaccatgtctttacttgctgtcattagcttagcaaaagctgattgcaaactggattttacttcgctacccccatcatattccttcatactcatcagcttgccagtatcctcatgcccaactagcccttcaacttcaggtacagtcctcaggacatccttgagctcctcaatgcccgcaaagccgcaaagcgcccggaactcggtgatggc

SEQ ID NO: 36580 - DNA, 493 bp, Setaria italica
  Peptide Sequence Number=SeqID_102554
caagattaggaccttaacagataaagagcagctggttttgtcactggagaaacaatatcaagaggatgttggtgttctagcagcacttttctttaactatgtcaaacttagtcctggggaagcactttatattggtgcaaatgaacctcatgcctacctctctggggaatgcattgaatgtatggcaacttcagacaatgttgtccgtgctggtttgactcctaaatacagagatgtgcaaactctctgctcaatgctaacatacaaacaggccttcccggaaatattgcgaggggttcctgtccagccacacgtaaggcgctacacccctccatttgatgagtttgaggtcgattgctgcttggtacctccaggtgaactggtggtcatagccccggtgccaggcccatctatgtttctcatcatgatgggtgaaggtgagctccagatagattctctgtctgctggggaaaaggcaaaggatggtgatgtt

SEQ ID NO: 36581 - DNA, 352 bp, Setaria italica
  Peptide Sequence Number=SeqID_102555
caattccacgtcaggatctcagtcaaggtgctgctgcattcctataaagccgctgcacaacgcttaagacctcaagcacattgacgttgtcgccggtgccgagaagcagctgggactcggtcggcatccgcccagatgcgcagcaaccgctacatcaagttcaataagggcccgacaatcgtttacaccactgagtcaaggcctacacgaactaaaaattttgatcactataagccgagaccagagggcgtgatgatggcggatgctggcagcaagagcgggcgtggtgctctggtcatcttggaagggctggaccggagtggcaaatcgtcacagtgtgctcggctgctat

SEQ ID NO: 36582 - DNA, 371 bp, Setaria italica
  Peptide Sequence Number=SeqID_102556
aagcagtccataatgtaaattttgattatttattttgacagtgctcagggccacaatatatgctatttttgtgaaccagttctcgaatggatcccaatatcacttcacatttgtgtttttgaaggttgttgacggttcccttcccatggagaccgttgaagaacagctgagagaactagctacgaactgcattcaaaagtgtcaagagaagccacttaccaatctgacttggtgaagcgccaccatttggcgaagaaacgcacagctcagcacaagctgatgcataccttggtgtgatccacctttgttggtgctgaagaaaactaaagacaatactaagacaaagtaacgtaacttttaactaaatttaa

SEQ ID NO: 36583 - DNA, 575 bp, Setaria italica
  Peptide Sequence Number=SeqID_102557
tcttcagcgcaaaccgctgggagaagagagctttgatggaaagcaagctactcggtggaactactctcattgtagaccgttattctttattccggagtggcgttctcagctgctaaagggcttgacattcaatggtgcaaggctccagatgttggacttatagctccagatcttgtaatttatctggatgtacaaccagaggtattctgtttatactcactcggtctatggtgttccatcatgaaggtgttctagatttttcagttttattgtgcttatggtgtgtaatgcatttgacttgtgttacattatttacacactgtaggatgatggccattgttcggccttaaccaatcaaaataatctttacatatagaactcggtgatgaactgatgatgatgcacttaaggtcgcactgtattgatttctgtcttgaaacgctaaaatcaatacatttattctaaagccttttgctgctgagaactttttgtcagtaaattttctttgccccaccacctataatgctatataccagcctgtatgctaaattgattttcgatgttatgtgtcatct

SEQ ID NO: 36584 - DNA, 1257 bp, Setaria italica
  misc_feature (1222)..(1222): n is a, c, g, or t
  Peptide Sequence Number=SeqID_102558
gcactcgcttctcctagttactgaaaatcatgtagctcaggttcaggaaatatgcatgaagtcagatcagatgtaatctgccgtcatttggatctgatggttctgcacgtatgatgcgtgctgatgtgcaatgccggccttggaaatagatttcccctgagacgtgtctccgggtgcctttgtgaactagaagatttcagtacctgcaatctttctttgttgaaggagtggcaaagcggcggcgccctctggtctcggcttatttgcaacgcgtcggagggcgtttcagggcgtgaggatggcggatgctggcagcaagagcgggcgtggtgctctggtcgtcttggaagggctggaccggagtggcaaatcgtcacagtgtgctcggctgctgtcctatctggaaggccaaggttgccgtgctgaagggtggcggttccctgataggggcacttgtgttgggcagatgatctctgcctacctggcaaatgagtcgcagcttgatgacagaacgattcatctgctcttcagcgcaaaccgctgggagaagagagctttgatggaaagcaagctactcggtggaactactctcattgtagaccgttattcttattccggagtggcgttctcagctgctaaagggcttgacattcaatggtgcaaggctccagatgttggacttatagctccagatcttgtaatttatctggatgtacaaccagagaaagcggctgaaagagggggctatggaggtgagcgatatgaaaagattgaattccaaaagagagttgcagatcattatcattcactccgtgattcaacatggaaggttgttgacggttcccttcccatggagaccgttgaagaacacctgagagaactggctacgaactgcattcaagagtgtcaagagaagccacttaccaatctgacttggtgaagcgccaccattcggcgaagaaacgcacagctcagcacaagctgatacataccttcttgcacgttgtgtgatccaccattgctggtgctgagaaactaagcatctagcagcgctttcatttgccatttgctgtatcaatgccccgagtgcgatatacattttgacatttaattggtgcttttagataagcttatttgtcagtttatccgttggagttcgggttgggttgtgatgcagaacacgcgaggatacgaaacacgactttcaagattttgctggacngaacaaatttttgtaaaagcatgcgtcatcactcg

SEQ ID NO: 36585 - DNA, 595 bp, Setaria italica
  Peptide Sequence Number=SeqID_102559
tttcgttaagtttgtttctttaacttagttcgtttcttacgttagttaatttccgtttgttcttgtccgtccgtccgcctcatcgtgtagtcttggatcacggcgccaagcgcgaaattcggcgcgagctcacggtgcgcggtcacgggggacgcgtcgttccttccgtcgagccagcctctgatggcgccggcctcgtacgtgaacccgtccgctgcaacgtgagggtccctcatgggctcctgaaggatggggcagaggaagtaggaagggacgcactcttcgtcgtacggtgactgtatgaccgacgacggcgagaatgcggtcagcttgctttggctgagcagggcctgcagttctctgccaccagcgtcaagatcagtctgtatgcggacatgctccttttgtggttcagtgtcttgaccagctgttccgaggacgtcatccatgccgaggatgcgccattcgaaggtcaattcctctgacattgcctcttggagttcgtcagggaatgtgttctgctcatccatgggcaggtggtttgcttgttttaactgagcgatttcccagtttgctcttgcagagcctcttcaag

SEQ ID NO: 36586 - DNA, 172 bp, Setaria italica
  Peptide Sequence Number=SeqID_102560
ctggatctctgcccagatgaaccgtgtccgcaacgcctgctttctatgaggctttcggtctgactgtggttgaggccatgacctgcggtctgcccacattcgctaccgcctacggtggtccagctgagatcatcgtgcacggcgtgtccggctaccacattgacccgtacca

SEQ ID NO: 36587 - DNA, 387 bp, Setaria italica
  Peptide Sequence Number=SeqID_102561
gtgaaggccatgtgggactcatactggccaacagtgtccttgtttccagcaatctcttggaaggtactggtaataatgaagtcagcgtggttcatggcaatcaagtcagtggtgaattggcacgagaagtggtagtggtcctcgaacttcttccagtagaggtcagagttagggtacttagttttctcaagtgcatgggcaatggtacagtgagtaacacccatcttgtgggcaagcaaacaagcaacaaggttgccatacctggagacttacaccgatgatgtggcgcacgagattgctggagagctccaggccaatcctgacctgatcattggaaactacagtgatggaaaccttgttgcttgtttgcttgcccacaagatgggt

SEQ ID NO: 36588 - DNA, 267 bp, Setaria italica
  Peptide Sequence Number=SeqID_102562
gttctggaagtacgtgtccaacctggagaggcgcgagacccggcggtacctggagatgctgtacgcgctcaagtaccgcaccatggccagcacggtgccgttggccgtggagggagagccctccagcaagtgatgcggcggccggggcctgaaagaagggagcacttgaagtcgtcttttcctgggttccttccttatttctgaggccaaaagaagaagagtttggcctcagaaataagggagcacttgaagtcgtcttttcctggg

SEQ ID NO: 36589 - DNA, 444 bp, Setaria italica
  Peptide Sequence Number=SeqID_102563
gatcattgctgagtacaacagcgctatccctgaggctgaggcgcgagaagctgaaggatggtgccttcgaggatgtcctgagggcagctcaggtttgcatcagattcagacctcacttgactgcattgttccttttggtgggtgctcctgctctaatctacgttgtgttatcttacaggaagcaattgttattcccccatgggttgcacttgccatccgccccaggcctggtgtctgggagtatgtgagggtcaatgtcagcgagctcgctgttgaggagctgagagtccctgagtacctgcagttcaaggaacagcttgtggaagaagggtataaatttgcgcttaaacttggaatttgtatataagctgatcatgcttgatttttttgaaaaaggttcagctcatatatgataagtttataatactttgatgtatatatttc

SEQ ID NO: 36590 - DNA, 548 bp, Setaria italica
  Peptide Sequence Number=SeqID_102564
tggttgtccagcttgtcggcggtgacgacgtcctgcaccaccgtggggtcgttggtgaagttggggttcgccgggcactgctgcttgagcgcggtggcgaggcccgggtccatgtcggagggcggcgtggagatgcggtcggagaaggaggagcagtgggagcggccgatggtgtgggatccggagagcacgacgaggtcgtcgatgttcatgcccttgacttggaagctggtgatgagctgcgagaggttgaagaatggcgggggcaggaaggcgagcgactcgctctcgagcgacacgctgccgtcaaatcgccccgcggggagcctgtagtcgactttaaatccactgaggaagaaagcggcgtcgcgggcggcgtactggacgacgtcggcgcaggagacgacgccggggcagtacctctcgagcgcggccttggcggcgtcaatgacctcgaagccacgcaggctcgggaagttgggcgggccgagcttctccgggcgcgggttcgccggctccgtgctgctcgacccgacgccggcgaaccc

SEQ ID NO: 36591 - DNA, 549 bp, Setaria italica
  Peptide Sequence Number=SeqID_102565
cgtcggaggagctggagacgcgcccgtcgaggcggccggcgggcatgtcgatcttcatgttgaacccgctgaggaagtaggcggcgtcgcgggcggcgaaggcgacgatgtccgcgcaggagacgacgccggggcaggccttctcgacggcgtccttggccgcgtcgatcacctcgaagccgcgcagactggggaagttgggcgggctcagcttctccggctgcgggttcgccggcgttgggtccaggaggacggagccgtcacatccctcaacgaagcagtcgtggaagagcatgcggatgaggccggcgccgatgccggcgttcttgtagacgaacttcttcacctcgtctctcacgatgtgctccacgcgcgggcacgtcttcttgtagtagcccacatgcaagccctgacacgccgtcgccagcaacagggcgcatgtcaccgccacggcgagcctgaacgaagcagccattgtgtgtccttatttggctgctctcttctactttgctctgagcctttgtgtatttgagtgcgggagctaagagc

SEQ ID NO: 36592 - DNA, 1080 bp, Setaria italica
  Peptide Sequence Number=SeqID_102566
ttggtttgtagtcttgttacggtccggtaactaagtcggtcttgtctaggtagtttggtttaacctttgttggtttgttcttgtcggtgaccacggcaacccgtccaaggacaaggaggagcaggctgagttcaagaagatgtttgaccttatcgagcagtacaacctgaacgggcacatccgctggatctctgcccagatgaaccgtgtccgcaacggtgagctctaccgctacatttgcgacacccagggtgctttcgtgcagcctgctttctatgaggctttcggtctgactgtggttgaggccatgacctgcggtctgcccacattcgctaccgcctacggtggtccagctgagatcatcgtgcacggcgtgtccggctaccacattgacccgtaccagggcgacaaggcctcggcgctgcttgtggacttctttgagaagtgcaaggaggactccagccactggagcaagatctcgcagggtgggctccagcgtatcgaggagaagtatgcatcttatttctagcacactgatctctgtatttccatggcaatgtttctcacttgctaatgttgttattccaccaattctgttgatccagatacacctggaagctctactcggagaggctgatgaccctgaccggcgtgtacgggttctggaagtacgtgtccaacctggagaggcgcgagacccggcggtacctggagatgctgtacgcgctcaagtaccgcaccatggccagcacggtgccgttggccgtggagggagagccctccagcaagtgatgcggcggccggggcctgaaagaagggagcacttgaagtcgtcttttcctgggttccttccttatttctgaggccaaaagaagaagagtttggttttcctaggcgggcatcaagaatcaaggtcttccattgatgtgggcgttgctgctagttttgagttgatttggtagttggggatgcatggggtgtgtgtgtgcagtcggtcatgggtgctcccttgtttcctggatggatggatgttgctccttcaataaacgcaccggccttggttgcccgttttctaaaagg

SEQ ID NO: 36593 - DNA, 597 bp, Setaria italica
  Peptide Sequence Number=SeqID_102567
caccaaagatccttatcgtcaccaggttgctccctgatgcaaactggcaccacctgtggccagcgtcttgacaaggtccttggcactgagcactgccatatccttcgtgtgccattcagaactgagaatggaattgttcgcaagtggatctcgcgtttcgaagtctggccatacctggagacttacaccgatgatgtggcgcacgagattgctggagagctccaggccaatcctgacctgatcattggaaactacagtgatggaaaccttgttgcttgtttgcttgcccacaagatgggtgttactcactgtaccattgcccatgcacttgagaaaactaagtaccctaactctgacctctactggaagaagttcgaggaccactaccacttctcgtgccaattcaccactgacttgattgccatgaaccacgctgacttcattattaccagtaccttccaagagattgctggaaacaaggacactgttggccagtatgagtcccacatggccttcacaatgcctggtctgtaccgtgttgtccacggtattgatgtgtgtgactcggtgtaagggaagtagatggacatgtccgca

SEQ ID NO: 36594 - DNA, 1317 bp, Setaria italica
  Peptide Sequence Number=SeqID_102568
aaacaaatgtaaataaagatgctagctgcaacatgagcggttaattattaactgcaagtggtaacttgtgggagtcgtcgtgcaacgttgtgtcgtcgtagctagttgacgacacggcagttcttcctgatctcgccattggcggcgttcttgatctcgatgagcgacatcttcaccatggccctggcgaacttcctctcccagctcccgcggacgacggcgttctcgaccaccttcctcgccgtctccctcgacgtcagcagggtcgcgtcggagttgaagagcaccttgcgcctcagcacgttcctgtagtactggttgtcgagcctgttgggggtgacaatgtcctgcaccaccgtggggtcgttggtgatgttagggttcgccgggcactgccccttgaggatggtggcgaggccggggtccatgtcggagggcggcgtggagatacggtcggagaaggaggagcagtgggagcggccgatggagtgggacccggagagcacgacgaggtcgtcgacgtcgaggcccttggcgacgaagctttggacgagctcggagaggttgaaggaggacggtggcaggaaggcgagcgtctcgttctccaaggagatgctgccgtcgaagcgccccgcggggagcctgtagttgaccttgtagccgctgaggaagaaagcggcatcgcgggcggcgaactggacgacgtcggcgcaggagacgacgccggggcagtacctctcgagcagcgccttggccgcgtcgatcacctcgaagccccgcagactggggaagttgggcgggcccagcttctccggccgcgtgttcgccggcgtcgggtcgagcagcacggacccgtcacagccctggacgaagcagtcgtggaaggccatgcggatgaggccggcgccgacgccagggttgttccggatcgccttgccgacgactagcttgacgaggtgctccgccggggggcacgagcgccggtagaagccgaacctgagcggcgtaccagccgcagggggaggaggggtttgcatcggtgggactggagcatacgcggggaccgcggggaccgcgggtggtgctggtgcaccctccggcgccgtgcttggagctgccgcaacttttgcaggatacccgccatagccgtacccacctgcttgagccgtcgcggagcccagcagcgcagccaagatcaggacgccgacgccaagccagctgctcgccatcttctccttagataggtgttccaaccctagacctcctcgtgctcactcgaacaggctatacgctgctagctgctgctgcagtagaaga

SEQ ID NO: 36595 - DNA, 1751 bp, Setaria italica
  Peptide Sequence Number=SeqID_102569
tgcgatactcctgttctcctatcggagaaaggcttgaggacccaagaagaggatagtaatgggggaagctgccggcgaccgtgtcttgagccgcctccacagcgtcagggagcgcatcggcgactccctctccgctcatcccaatgagctcgtcgccgtcttcaccaggctgaaaaaccttggaaagggcatgctgcagccccaccagatcattgctgagtacaacagcgctatccctgaggctgagcgcgagaagctgaaggatggtgccttcgaggatgtcctgagggcagctcaggaagcaattgttattcccccatgggttgcacttgccatccgccccaggcctggtgtctgggagtatgtgagggtcaatgtcagcgagctcgctgttgaggagctgagagtccctgagtacctgcagttcaaggaacagcttgtggaagaaggccccaacaacaactttgttcttgaactggactttgagccattcaatgcgtccttcccccgtccttctctgtccaagtccattggcaatggtgtgcagttcctcaacaggcacctgtcgtcaaagctgttccatgacaaggagagcatgtaccccctgctcaacttccttcgtgcccacaactacaaaggcatgaccatgatgttgaacgacagaatccgcagtctcagtgctctccaaggcgctctgaggaagggctgaggagcatctgtccagccttccagctgataccccatactctgacttccaccacaggttccaggaacttggtctggagaagggttggggtgactgcgctaagcgtgcccaggagactattcacctcctcttggacctgcttgaggcccctgatccgtctaccctggagaagttccttgggacgattcccatggtgttcaatgttgttatcctctcccctcatggttacttcgctcaagctaatgtcttgggttaccctgacactggaggccaggttgtctacattttggatcaagtccgtgctatggagaatgaaatgctgctgaggatcaagcagtgcggtcttgacatcacaccaaaagaataccttaatcgtcaccaggttgctccctgatgcaactggcaccacctgtggccagcgtcttgagaaggtccttggcactgagcactgccatatccttcgtgtgccattcagaactgagaatggaattgttcgcaagtggatctcgcgtttcgaagtctggccatacctggagacttacaccgatgatgtggcgcacgagattgctggagagctccaggccaatcctgacctgatcattggaaactacagtgatggaaaccttgttgcttgtttgcttgcccacaagatgggtgttactcactgtaccattgcccatgcacttgagaaaactagtaccctaactctgacctctactggaagaagttcgaggaccactaccacttctcgtgccaattcaccactgacttgattgccatgaaccacgctgacttcattattaccagtaccttccaagagattgctggaaacaggacactgttggccagtatgagtcccacatggccttcacaatgcctggtctgtaccgtgttgtccacggtattgatgtgtttgacccgaagttcaacattgtctcacctggtgcggacatgtccatctacttcccttacaccgagtcacacaagaggctgacctccctcaatctcagggtggagggaggactagtgcgacttgagtcggaga

SEQ ID NO: 36596 - DNA, 2599 bp, Setaria italica
  Peptide Sequence Number=SeqID_102570
ttttttttttttttttttaaggaaagggtttgcaatcaagtatatattcaaccatcatccgaaatgtctccctgcttatctctcgataagacgcgagcgagcataagctgcgactacgttcctgtacgtactggtggctgatagccctgccgcgtgtgccgccgtggcttgtcacttcagttctcactgcacttgtgtgtcaacgacacgtgtagcatgtttgcatcgggtagttcagtcgtcatacgaaatccagataaccaaacaaacagtacctcaactgttggtagtagtaacacaatcaaatcgatgcatggcaagtaaaatgaccttagaattcatggaagctagactagtattattttgccctttcaaacgccaaatccagaagagtacggaaaacttgtggggatacacgggtggttcctctgcgagtgcttggtgaatcaacacggtggatggagtcatcccaggtacagtattcacttctatcagcagaacctccccacttcgcacgttaacaaatgcatcgatgcgtgaaaagccttccaaacctagagagttcgccatcatctcaatactccttttgcacctttgcagagcatcctcactcataattgttgcaggaggtggtgtcaagttgattccagtgccaccttgaaatttctcctcaagagataaaatatcaccactttctttcactgtgatgcttggatttaacgagtgcatttctccacgtttgccaactacaccaacagttatttcaagccagtcgttttcacccttccataccagatggcgggcactaccgttctccaatttatttgaaatgataatttcatcagtttcaataaaaggctcaaatattaatgattctggaggagtaactggcatctcaataaccccatgtgccctggacagacagttagctggcaggcgctgaaacttttccctcaatgcatttgtatagacttctaggtcctttggacagcacaatcttgctacaccagtagagcacccgtcacgagctggtttcacacatactgtctctgtttgtaattttgctttaagttcattccagatatcaacaagagatgacttcagtacctcttccgttgctcttacatccttaggtatggtgtgaactccataactagtcagatggtcaacggcaagtgaagttgcaactttgttcatgcatgttctagaagctaatggtcctggtcctgtgtaaggaactcctgcagattccaacaatgtttgaatggtaccatcctctccaataccaccatgcactgctataaacactacagctccagcttcttttgcatggttgatccactgttgcagtgagtatttgataggttgttcataagcaatgtcaaagcccgcaaaccaatcatgtttgcttaatgctggcccaagttcattcattacttgttcacgcaaacgagaagttatttcaactcgttctggttcagttgcctcaacacatgcagcatgaacttcttcagtggtatgtcgtaacactaatgaatacggcagcatccaaacttcacgtgaaatgtcactgaaatcttggtcatgggaggagaaatatccattagcaggtgcaagaaaacatggtgtcacgtcaagatcatcaaaaccttgcaaattgagccagacattggtgccactcataagtgatacttgccgctctgaagtgtcccctccgaagatcacaaaaaccttctgtctggatgtacctttttggattgattctgcttgttttgatggttgtagttttctggacaaagcggtccgtgcattattgaatggaacaagagaagggaaccgcgagcaagcatgctgaacaactgtacgaaggatttgagagtgagagaatccaaccgctgaagcttgttggaacaaaaagctggtttgctccatcccacttaccaaattaatatccgtgaaaaggatagtgccatacttggtatttccaaatttgccactattttcagctgagggtaaagaagtaactggagaaggtaaaaaccaaccatctatccttgcaaagtcatgcaggccaaggcgacgaaataaaacagaaagcccttgtcttatgcaatcaatcacctctgccggaaaacgtggaggtgtatgataaacaacctgttgagtcggaaggtacttcctgcggtagttgaatattgtatcctccttgctatcactactgctggagtgctgaagctcaacttctgttggaagcagaacaacaggctcactgttgttagcagccccaacatcaaccacgatagctgtaaactcagtgcccccttcaaggaaaacctctacaataactctatcatcaattccctctgaaattatttcctcagctttctgagcagcgtcattcacaccataagcaacaaccacaccaatacttgacccagccctcgtaggtttgacaatcacttttccattttctttgctcaaatttgtggtttggaaccatgcctccagctctcgcttagccaacttgtccttctccacaagaaagtttggcacagttaagaaaccttgtacatcaagctcgagggatgcgctatgcttg

SEQ ID NO: 36597 - DNA, 252 bp, Setaria italica
  Peptide Sequence Number=SeqID_102571
ggcgagggcgccggggccgccgagaaggagaacctcctccccgccggcgcggacgcgcacgacgagctggtggcgctcaacctcgccgcggtggccagggccgcgggcacgccggcagccggcccgctcttcgtgcgcggcaggctctacgacctctactccgcgcgccgcaacgagcgcctcaagcgcaagcacggcttcccctactcctacgaggactccgcgtccgcaaggaggcctacaccgccaggt

SEQ ID NO: 36598 - DNA, 673 bp, Setaria italica
  misc_feature (519)..(519): n is a, c, g, or t
  Peptide Sequence Number=SeqID_102572
ggcgctcagcctcgacgccgcccaacagcaggatcagcagccgagtaagaaggccgccgccgatccgcagcaggatgaccagcagccgcagccgaagaagaagcccgccgccgattcgcaggaggatcagcagccgcagccgaagaagaagcccgctgccgattcgcaggaggatcagcagctgcagccgaagaagcctgccgccgccgccagcagcaccaccaccaacaagaaggacaagaagaagaagaaggatcggcaagtcaccgtggagctccgcttggtggggttcggcaaggaggtgatgctcaagcagcgccgtcagatgcgccgcaagaagtgcatgagcgaggaggagagggccgccgtcctcctcatggcgatgtcgtcgggcgtcatctacgcctcgtgatccatgattccatccatccattccaaggggaggaaggggaggcggcagtgtcttgagttgcagatggaaatatagatcctccactccacctgctctttttttttccngtcctccttcctctcttcctcctccgaggtcaggcatcagtaggtaggtaatctctttgtagtggccatcgaatggatcagtagtgtggacgcgaagctgaacattcaattgaatcaatcctgtgattgatcgatctgtaatgtaatgtaatgc

SEQ ID NO: 36599 - DNA, 848 bp, Setaria italica
  Peptide Sequence Number=SeqID_102573
cgaacgggatgaatgcgtacgggtgcctccttctctcctcatcacaggtgggctcaaaacgttccggtcggaacagctctgggtctgggaaattgttggggtccttagcgaggaccccaagtgctagccacacccatgtaccctttggaaggacataggcaccgatctccacccgctcggaggtctctcgcgccaccaatggcgacaccatgtagaacctcatcgattccttcaggacctgcatgcacaaatggcacatcaacagtgattccaattaggagtgccaacagattcattatcaaaggctaatgacattctcatgcgtgcctgatccaggtaggggaacttggtctgcagatcgtcagccgtgggtacgcggtcgtgtgcgccgaacgcgtcgatctccctgagcagtttctcttccacctcagggtgcttggcgataaggtataccgtacatgacagagtgaaggacgttgtcgccgatccagcgaggaggtgctcgtaggtaagcccgctcaggtagtccggcgtcagcagctcttgcgccgatgcaccgcgctccttcgcggcgagcaccacggacaggaagtccttgtgctgctccgacgccggcgagtgctccctcgctgcaatccggtcggcgaccatgccgtccatctgcctactgagctcgttgttgacgcggtcaatctcccggtcggcggagcccaggtatcctcgtgagcacttgccggaatggctgatgcaggaacggcatgagctggccgacaatgatggagagcgaccccgataggtccatcttgagtgacgttgtcgcttgcaggtgcatcttgatgaactccgat

SEQ ID NO: 36600 - DNA, 587 bp, Setaria italica
  Peptide Sequence Number=SeqID_102574
cctcaagcggttcaagggggacgaggagaagcaggcggatttcgtgcggcggcacgtggcccgactgctcaaggccgacaagctcgccgtgcttggagagctggagcgccaggaggaggtcgatctggctgtgaagatgtttaggataatacaaaaggaggactggtataagccagatatttacatatacaaagacttgattattgcgctagccaagtgcaagaagatggaggaagcaatggtaatctggggaacatgagagatgagaacctgtttccagactcacagacttacgctgaggtcataagaggattcttaagatatggttccccatcagatgcaatgaatatttatgaggacatgaaaaagtcacctgatccaccagaagagttgcctttcagggttttgttgaagggtcttctacctcacccattgctaagaaccagagtgaagcaagattttgaagagttgttcccagagcggcatatctatgatccaccagaagaaattttcggcatgcgctgaggtaatggttgtcatagccacatgaacctgctgagcattaagtgtaatgagatcattcagtt

SEQ ID NO: 36601 - DNA, 327 bp, Setaria italica
  Peptide Sequence Number=SeqID_102575
ctccccagactctttcatttggctcaataggcattgtcgtgatgaaatcatatgcctcacttatacaaccagcgcggccaagaaggtccaccatgcaagtatagtgctctgctttaggagttatgtgatacctggatgtcatagaaccgaagtagcgctttccaacatccaaaagaccagcatggctgcatgctgcgagaacagcaacgaaggcaatagagtcaggttccagaccctgtcctagcatcttctcaaaaagatcaacagcctctcttccatgaccatgcttgccataagcagatatgattgaagtccacgatatcacat

SEQ ID NO: 36602 - DNA, 347 bp, Setaria italica
  Peptide Sequence Number=SeqID_102576
ccctcctctccagaggcgaatcacgcgccgtgtacgaccccgtgtctggccgtgagccactatggcttccgcaaaatagccccctcgaaggcaccttcatttctgaatgtttgttgcaaggccatagcgacgatgcgacatcgttccgtgtggtctccctgcagcatcgtggccgtgaccagatggtgcgagctgccgagtacgactcatgtactcgccagtggcatcgccatcagtgggtgaagaacatcaaaagacctcaacatgaccaggcgatgcactctgataggctcatcttttggagatatgaagacgctttcattgctcttgcttgacatggcaactgt

SEQ ID NO: 36603 - DNA, 453 bp, Setaria italica
  Peptide Sequence Number=SeqID_102577
cgaacgtggccccggacggccacgagaaccggcccttcccggacgccttgcccttccgccactccccctcgtacatgcagccgtccgcccacacgtacttgcccttgccgtgcggcgcgccctgggagaagccgccgcggtagacgtcgccgttctgcagcgtcttctccaccaccgccccctccgccgtctcctcgccgccagcgccgccgacggcgatcatcgccggcgccacccgcctcatccccccgcccccgcgcgcactcacacccgcggcattgcagatcgggagcggctagggtttgcgatttggggctcgggatttatgctccgctccctctcctcccctcttctcccccaagctttcgcctccacttttttcgcttcgatttttttttctcgtgctccgctggctacttggtcgtttgatctgggctacgagtggtgccagta

SEQ ID NO: 36604 - DNA, 440 bp, Setaria italica
  Peptide Sequence Number=SeqID_102578
ggatcagcatggcacacaacagagcaaactcttgacaagagaaatgcccaaatagctaaacgataattctgtcagtgccagttagttgcatctcattgttagcttgtccgtcatataattagtcagaaacatatgctgtttgcaaaagttacaatggctgaatgttgcgacattgggaaacatgcaacattgttgcagaaacgttcaagaactgcaacatctcaaaacagcatggtacacctgcagcaaatcagaacaatgttcgcaaataaaaataaataaataaacttccagcacttacccattttgactagaaatgtcaaccaagttatttctctattatacatcaaacaacgaacagaaagtgtgattcataattctcgtctacttaaattatgtcatcctcaacctgtctttaacttaagacagggttattgttt

SEQ ID NO: 36605 - DNA, 248 bp, Setaria italica
  Peptide Sequence Number=SeqID_102579
ggagggctgatcaaagaggcggttgacatgatcaaaagtatgccatgggagcccaatgaggtcatatggggatcccttctcagtgcgtgcagactgctcaagaatgtggagtatgcagaactggcagtggacgagttgagcaagctgcagccctcgaatgcagggaactatgctgtcctctcaaacatctatgcagaggctgggcagtggagcgacatggcaaaggcgagggtgcagatgaaagaaac

SEQ ID NO: 36606 - DNA, 639 bp, Setaria italica
  Peptide Sequence Number=SeqID_102580
tcctttctactttccaggcatactacctgaaagtacagtatccagttgaaaaggcaaccacagagaagctcacaaccctagtcaatggtgtgagcattgcccagctggtgggttatccagtaagtggttttgtgttcgaaggtggggcgagccttgaggatttgtcatgtatggtttcgaaagtctgcatcttcttgcaagagaacaacagacctttcaatgtccttatctctgaatccggcaggaagagttttcctcctaccacagtgctacgcggagaagcagctcctcggaaaggcaagccaagagttcctcgaaatgagaatcaatcccgcaatctgggagctcagtggccatttggtactgaagaggaagaaggactacgatgaagcctctgagctatacatatgcagatttttggttgaagcagctgtttctgaaacagaattccaacagctgaagcaatgtgtgcttgacttcctgactgcctctgctgcttgtaattcggatatagattcctagagagtggtgactaatgattttgggtactgtattcataactgttacgatggtatatcatacatttgtgacgactgttcatctctgcaatgagaaacacctgtcttctcccaaaaaaaa

SEQ ID NO: 36607 - DNA, 348 bp, Setaria italica
  Peptide Sequence Number=SeqID_102581
tagttgagggtggagacgtgcgtggagaagggcgacccccgcgacgtgatctgcggcgcggcggagaaggccggcgccgacatgctggtgatgggcagccacggctaccgcttcctgcagagagcgctgatggggagcgtcaccaaccaccgcgtacagaattgcaagtgccccgttgtcgtcgtcaagaggcccggcaccaacttgaggccgcgtgcacgatcgagcacgagtcgcctcgatgatgatgatggcccgtgtatatacttcgtctcgttcggtgcttataaaatactataccgtgtgtcatgcaatgaacatctgtgcaagtacatactaaaaaaaaaa

SEQ ID NO: 36608 - DNA, 284 bp, Setaria italica
  Peptide Sequence Number=SeqID_102582
cccgccgcagccggtgcttgagcagctcggccgcggtggcgttcaccgcgaacgcgtcgcggtggaccacgcggaagcgcaccgcggcggcatcctccgctgcggcgagactgccgccgaagacgtcctcgtcgtctgcgccggtcacagccggggcggtgtacgggtggggcgagagcggggtggccacgaagctgtggtactccacggtcttggcgagcgcggcggcattggaagcggcgagcaggaggaggagcagcgccgcgtgaggcgccatggcttgc

SEQ ID NO: 36609 - DNA, 185 bp, Setaria italica
  Peptide Sequence Number=SeqID_102583
gtgagactagtcatcttgttaataccttcaggcaagtcatggagagtaacacaacaacttatgtccaatgtttgaagcctcagttccccaaatgacatgggaagcttcttaagtcttgcacagtatgacaaattgagatgcttcaactcagacattttgcagaatgtactaggcaacgattgaag

SEQ ID NO: 36610 - DNA, 512 bp, Setaria italica
  Peptide Sequence Number=SeqID_102584
tttcgctccgccactacacggccctgctctacgggtggtgccgccagggcaagctcgacgaggccaagcacgtgctcgctcgcatgaaagccgcggatgtcgcactcgacgtcgtcgccttcaacaccctgctcgctggcttcgtcgcggacggaagatttgaggacgcgttcgagctggcgcgggagatggagcggcgtggctgcccgccgaacgcggtgtcgtacacgaccctgatgcaggggcttggcgcgagggggagggtcgatgaggccatgcgggtgtttgtggaaatgcggaggaaggggtgcgcgccggatgccgtcacgtacggcaccctggttagcgcgttttgcagggctggcaagatatcccaggggtacgagttcttggacgccatgtcaagggaaggcctgcgggtggatgccgccgtgtaccatgggttctttgtggtgcatgagaagaaggaacagctggaggaggtagtggaactgatggagaggatgagggag

SEQ ID NO: 36611 - DNA, 479 bp, Setaria italica
  Peptide Sequence Number=SeqID_102585
gcgcgtcatctacctcggcgacggccgcggcgactactgcccgtcgctgcggctggcgcgggaggacttcgtgatgccgcgcagggggttccccgtgtgggacctcatctgcgaggaccccgcgcgggtgcaggccgaggtgcacccctgggccgacggcgccgagatggaggccacgctgctggggctcgtcaggagggtgctcgtcgaggacgccgcggcgctgctgccgctcgactgcaagctcgagtccagcattcccgtcaccgccgcgcaggacggcatgcccatcatgccgctcggcgtcaagaattgatcgagcactcgagaatggtcggaagagattgcacggacgattatcagtagtgtttaacaggagtattgactaatttttgtgtgcggcgtggcgtgttgtatccctggtgatcgagcctgccactgctgaattggctgcggctcattgtatcttacctaccgac

SEQ ID NO: 36612 - DNA, 488 bp, Setaria italica
  Peptide Sequence Number=SeqID_102586
catagccacatgaacctgctgagcattaagtgtaatgagatcattcagttgttccactgactgttttattacctgcatctgaaaaaacaatctcatatacatatgagtttgtctgttgattggatggtgatgttgcaaagcagcaatacatgggcaggatggaaaataaaggatcattctgatttctgatggccagattagttacccatacagttacagatattcaattatccaggcaatcactgggttagttgtccctatctctgcaaattattttggtcagccaacctcataaatattgggccatgtattcacctcaacaaatgcaactcctgcgtggctgcaatgcaggatcttctgggtagtaacagaaaagatttggtcttctttgggtccacttgtatgattaggttgttcgtacaatgtgctgctcacattcatgttgttcattccctaaccacttgtgacacctacttttgatgagcatg

SEQ ID NO: 36613 - DNA, 352 bp, Setaria italica
  Peptide Sequence Number=SeqID_102587
agctctcggtcggtggcgggctggccgcttccttccgtctgccgctttgcttgctcctccaccaccccaaccgcacgcccatcttctccgtccaggcagacccaggtcaagcgatccggtcgcatcttcacgcgcacctcgacctccccgtgcggttcttggtggcgactggtgagggtgtgcgtggcggcggcctcgagttgactcctcgagctcgaggtgtgtgagctccggcacctgctgcggggcgctcgtttcttggcgtcgtgcgcggccgccgttgttgcagcagggtttcgtcccgtcccgtgaggagtggtgagtccgtgggcggggttcgatctgaacaagc

SEQ ID NO: 36614 - DNA, 458 bp, Setaria italica
  Peptide Sequence Number=SeqID_102588
gtggcggccgagtgcgccggcggcgcgagggtcaagaaggaggcggacctcttcctcgtcgacgacctcctggacctgccgtgcgacgaggaggaggaggtgcaggaggcggtggtggaagagggggagggggagggtggtaaggcgggggtttgtggctccggcgccggcggtgaggagggtgccgcggggaacgcgtccaacgactcgtcgactgtgacggtactggatagctgcagcaactccctctccggtctcgccgacggggacttctccggcgggcttgtcgagccgtacgaccaattggcggagctggaatggctgtccaactacatgggcgaggacaacttccccacggaggacctcaagaaactgcagctcatcaccggcatcccgccggcctcctcctccgccgccgccacggcgtccgttcccgctcccgcggccgccgcggcgcc

SEQ ID NO: 36615 - DNA, 319 bp, Setaria italica
  Peptide Sequence Number=SeqID_102589
gtccccgactcgttcgtcatcgactcctcctcgtccctgggggctgggtgggtcgggggcacttcgctgctgggcggcgcgggcgcggctctcgactcgacggcggggttttgctcgctcgctttgtctctcgtgaagtgcgtgaccactgaccaagtacatctgaacctacgtcagtgtgtaaaggcacttggacgcaatggagggtggtgtgaatgtagcagataaggcagaatttaaggagtgcttgcggctgacatggacacaaccttatatcctccagcttgtcctgtctgctggcatcggtggtcttcttttc

SEQ ID NO: 36616 - DNA, 1815 bp, Setaria italica
  Peptide Sequence Number=SeqID_102590
gctgcatgaaagctatctccactgctctgtttcctcttactggaaatgtggatcatctgctacaaccgctcgatcatcccagttcatacggccaccaaaaatattccagataccattgctattctgaaattgagcacacctgtgatttagaacagcatcaccaagaaccttgatgccagcttcgtggaaaatcttcacaagctccttcaactcatccatggtcccatatctggagtttagattatataaatcccttggcatgtatccttcaggtgacacagaatcagtaggcggtggtgaccaaacaatggtaaaaccgagggatgccaactccttggcctttgtaccaagttcaacataccatttccctgacttatgagattcccagttaaatccttggcataatatttcatagccagatccagtgccagaacaagctggcttcgcgattgatgggtcatcgagatctacagacgcctctacggaatcaatggtggggctcctaaaaatgctataagcttctgctgctagcctttcaatttcttgcaggatatcctcctgcagaactttattcttagctctctgacctcttctagaggataggccaaccaccagatttcttatatcactgattataccatcagcttgtgaagacttatcatcaactttctgtggctcaaccttatcaacatcttgggtgcttccacgctgttccgctcttgtaagagaaatgaagaaatcggatccattctccagatttctcagccaagtatactcatcaagtttgagcacaaaaaaacagaccagaatactctgcatctagtaagaatgataaagaattgcctcttccatcagctttttgctgtagcaaggtctgaagagctttctgtcggaagatttttgttgttggtgggtgtggctctggagggatctcccatgtcatgctattgtctttgcaaactccccaatggatgacaacttctccaggaatatcggtgtcaaattccacaagccttttatgtgtttcattatccctcttcacagtaacagttacaaagttctgggtgtactccgatttaataatttggaattcctgatagaacccggaaatatgttttccacttaaacctgtacccccaggtatagtttcttgtggctgagcattagatccttcatgtttcttcaaatggcccaaatctcctggccatacaccaatatcttggtttgttcctaatggaactccaccgtcaaaggatccacttaagggtattctgaaatccctgcccttatgctgaaaccatgcacctgtttcctcttcctttaggacaaaattgatggctgcaattggagtgtctttatcaaatttgatttgcacttcataccggccctctgaattgggtagaatctccaatggtgtttcaattgcatagtccttgattggaacagaaccaggtggtctcatttctgaaggaggctgatcccattcactcccatgctcaccgtcgtaagagacaccccagtgcaatacccacttccccgccacatcgcatccgaccacgaccttgcacttgccgtccccatccggctccgcgtccaccctcacccacgccttcccttccaccgtctggcatcggcgcagggggaacttctcggagaacgccgccccggcgtcctcgccggcgccagccaccggagtctccgcggcgctggctcgggccacgacgcggccgccgaggttagggttacttactaattttacttagtaaaggtaaggtacttagtaattaacccttaaattttaacttaaactttaaa

SEQ ID NO: 36617 - DNA, 1579 bp, Setaria italica
  misc_feature (1)..(9): n is a, c, g, or t
  Peptide Sequence Number=SeqID_102591
nnnnnnnnnctggcacgctgccctaacctgaaagagactacaaccagacgtttctacgatgacacttcaaactggcatacatgcttggcaaatgtgtatgatcttacatagctccaacatagcggaggcatatctgaagtgcagataagcacaacagagctaaatgaatgggcaatgtgcctacataacaggtagttctgtatcatatcaaatgttcgactgtattatatatagcttcgcgtcagcacaatcctttctgtagggcaaatgcttcccgtcgacagtagctcttgctgttgcctctcttgcttgtcagcagcagcagcccatcagcttgaccattccgacgccatttcctagcattatgcgattcaactttctgctagcccatttggaagaagcagattgctctaggaatttcagattcagttcatatgcgaactaaatcctagggatttgggtctaaatctggtccatccaaacattccctatgaggctatgagctatactggatacctgtctagtttttcagaagttagggcagccaagcctatgaagatacttcccaaattttgtaatcttgaccctcggcagcaacaatccagttctggggaccacttggctcaaaatgttccgagccgattttcattgttaacttctcatcgatttcagccgcatataaactcctttctgccttgagtatcttgatcttgctgcggcaatgaatcttttgacgagatcgaatattgataaatttggcgatctctggttgtaagtgcgaaaaaatgtgatcatagaagactgctggagtgccagggtgcgtcaggatgtaggcgtatccttgcaactccataccataggggaatctccaatgaccctgagtagagccagtatcatgattctctataaatgtgacagctcgggaaggccaccagcccaatactccagggggttttcctttttcatcagacaagcgccaatactcagatctttcaagcgccgcatgaagtatccctttggtggtgacatcaaatgcaccggcagttccatttgtagcatttatccaatcaacaatcctctgtctgtgggcatcttgattgtaatccatttcaccataagtgtaactgagggagtcccagtactctcctactgcaaagtatggctcacttgcttccaaataatctttgacatatccaccccaaaaaccacgaacgaagtcgagtctccatccatcatatcctacttcttttctcatccagcaaagccattctttaagatcattcctcacaaactcttgggagtgatcaatgtttggtgctgcatgaaagctatctccactgctcttgtttcctcttccctggaaatgtggatcatctgctacaaccgctcgatcatcccagttcatacggccaccaaaaatattccagataccattgctattctgaaattgagcacacctgtgatttagaacagcatcaccaagaactcttaccttaagttaacttaatacctactagtactaagtaagggaacaaataacttaagaaattaagtaaaataaaccaaatttaacaaacaa

SEQ ID NO: 36618 - DNA, 270 bp, Setaria italica
  Peptide Sequence Number=SeqID_102592
cccgctgccgctgcccctcacatccttcccctcacgtcccaccaatcgtgctcgtggtccatcaccacaccgccactgtcgcgtcctcaatcgccacaccatcgcgtccgatcatcttgccgagattcaaaatgggacagccaattctcacgcgtgataaacacctgcacttcctcggttcctccctctttgtttggctatgtacttccctgagcagcggaggcggccgcggcggcactcacgacccggtcggagacgaaccaccgcacg

SEQ ID NO: 36619 - DNA, 643 bp, Setaria italica
  misc_feature (630)..(630): n is a, c, g, or t
  Peptide Sequence Number=SeqID_102593
tccggccgccggcgacgacctcggcggcgcgcgacttgaggaacaggccgaagtccctctggaactgcctcaggtaggccgtcggcacggcgagcgggctcgagctcgagatgtacatcttcccttgttgatcggcctgcccgtcacctcgtcgaaaagccccggagggacctgggagagccagtgcaggctagagcaggagcagatgaagtgcacgctcttcctggggaagagcctcccgtagaaggaacccgggaccccggacaggaacaccatcggccggccccactcgtcggtctcggcggcggccttgagccggtcggtgaactccggcaggctgaagaagatggtgttgaagtcgttggtcgggaggtcgttgaggagcaccgagaactcgggcggcggctgcgacgaccggccgcacacccggccgatgctcccgacgatgtcctcgacgaggcacagcgcgttcgggccggacgagcagccgaggtcggccaccgtgaacctctccggcatctgcgagatgtacacgtcagtcgccgagttggtgatgaggctcttcagcgtgtccatgccccgcttctgaagcgaggagttctgcgcgtagctggtctcgccgagcccctntttcatgtggagg

SEQ ID NO: 36620 - DNA, 325 bp, Setaria italica
  Peptide Sequence Number=SeqID_102594
ggcgtgacgtcatccgcctcgtcttcgtcctcctcctcctctacgaacgggtcgtggttcgcgccggcgggggggaggaggtggcggacgagggggaagggggcgggcggagcaaggggtcggtcgtgaccgcgacactggaggaggaggagtcgaggggtagggtttcgaggtcgtcgtcggcgggggacttccccggggacaagggctcggtggccatcaaggccaccgccggtggggttcggggaagggatgagatctggagggcgaatcacggcgctcaccttcctccatcccctgcctgacttgactccgccgcggattt

SEQ ID NO: 36621 - DNA, 398 bp, Setaria italica
  Peptide Sequence Number=SeqID_102595
acggtcacacggaggaattggcaaatggcatctctcagacctaacgagccccaagtctagatgagtcgctgcaggtggggccagcagcccaccttgccccaggcccacgtgcagagacaacacggttcacagcgcgtgctaggccaatctggggatgccaagtcaaaaggcacggaggttgacgtctaaaccctcagctgccgtatgcttagcggcatccctatctctatctgtttttaccaaggacaacggttgttgagagggatgcagagtgaaatggagctctctgaccaccgaaccaacacaccgtagcacttcttctgggaacagcctagattatggacgtaaaaaagggacttaaaaaaatatcaaaccgcatataatactagcatggagtc

SEQ ID NO: 36622 - DNA, 263 bp, Setaria italica
  misc_feature (237)..(237): n is a, c, g, or t
  Peptide Sequence Number=SeqID_102596
gaggaggaacgcgttgtccgggtccggcgacaggtacggctcccgccacggctccaggacgaagccgttgccccggcccgccggggtgcggtccagcgcgcggcagtcggacatggccgggtcgtgaagggtgaggccccggtaggcgtagtcgacgtcgaggacgcggtaggagcccgaggggaggtgcagcatcagcgcgccgttgatgcagaagagcaggtcgcggagccccgngtggccgcgacccgggggtggagcgc

SEQ ID NO: 36623 - DNA, 312 bp, Setaria italica
  Peptide Sequence Number=SeqID_102597
gcggaggaggagacgaggagagatcccccaactcccccctccttcctcctctctcttcttctttcttccccgagatagcaaaatgggcacagcccctcctaccacccgctgcccacccgcttctcttctccctcctctcgtcagtccttgcctggcctgcaacagcatcggtgctctcgttggttatcccgttgtgctgcttgcggcagcagcaggtgaccttggacacgcaggcgcccatttcgatccaacctgcgccaagcaaagcgaagtaaagcgaagcggcgggcgcagcgcgaaggagggagacgg

SEQ ID NO: 36624 - DNA, 329 bp, Setaria italica
  Peptide Sequence Number=SeqID_102598
tgttctaacttggtctagtacttgttccattgagggttcgttatctaccagctgaagttgttctgtgacaaggactaccctgagaagccaccatctgttagatttcattcaagaataaacatgacatgtgttaatcatgagactggagcggtaacaactgtcttacagtggttcatgcagaatataactttcacatttgatgtttaggatactttctgattgatacatcccttttttgggtgggcatgtaggttgacccgaagaagttcagtgtgctggcaaactggcagcgtgagtacacaatggagtacattctaacccagctcaag

SEQ ID NO: 36625 - DNA, 926 bp, Setaria italica
  Peptide Sequence Number=SeqID_102599
aaggagtaagcaaaggcaacatcaggagaagcttcgcttcggcgtggaaccactttcccccttctcccatccaaggcgatcgaacaagccccaaacccaaccccatctccttccccggcctctctcggccgccgccgatccaccggcgatgacgccgggaagctccgccgccggatcgggcgtcgtcgttcctcggaacttcagactgctagaagagcttgagcgtggggagaagggcattggagatggtacagtgagctatggcatggatgatgcagatgacatctacatgaggtcatggactggcacaatcatcggcccacataacactgtccatgagggtcgtatctaccagctgaagttgttctgtgacaaggactaccctgagaagccaccatctgttagatttcattcaagaataaacatgacatgtgttaatcatgagactggagcggttgacccgaagaagttcagtgtgctggcaaactggcagcgtgagtacacaatggagtacattctaacccagctcaagaaagagatggcgtcaccacagaaccgcaagctagtgcagcctccagaggggacattcttctgaaaaagtgtttgctggccatctcgggatccaacagcaacaactcctgtgcatccatggtgactccaaaaaacagcttcggcaccttgtgcctatgattgatttctagtattgtgtgcctactatctgttaaccaccttgataatgtatcgggtgagctttgttccttgtaatttgcctggtggttgctaatgggatggaatgaaacggtcgtgaaggatgtgtaatccaagaaattgctgttggtcaattgctgctgtttcttgcatatatggttctttgcaatgacttatctcactttaacctaaaaaaaaaaaaaaaaaacaaaaactga

SEQ ID NO: 36626 - DNA, 1947 bp, Setaria italica
  Peptide Sequence Number=SeqID_102600
cggtttttttttttttttcaggaggacggaccaagaaaaagcttcccttttctccattaatttcctgtctgcggtacttattcacctttggatgtctttgccatctctttcagggcctctctgttgtcgctttcttccatatatacatcctacatgaagatatgggagggacgactttccaaacgcacaaaatctgaagaaggttaaccaacccctagccaaattgacaaatcaccaacacctgcttccatacccaatcatactctgttcaaacaagcacctgaaattatgtgcattttgtgactacagatctgttcgcactcaatgcccactgctgctactttgctctaggttacaaccatcctttagtgcttcttgagcttcattctccatgccttgtgatagtagtgctgctgcctgaagatagaatgccgttggccatgttggagatattactagagcctgcattgcatcactcaatgcttcctgtgtcttgtcattcatcagatatgacaggcagcgccgagcataaatggttggtgaaaccatcgtaccaacttcaatgaactgggaataacaatcaatggctgtcgtgaaatccttttgtctaaaagcattatcacccttcttcttcgaggtcaatgtatcttgcatttgattcgtccacatctgaaatgagagctcatttgctgtcccctcatcatccttgtagccagtcttttctagaatttcatgtattgctgtcagatcctttctggaacaggcttcagcaagaggggaaagagtcaatgattggatagatgatgcaccgccacgtggaatgtccattagttcataagatggagtctcaacatccttctgaagaggagccaatgattgcaaaagtgaccttacgttaggccgctcacggggttcatagtgaaggcaccttgaagctaatcgcaccagttctgttccttcttcattcgaaaattgaccctccaaacacgagtctgtaagcatattaaagttccgatctcgaatcaggtcaagggcatggctaggaggaatatgcttcccactaagaacgtccaacagcatggttccaaagctgtatatgacactttcaggagtgattcgtccagtcctcatgtattctggaggtgtaaatgccaaattggtactgtaactttttccatcccgactgttcttcatgagaccaaaacaggaaagtctaggattacagtcatcatcaaacagaactctataggcgttgagatcatggtagagagcacgacccctgctggtgcaatattctaaagcttcagcaagatagagaacaacccttaatctcattggccatttcattgcttgtgactcccaatggaaaagatgtttggctagtgtgtcgttgggcatgtactctgcaacaagcaacctctcatcaccttcacagcaacaaccaagtaaatttgccaatcttttgctccggagctggccaactgatctagcttcttccaggaactggcgcgggtcaggccaggcagagcggttgaagcgcttgacggcgatccggcgctgggcatcgagcttccccttgtataccacattgggcgccttctcgccgtgctcagacacgatgttctccactgcaaaccccgacgtagccaggcgtagctgctcgaaggtgaactcctggaacgcgggcagctcgtacgcctccccctgttcctccgtcacagcatcggtgctctcgttggttatcccgttgtgctgcttgcggcagcagcaggtgaccttggacacgcaggcgcccatttcgatccaacctgcgccaagcaaagcgaagtaaagcgaagcggcgggcgcagcgcgaaggagggagacggcgaccggagtggattggatagggaaaggggacggggacgggaaggggaatactactacctacgtactacctacctacca

SEQ ID NO: 36627 - DNA, 271 bp, Setaria italica
  Peptide Sequence Number=SeqID_102601
ccctcgggctattccgaggatgacgcgataccgagtaggccagtcgccggcgggcttcctgtcctcgatggcttccatcgtgtcgatgccaatgtcctcggtgtccatgctacctaccggtagctcgtggagccaccggtggaggtcgcctttctccatgtactcgaaaaggaggagtttttgctttcctgtgaacagaggcaggaaattcaaagatcaaagaatgttcacctgtcatttattgatgatgctaaattattattccaaattg

SEQ ID NO: 36628 - DNA, 443 bp, Setaria italica
  Peptide Sequence Number=SeqID_102602
aagatttacaggggcacatatgtcagcactgaagacatacctgaatatggaagttgaggcatgactctggcattaggcctagttgtgattgacatattcgaggtgaatggttatatgccaccaggttatctgaattcgacctggaggtccggcaggttagttcctaaaattatgcaggtacactttaatctgcattgatattctgttgaaaaggatgcattcctctggaaatctttgatgacaaaacctcaatttacacacttgcactggaaacacgagtagcctgtagcacaacaggatatgtatagcttgtagcacaacaggaaatgttggaagtaaaatgtttacgatgatggaaaaggcaaattggttaggaagaaatagggccaaggtactaatttgtggtgcaccaatcactacttggctaagtagtggttgacaat

SEQ ID NO: 36629 - DNA, 1648 bp, Setaria italica
  Peptide Sequence Number=SeqID_102603
tttttgatctccctcctccggtcctcctccccctgcccctccctaccaaatccgccgggccaaaccctagaggagccggccgccattcccccggaggcgagcgggttgggggagagcgccgccatgagccgccgccgcgccagccaggtgcaggcgcaggcgcaggcgcaggcgctcatcgacctggacagcgacgctgaggatgagtcccaaaataagcgttcccgaacaagtagaacgacagcattgaagacatctgggagacccaaacatgtattaccttccttttatgataacctccccaaaaacagaagctcacgcaatgcaactagcaggagggacaaggggaatcaagacaagttgaatactgatatttttgaattatacatggaggatctttggaagcacattgatgaagacaagaagagtgcttatggtcgttactttggtatcttttatatggtttaacatgtattaccgtgggcgtaatataccaaatgtccttaaatggataaaggctaagagaatattttcaagacaatatgtttttgttcctattgtttgttctggacactggagcctccttgtcttatgccactttgacgaggcaaactgctctgatattaagaagggaccacgcatgatagtactggactcacttaatacgacagatccgacgaggttgcaatcatacatcagaaaattcattgttgacatttacgaaaccgaagagcgggaagaaagcaagcagttcattaacaaaatccgcctcgagtttcccaaggtgccacagcaaaatggggatgagtgtgggatttatgttctttatttcatccagtgttttcttcagaacaaaaaactagcagaagttcttgaaaacaaaaaattggaagaagatttcacccagctgcttgatgatggctggtttaacccagaggaactagagaacctccgcaaggatatccattcgttccaagcgaatcggaatagcgaaattgcagattatggtacataacaagatggtgccaagtatattagttggcaccatcatccaatatagtagtatatacattctgctgagtttcatcttcacaagcggctcattgaggaaatttgaacattgtttgagaatctattgtagtgcagttttatgcatggaagagagatatttatacttgcccaaacatagagcttcgttgacagctagtttccagtcctgcagaccgactcttggggtgttccttttcctcaaagaagcttagatgttaatacatttatcatattctagcaattaaactcggtagctatacattatgtcaggaactgctaggtgagattaccgtcaccctttcggaaatattgtagcaggggtgcataccatgtactagtgtatgtatttgcactcgagcaatgttgtatgagacccctataatatctgggtaacacaattacagttgcctactcgtgctgaaatggtgtcgtggtagctagaaattcgcggcatgtgctgtggctatcatgttgctgggatctgatgtgtatgctgttgctgttgtgcccgatagagatcagatcacatgaggtgtgtggtgcccgggagctcaaatgcagtggataattctgtgccatgtctgtgaacatgcactgg

SEQ ID NO: 36630 - DNA, 229 bp, Setaria italica
  Peptide Sequence Number=SeqID_102604
ggggagccgctggtacgtcagctccacgctccagaagcaccccgccgcgaactgcgccacctccaggccctcgccggcgggcgcgtccgtgtccggctccagggccggattcgcggcgccgtcggtggtggttgcagcggagctcgacatggcgatggtcgcgatgttggtactggtgcgtggtggctggacttggatggagggtactgtggcctttttttttttgaac

SEQ ID NO: 36631 - DNA, 476 bp, Setaria italica
  Peptide Sequence Number=SeqID_102605
ttgtatttgatgatgtgtgttttccatatcatttagtattggtataaagttttcttcatttgagaaggaacagataagatcgagtaccatatcatgtactttgcatccttgtaccaggccagagtaccagtcatgcattggttggatcatacttctattgaggagatcattgaagtaactctctccaacatcaaataggctttgaccttgttttccacgttgaataaaaccttcggctatccaaaggtttatcaaacaaactttgtgaatcatataatcttctggaaatagacttaaatataataaacatgtccttagatgggatggcatatcataatagctaagtgacaaaaattctctcatattactcacatctggatcattttccaatccagtacccatagacttgtataccttgtaccactctattatatttcctcctttcctagccaataaactagctatcataatgatta

SEQ ID NO: 36632 - DNA, 262 bp, Setaria italica
  Peptide Sequence Number=SeqID_102606
gtcgcagctcgccgacgtcctccgccgccggccgccacctcgcgcagtccaaccacttcgaccatccccgcgccgcggcccagtcggcgatcattcgtgtcgccgaggtcgccgcgtaccgcctcatcttcttggactcgcaccactccttctacggcggcctctacgtcggcgccgtcgcggacgcccgcatccgccccgcgctccgcacgctcaagcagaacctgtcgttcctcgtctccatcctcgtcgaccgcgcgca

SEQ ID NO: 36633 - DNA, 1474 bp, Setaria italica
  Peptide Sequence Number=SeqID_102607
cccttcttctcaagtttccacactatccacatactctctctctactgttgttatacactccgcgatctccatggccgatgatgagggtcgccaccatttcctgctggtggtctacggcttccaaagccacctcaacccgggccgcgtcctcgcgcaccgtctcgcgcggctcggcgccgatggctccgttctggccacgctctccgtgccggctgccacctaccgccgcatgttcccttcaccggacgccgccgcgacggcggagaccaccaccaccgatggcgtcatctcgtacgttccctactccgacggtgtcgacgacggctcctggggcaaggacgccgacgacagggcgctcaggcgccgtgcaagctccgagagcctctccgccattgtcgctcgcttcgccaaccgcgggcagccggtgacgtgcatcatgtgcactatgatgctcctcccggtgctcgacgttgcacgggagcgcaacatccctgtcgccatttgctggatccagccggctactcttctcgctatcacctaccactacttccatggctacgacgacctcatcgcctcccacgccaccgaccccgcctacgaggtgtgcctgcccgggctaagccgtcctcttgagataagtaacttcccatcctttctgaccgacacgtcaggcagcgagagcaccaaggccttcatcgaggtgttccaagaactgtttgagtacatggatcaatggcggcctaaggtgcttgtgaacacatttggcgagctggaggcgaacgtgcttagggagatgaagcggcacttggacgtgtttaccgttggtcccatggttgggtcctcgacagaagcacggatccatttgttcaagcacgatgacgtcgacgagaagaggtacatggagtggcttcaagctcacccggagaagtcggtggtgtatgtgtcatctgggagtgtaaccaagtacacaaagcggcagatggacgagatcgttggaggattgcgacaatgtgggaggccatacttactggtcgtgcgcaaggatgatgaaagccacagcttggaggatcatacccaaggccaggggatggttgtggaatggtgcaaccagttggaggtcctctcgcactcggcggtagggtgcttcgtctcgcattgtgggtggaactcaacaatagaggcgatggcatcgggtgtgccgataattggtgtaccaaacatgtttgatcaaccaacaaatacgtatttggttgacaaggagtgggagattggcatcaaaggagagcgcaacggtgatggtgtgctaactgggacagagttggcaaggtgcattgagttagtcatgggtgaaggtgcaaaagcaaaggcgataagggaaagggcaaaggcactgaaagagatggcgcaagcatcagcaagtagaggcgggtctgctgagaggaaccttcgtgactttgtgaaaacaatccaagtt

SEQ ID NO: 36634 - DNA, 339 bp, Setaria italica
  Peptide Sequence Number=SeqID_102608
tgccggaccccatcatccaggaggccatggactacgcgtgcggctccggcgccgagtgcgactccatccaacccaccggcgcgtgctaccaccccaacaccgtgctcgcgcacgcctccttcgccttcaacagctactggcagcagagcaaggcggccggcggcacctgcgacttcggcggcaccgccaccattgtcaccagagacccaagctatgagaagtgcaagtttgaccttctataagggcactcaaatagcaggagaacaggctgcagatgtgcaaattttccccaagttcattagggggttaattaattacctttttagacttactaaggcc

SEQ ID NO: 36635 - DNA, 169 bp, Setaria italica
  Peptide Sequence Number=SeqID_102609
cgccacgtcgtcgcgctccaagccgccttcgaggacgccgacgccgtccacctcgtgctcgacctctgcgagggcggggacctcttctccctcgtctccgcgcggggcccgctcccggagcccgaggcggccgacctcgcggcgcagctcgccgacgcgctcgcgggat

SEQ ID NO: 36636 - DNA, 379 bp, Setaria italica
  misc_feature (341)..(341): n is a, c, g, or t
  Peptide Sequence Number=SeqID_102610
gctgcctagactccggccgaagtctcgtcaagtcgtcccctcgtagccgtcgtcgccgccgcaccaccaccaccaagcccgccggcggggcccaaatgcgcttgcaaccgccgtagcgccaccccgtcgcccatccggaggggcgcacaggcacgcgatggaggcggacgagcgggcggaggcggcgcggcgcgccaaggaggccggcaacgacgcctaccgcaagtcgttcctcgagacggccgtcgagcactacacccgcggcgcgctcctcgaccccggcgacatctccttcctcaccaaccgcgctgcggcctacctcaagctgtgcaagtcaaggngtgcgtgagggactgcgacgacgcggcggagcgcggga

SEQ ID NO: 36637 - DNA, 402 bp, Setaria italica
  Peptide Sequence Number=SeqID_102611
tttttttttttttaaggttaaaagagagtctggatttctattgctctttgttacagaatgttgttccttatacatcatctggacacccaaagaatcagaagaaataaaaagaattaaaaagggaaaagaacagaagtaaaaagaactgatactcctatgaactactgtgaacaagaagctgtttcaggagagcccgcccctaccataaattatttcctcctcttctctaacaacaccacgacgaactcaacgaatgcactatgcacggaggcgactgatcccctaccaccctctctcaaccaagaaccaacccaatcatatttacaggatctcatctcctttatatccctcctcccccctctctcccccctaacctaaaaaagtaaaaattaaaaaacctaa

SEQ ID NO: 36638 - DNA, 267 bp, Setaria italica
  Peptide Sequence Number=SeqID_102612
cgaagaggcggcgggcggagggcaggaggccgtgggaggcgtaggcgtggatgaggccgttggcgacgtaggcgtgggcgtcccagccgaggaccacggcgagggcgtgcagggatgctggagatgctgaggagtctgcggcggctttgaggaggaaggagaaggcgtagttgttcggtcggaagccggggaggatgcggaggaggcgcgggaagaggcggaggacgccgagcgggtgcgccgggagcagcgagcggagtagcttgg

SEQ ID NO: 36639 - DNA, 995 bp, Setaria italica
  Peptide Sequence Number=SeqID_102613
ccgtgcccatcatcgccgaggtcgacctctacaagttcgatccgtgggatctgcctgagaaggcgctgttcggccgcaaagagtggtacttcttcacgccgcgagaccgcaagtacccgaacggctcgcgccccaaccgcgccgccgggagggggtactggaaggccaccggcgccgacaagccgatcacgcccaagggcagcggcagggcggcgggcatcaagaaggcgctcgtcttctactccggcaaggcgccgaggggcgtcaagaccgactggatcatgcacgagtaccgcctcgccgacgctgaccgcgccccgggcaagaaggggtcacagaagttggacgagtgggtgctgtgccggctgtacaacaagaagaagaactgggagaaggtgaaggtggaggagccggaggcggcgccgcatcaccaccacgccgactccatgtccgacagcttccagacgcacgactcggacatcgacaacgccgccggcatgcagaacagcttcgggagcatgccgcagggggtgcaggccatgaagaacggcatcggcgccgtgacggtgaaggaggacaacgactggttcaccggcctgaatctggatgatctgcaggcgccttacaacatggtgcagctggtgaatcctaacccggtccaccagacgatgaatctggcagctggtcaaggccatggctacttccagtcgatgagctcgccgtcgatgaagatgtggcagacaatcttgccaccattctgagaaggggaaagacatgctcttgtaaataaggggggcaataggagtggctagacaggactagaaaacaagatttaaaatttggagggtatgattctgcaaaactgttgctgtaggcctgtaatgtttattcatttgttagatctatctatgcatttggtaacctgacaaaaaaacacctaccgccctttgcacttctcgaagaaaactatgaagttactcgtattgtacaaaaaa

SEQ ID NO: 36640 - DNA, 485 bp, Setaria italica
  Peptide Sequence Number=SeqID_102614
cacgctcattgtgcaggtaatctagacagtgggcaatgtcggttgcaatgttcagcctctggcctactgacagaggtgggagattccgctcttcaaattcagacaagtaggtagatagagatgtggcatctacataatccgatatgatgatcctctcatgctctttagggccccagtagtagcctcgcagtggaacaagattgggatgtttaacacaaccaagcttttttatttcacgggaaaattctttcttactcttagcaaagccctccttcagccacttcactgtcagcatgtacccattgtcaagtgtagccttgtaggatgtcccatggcagctcctgccaattatctcagcaggggcgcaagagagctcctctgctgtgaacacaactgaattgtcaaagagatgtaaatccccaaccagtttgtcaggagagtgcactctaaagatagagtgacgatgttgggtgcacgctgcacgc

SEQ ID NO: 36641 - DNA, 1006 bp, Setaria italica
  Peptide Sequence Number=SeqID_102615
ttagttacaacaaaagttagactagctgtggatcaattacaagcgctgcagcagcaaatcgaacaacaaatcactacatcattgtttatttttcctttctgatgtctgaaatctcaatgcacaaacttattctcacaaccatctactgctaaaaattgtggactaactaataacgaatcgactattcccaggaagagcaacccaaacaacgaatgctcaaggatactacacacatcaccacaaaatcctagcaattgttagtataccctctccgagtttccacaagctgatgtaagtacgagatgtacactaccaagaactccggtcacgacgacagggacgagaggtcctcgaacaccgtccggatctccggcctctccgacgcagaccggatacatcggatcgcgatgcgcagcatgtcatccagcgccttcggggcgccatctgagctcccagcttccacaatgttccggtcgtagcattccgagacacgctcctccagtgctagcatcctcacccagtccgtcagatcaaccacgccgtcattcacacagatgatctcaccagcaatcttccctgtcagcagctcgagcagaatcacaccaaaagcgtatacatcgctcttcagagatgggcatggcttgctggtgcttgaaaactcaggcggggagtatcctagggcaccagcgttgaggacctgctcggccatgcccgtcggagtcatcagcctgtgaaggctgtagtcggttaccagggcagatggagtggagttctgaatcaggacattcgatgacttaatgttgccgtgtgggataacacgctcattgtgcaggtaatctagacagtgggcaatgtcggttgcaatgttcagcctctggcctactgacagaggtgggagattccgctcttcaaattcagacaagtaggtagatagagatcagaaaatgttcagattgtctgctggaagaatttgatgagcgaagaagtgaagaaaccatcttaccag

SEQ ID NO: 36642 - DNA, 316 bp, Setaria italica
  misc_feature (1)..(1): n is a, c, g, or t
  misc_feature (4)..(4): n is a, c, g, or t
  Peptide Sequence Number=SeqID_102616
ngangggggggggggggggcagctgtttcgaattctatcagtacatattacaggttttgtttcgtataatgaaatatacaggctggtgtgttatgcctctggtgtccctaaaccctaatggtgtgttgcctggaccctggagtaacctttatcgtacttactggtagctaagcgtcagtgtaataatgtggacagtatatgcgaaacgtgaattgggatatgggaagattttaaattcacaaaaacagcaatttctataaggtgatcaacaactggtcccttatcaagagtcgatgatattttactccaaaaaaaa

SEQ ID NO: 36643 - DNA, 231 bp, Setaria italica
  Peptide Sequence Number=SeqID_102617
ccctttcctcatagccatagctctctcaacttcagtgacaaccctgaccataggcagtgccggcaatcgaacacttaatgaactccatcatgttacacgtcaatgtcccagtcttatcagatagaattgtatcaaccatacctagttcttcatttagattcgaagtacgagcatgagttggcttatctgattcttcatggtacatttcaatatcctggttgatgaatagag

SEQ ID NO: 36644 - DNA, 208 bp, Setaria italica
  Peptide Sequence Number=SeqID_102618
tcttttctgagcttgctttttgcttgtccatcattttcccattcctcttgttacgtaacaagacaatggatccaatgatggacaagcaaaaaagcaagaacgtgtccgaacatgttgtatacatagaggccagctcaaacccagctcaagatgttgatttgttaattgcttaatttatagaaacccctttgtgattaaaaaaaaaaaa

SEQ ID NO: 36645 - DNA, 220 bp, Setaria italica
  Peptide Sequence Number=SeqID_102619
cttagagatgtttagcaccatggagtaatagcagtctgctattgctccatatgcttcagtgacacctgcatcctctccggtcatcttagagatgtttagcaccatggagtaatagcagactgctacaccgagcttggtgagctcgagaaggctggcaagttctacgacaagttcatctcaagattggagaataactgaatcagctttgtctgtgctctca

SEQ ID NO: 36646 - DNA, 317 bp, Setaria italica
  Peptide Sequence Number=SeqID_102620
atcaacaataacttccgattctggtatcttgctaccaactggggcatagctcaaagcaggagcgtaagattcaatcttggcttgtcttctcagtgcagcatttatctgtcgtaactgatcattcagccgtgcaagctcccctctcctctgtcttgcaaggagccctccaacagtagcaccgaccatggctattgcaaatagcaaaggcatgttagggagggagtactcttgctcacatggttctgaagatcagatatggacctcttgagatcatgcccatgttcaaagaaaaataaaataaaataaaataaagaaaa

SEQ ID NO: 36647 - DNA, 280 bp, Setaria italica
  Peptide Sequence Number=SeqID_102621
ctactgacaagacatgctttcccaaaataggaacatacaacttcctgaagatcagatatggacctcttgagatcatgtcttgtcagtagttgtatcatatatattctgccacctgcttgtttagcagaaccatgtgagcaagagtactccctccctaacatgcctttgctatttgcaatagccatggtcggtgctactgttggaggtaagctcgtcacaatgacattaatagccagttccaagccacaactaccattccatgtctcaacttcttaattac

SEQ ID NO: 36648 - DNA, 239 bp, Setaria italica
  Peptide Sequence Number=SeqID_102622
ccaaaaaggtagaaactgaatcagctttgtctgtgctctcacagattttccgatcaatgctgttgttttcagtcattctccaatcttgagatgtacttgtcgtagaacttgtcagtagttgtatcatatatattctgccacctgcttgtttagcagaaccatgtgagcaagagtactccctccctaacatgcctttgctatttgcaatagccatggtcggtgctactgttggagggctc

SEQ ID NO: 36649 - DNA, 559 bp, Setaria italica
  Peptide Sequence Number=SeqID_102623
ccagttatcctctccttaatggcgcttcctttgcgccccgccgctccggcgccgccgccttggcgatgctccggcgtgagatcctcgccgtgctcatccctcctgccaacggcctccaagcaaatgtttcctgtgccattaccagttgaccgggttgcaagattttccttatctgcgaagcgttctgcatctcggcttgtccagtcactgactgatagcaccgattctaggagtgatggcatccatgcagctaatgaacatgggcatgatctcaagaggtccatatctgatcttcaggaagttgtatgttcctattttgggaaagcatgtcttgtcagtagttgtatcatatatattctgccacctgcttgtttagcagaaccatgtgagcaagagtactccctccctaacatgcctttgctatttgcaatagccatggtcggtgctactgttggagggctccttgcaagacagaggagaggggagcttgcacggctgaatgatcagttacgacagataaatgctgcactgagaagacaagccaagattgaatcttacg

SEQ ID NO: 36650 - DNA, 903 bp, Setaria italica
  misc_feature (1)..(25): n is a, c, g, or t
  Peptide Sequence Number=SeqID_102624
nnnnnnnnnnnnnnnnnnnnnnnnnggtgtgcccagatggcccgcgatgtaatgctaaacatttctctcttcttaatacaaagatacgcagctctcgtgcgtattctcgaaaaaataatctacagtacattacatgacaagcaaaaaaggtagaaactgaatcagctttgtctgtgctctcacagattttccgatcaatgctgttgttttcagtcattctccaatcttgagatgtacttgtcgtagaacttgccagccttctcgagctcaccaagctcggtgtagcagtctgctattgctccatatgcttcagtgacacctgcatcctctccggtcatcttagagatgtttagcaccatggagtgatactttatggcttccttgtacttgccttgtctctgcaacgatgctcctaatcctcgtgctgccttcttctcttcaacatggtcacctaaagattgtgcaagatcaagagctgccttgaactcaggaaacgccttgtcaggagcttggtttctcaggtagttcttcccagtcctcagatatgcaatcagacgctctttctgaggatcaacaataacttccgattctggtatcttgctaccaactggggcatagctcaaagcaggagcgtaagattcaatcttggcttgtcttctcagtgcagcatttatctgtcgtaactgatcattcagccgtgcaagctcccctctcctctgtcttgcaaggagccctccaacagtagcaccgaccatggctattgcaaatagcaaaggcatgttagggagggagtactcttgctcacatggttctgctaaacaagcaggtggcagaatatatatgatacaactactgacaagacatgctttcccaaaataggaacatacaacttccatcatacct

SEQ ID NO: 36651 - DNA, 229 bp, Setaria italica
  Peptide Sequence Number=SeqID_102625
gaggcccacacgagcacggcgaatggaacgactaatagctaccacagcctcatcttggccaatgacacgtttgtgtctaaagttcttcttccaatcttaagaaagcttatcagattcatcactggaaaccttctccactggaatgccagtccatgacgatactatgtgctggatatctgcttcattaaccataggtcctgtctctccagattcctcctctgctttgtct

SEQ ID NO: 36652 - DNA, 263 bp, Setaria italica
  Peptide Sequence Number=SeqID_102626
gaaagctgttatctgggctttcaattccatttcacggtctcgcagctctccagccttttcaaaatcctggctacgaacagcttcattcttctgttttgtgacttgtttgagctctttgtcaagctctcttgcttcctcaggaacctgcactaaaagttcgatttaaaattgttttgggcatgcaaaaattaagcataaaaaataaacgaaagcagatgcctcgggatacttttacctgtgcatgctgtagcctaacacgggaa

SEQ ID NO: 36653 - DNA, 339 bp, Setaria italica
  Peptide Sequence Number=SeqID_102627
gcttcatcaatcaagtcaattgccttgtccgggagggaaacgatcactgatgtattgatatgaaagctttgcagctgcaatcagagcttcatcagtgtaacgaagtttatgatggatctcgtatcgttccctaagtcctctgagaatttctatggtttcatctactgttggctctggcactttcacgggttggaaacgcctttccagggctgggtctttctcaatgtgcttcctatattcatcaagtgtagtcgctccaatgcactgtagttcacctcttgctgaatataggaagcacattgagaaagacccagccctggaaaggcgtttccaacccgt

SEQ ID NO: 36654 - DNA, 411 bp, Setaria italica
  Peptide Sequence Number=SeqID_102628
cagcacggagctccgcacgcgcgaccgctggcgcagcggcacccggacctcgccgtcgcggtcgctactctgtccctcaactcctcagccaggacgaaccgccggcgattcgacgtggtagcaagaggggaaagaaacagcgactaaatggacaggtaaagagctttgctctgaaatgcttcttcattttcatgagaagatctataaggaaagattaccctggagccgagcgcctgttcaatactgccttttctgcttgccatatctatttggtagtgggcttggtggagattggccccctctgaggggtaataagcattttgctctcaagaagctagattctgttatgtcatcttggtggcctctgggatggatgcatccagaaatagcactacatttggatggtgatgg

SEQ ID NO: 36655 - DNA, 250 bp, Setaria italica
  Peptide Sequence Number=SeqID_102629
gaacacataaagagggcttcctataaacatcttttaatttgatggcacagctagctgagacaaaaagttaccactgctgctagctagttcgaggaaaggttgaaaaacatcagctggcataaaggtgatggtacgctaagactttgtacctggccttgatcaggtgctgctgctgttccaaccttcctcgtccttctcgcaaggttcatcatccatggtatcaaatgcccagcattgaaaattgttaatt

SEQ ID NO: 36656 - DNA, 1196 bp, Setaria italica
  Peptide Sequence Number=SeqID_102630
ccagttttctcatagcaagaacctcaccctttttggatggcctgattgcaatgttgagagcctgtttagctagccggccactccttctagttgctgtcgatggggcaggcgttgctgtggcacttggtctggaagcgagtggcacctggccttgatcaggtgctgctgctgttccaaccttcctcgtccttctcgcaaggttcatcatccatggtatcaaatgcccagcattgaaaattgttaatccttatgttggctacaggacgacctgggtgcatgtccgccgcgttcctcagcgcggactctgcagcactcccgttggatttcttggcacccaaagccccaatgtctacacagatttccttgaggcctgaaaggtgctcgatgccagcaggcggggcgtcgtacctgtcccatctatgtgcattgaggcacaacacgagcctttcaagcttgggcattgcccctgcctcgaagctcaggtatgataccctgcagcagcgagcttcaaaatacttcaaaactgggaataatccagttcctccgcggatgagaatcttacctttaggtgctcctctgatgtgcaagattaggtggataagggaaggcagctgtgcaagaatcccaacatcatcctccagaacctcctgaacagtaagcaccaggtcatagatgctatggagttcgccaatccaaccaggaacccttgaaaagctggatccatggaatctctggagatggcggaaagaagcaggtattggactgaatgcatccaagtaggcttcggagggaaaatattcacttttagatatttgaggttgcaaagtttttcaaagcatacgtggagaacttccctgcctcgttccaccacctcatgatcaataatggagcccgcaaagccaatttcaaggtctgtcagattggtcagttctctcagactcttgatactgtgcagtgagttcgccaaattaaatcggtgtacagtatgcaatgatctcatgttacctatcccatcaggcaatattgtcctcactggaacaatcaaatgcaataaccggctcaaatgaacaatatctgatggtaatttcagagatttcctcccttgaagaaatttgtagtcaagttgtacttcaaacgtttccagttgctgcaaatctccaattttactaggtaacaccgcatcattaattcttccg

SEQ ID NO: 36657 - DNA, 474 bp, Setaria italica
  Peptide Sequence Number=SeqID_102631
cttttaccacacagattttcaaaactcatccaccttcgttatcttaaaatccagttaccatttggttcggttacttctttgcctgacacaatcacaagattttatgacttggagtttttcgatctgaaggggtgggatggtgattctagtttacctagaggcatgagccgtcttgtcaatttacgccatcttctttctcataaagaactgcactgcaaaattcctggggttggaaaaatgaagtttttacaagagttgagaaaattccaagttaggaaacatgacattggatttgaactacgtgagttggaagaattgaaagaactcggagggtcactcagcatatgtaatctcgaaaatgtcaaaacaaagggagatgctgctagagctaaactaatgttgaaagataagctagataagttgaaactagtctgggatagccagaggaacaggaagccaactctggaagcagat

SEQ ID NO: 36658 - DNA, 4055 bp, Setaria italica
  Peptide Sequence Number=SeqID_102632
tgttcttagttaagttagttacctttattttggttacctttcttttgttgttgtcatttgctgtgagaacaaagtcatattttggatttggtgactatgcggggtcgtgatgttcctaaacaagagcttgacaacagatcacttctatgtatggaattcctctccagatcatcttcaagtgatgccccactcgttgccttcgggtcatctgatggcgttatcagagttctttcaatgttgacatggaagcttgtgcgaaggtatacaggtggacataaaggagctatagcttgcttaatgacatacatgtctgcagccggtgaggttcatttagtttctggaggaagcgacggcctgctgatattatggagcgctgatcatatccatgactcgcgtgagcttgtgcctaagattagtatgaaggcccatgatggaggtgtggttgcagttgaactttcaagggtgatggggagtgctccacagctcattacaataggggctgataaaactttagccatatgggatactgttactttcaaggaaataaggcgcattaaaccagtacctaaacttgcttgtcatagtgttgcatcatggtgtcatcctcgtgcaccaaaccttgatattctaacttgtgtgaaggactctcatatttgggccattgaacacccaacttattctgctttaacaagaccactctgtgaattgtcatcattggttcctccacaggtccttgcacagcataagaaactgagggtttattgcatggtggcacaccccttgcaaccccatcttgttgctactggaactaatattggtatcatattaagcgagtttgatccaagagcacttccagctattgctcctttaccaacaccgacaggaaacaaggaacattctgctgtttacatagtggaaagagaacttaagttactgaatttccaattgtcaaacacagcaaatccatcccttgggaatgctggtgttgcatctgatacaggaagatcaaggaatgaatcaatagatcagttgatagtaaagcagaccaagaagcatatcagcactcctgctccccatgattcctattcggtcctttcagttagcagttctggaaagtatgtagcaattgtatggccagacattccttcttttgctgtatacaaagcaagtgattggtcagttgttgattcaggcacagggaagctttttgcctgggacacctgtcgtgacagatacgctttggtagagagcgcattggctccaagaatgcctcttgttgtgaagggcggttcttctaaaaaggcaaaagaagcagctgcagcagcagctcaagcagcagcagctgcagctagtgctgcttctgctgccacagtacaagtgcgtatcttattagatgacggaacagcacatgttttgcagagatcaattgatggtcgtagtgaaccggttattggtttgcatggtggtgctttgcttggtgtcacataccgtacatctcgtagaatcagtcctctgacagcaacagctatatcaactgttcaatcgatgcccttatcaggttttggtggaagtggatcatcttttgcttctgatgatccattttcctctaaagaagggcctccacaaaatttccagctatacagctgggagacctatcagcctgtaagtggcttacttgcacaacctgagtggacagtgtgggaccaaactgttgagtattgtgcattcgcttatcagcagtatattgtaatttcgtccttgaggccccaattcagataccttggagatgtttcaattccctttgcaactggtgctgtttggcatcgaagacagttatttgtggctacaccaacaacaatcgagtgtgtctttgttgacgctggagttgcagctattgacattgaaacaaaaaagagaaaagaagaaatgaaagcaagagaagctcagagtcaggcagttgcagagcatggagatttggctcttatcacagttgaagctccccaggttactgcaagtgaaaaaatatcattaagaccaccaatgttgcaggttgttcgtttagcctcctttcagcattctccatcaataccaccatttatagtgccaaaacaatccaagttagatggagatgattcagtatatcagaaagaactggatgacagaagatatgctgaagttgctgttgctggaggaggggtgtctgttgcggtaactcgcttccctcccgagcagaagagacctattggacctcttgttgtggttggtgtcagagatggagttctctggcttgttgacaggtatatgtgtgcacatgccttatcactcagccatcctggtataagatgccgttgcctagcagcatatggagatcctgttagtgctgtgaaatgggcaactagacttggccgagagcatcatgatgacctggctcagtttatgctgggtatgggctatgccactgaagctcttcatttgcctggaatatctaagaggctggagttcgaccttgcgatgcagagcaatgacctcaaaagagcacttgcctgtttattgaccatgagcaatagccgagatgtgggacaagaaacagctgctgctgacgtcactgatgttacacagattcttaatttggcggtagctaaacaagctaagcaagaaagtcttgcagatgccgttcagggaatagtgaaatttgtcaaggagttttttgaccttattgatgcagcagatgccactggacaatctgacattgctcgtgaagttctaaagagattagctgctgcagcttctgtaaagggagctctgcatggacagatgctgagaggcttggcactccgtcttgcaaaccatggggagcttactagattgtcgggtttggtaaccaatttgatcgcagctggccatggacgcgaagcagcatttgctgctgcagttctgggagataatgccctaatggagaaagcatggcaggacacaggaatgttggctgaggccgttttacattctcaagcccatggtcgtccatcattaaggagcttggttatagcatggaacaagatgctacagaaggagctggatcacacaccaacagtgaaaaccgatgccgcagcagcgttcttggcttctcttgaggatccaaagctcaccagcttgggggaaactgagaaaaagcctcccattgaaatacttcctcctgggatgcctcccctatctgcacctccgatcgtgattaaaaagtctgccacaaaacctggcctacctaatgcagcaccggcctcaaatggacctataggtgctccgatggttcagggtgccactgcgcctcaaggcaccccaatggttcagggtgctcccatggctcaaggcgctcctgcggcgcaaggagttcccatgaatcaaagtgctcctgctccatcgcagggcactgatgaggcaaagccgtcggaagctacagctgccgatgcagctcccccgtctgcagaagctgctgcagctcccagcagtgatgaagctaaagcagcacctggcaacgaggaagccatagcagctccaggcaacgaggaagccacagcagcaccagttatagatgcagcaagcaacactgatcctgctgctgctgctgctccagctcctgcagcggataccaatagcactggtgcacctgatgctacacccgttgaagctgcgacctctgccccctcaacagagacacccgaggcaacggataagccatcgtcaactgaggcatcgccgccacctccacctccagcctatgaatctgttgtataaaatatttttgagacttttggcagtgtgccaatttttttgtatgcgtgtgcgttcgttccactgtaatttttccccatactggtataggtatttgttgtctggtattctgattccagtagacgcaggcagtatgtgagtagccttgtacatctgctgtctgcgtctcacgagaacttaccaccattgtgtgagcatagcttgtgtttgtgaccagccgagaggaccacagttcaacttttgcttgatgagttaacccttcctgaaaa

SEQ ID NO: 36659 - DNA, 240 bp, Setaria italica
  Peptide Sequence Number=SeqID_102633
catgacgggctgcgtgacgccgttgcccagcgcgcccaccgtgccgaggagcatcagcaggacgtccgtgccgtcggcgtaccggaacagacccgtgaacgacaccctcttgtcggcggcggcggcgccgccgccgttgcccttcttctcttccttcttctcctcgccatccctccctcccgcggcgtccattgctcgcggctctcggtgtgtatacggtggacgcgcccgctggctttg

SEQ ID NO: 36660 - DNA, 460 bp, Setaria italica
  Peptide Sequence Number=SeqID_102634
acatgtgtttgcaaccgcatcttgtgaacctgagtgcattgtgcacttctccaaatcaggttctcattggatcagatcaaaccaatccacgttttacatcagttctattgtccatcattacacagtttgctgcctgattcagttaggagcttatcgcaaaacaactctgaatacaagttacaatcagtgagccaatccagcagggaatccaatgcaagtctgtcaaacaaacttgagttttagcagtcacatatgtatataccggagagcagcagaactttctcaaaagtaattgtccataaaatgattggtttcctggtggtatgataagagatggtaaaagtttgacatacaaagtgcccatcacaacaaccagaaagcaccagaagcgctcaaagcaattttacgtccgccacacatgaatgcactagagccgtttctattttctttgagagaaaag

SEQ ID NO: 36661 - DNA, 866 bp, Setaria italica
  Peptide Sequence Number=SeqID_102635
ttgtttttttctcatagctctcttaaacttttttttagtttcaaagaacaaagatcagcaaccttgcatttgtagttttattcagtaatcatattgtattgtttgctatcatcgttgtcgataagcataatgcacaacattgcaagacaagatgatcacaccaacatggcaacatgatgacaaaaacaattataacaaccaagatcgcaagacaagaggagggcatgtaacttcagaagcatttgccattgccacacatagatgcagttacctcacttgctggctgctccaagctccgcatcaattgcacttcgtgcggtgtcgagatcctcgtcgaggaagatgtcccagtgcccatcccatcggatgaagaactccgtgtcctcgaagtacttcaccctgtgcacgtccccggccggagtgaagaggaaatctccgtccaccaggtcgtagctctccttcttggtgaggttccagaccttcttcttgcccttgacgaccaccaggtcgtggccaaaggtgtggtggtgcgccggctccacgctgccggccttgaaccggacgtacgccgaggtggggctctcccgcacgatccgcatctcgcccccgggcataatccccaccggctcgaactccatcccgttcctgaggcagcagatggcgcaggcagagttggggggcacctcggcctcggggatggcggccatctcgtccggcgcggtgtcgaggaaccgctggatgtcctccggccagggcgcgtcgccggaggccgggcaggggcgcggaatggcgtggcgagccacgtgtccgcgatggcggcggcggcgtcgggcggcgtggccatccccgagagcgcgaggacgttg

SEQ ID NO: 36662 - DNA, 278 bp, Setaria italica
  Peptide Sequence Number=SeqID_102636
ggtcggcgtacgaaaccctcgggatgagcttgatcacctcctcccgcatcctctccaccgtgtccggcgggatcgcccggagcacggcctcgatgctgacgttgcgccgccggacgtcggcgtctgggatgtacacggagtagttgaggtggtccttggggaggtgccaccggtactgcttgtacgccgacgccgtgtggaagaacaccgggatgcacccggccaccatggagtcgaacaccgaccgccgcgtgcacgagtcccccggcggctgcagg

SEQ ID NO: 36663 - DNA, 547 bp, Setaria italica
  Peptide Sequence Number=SeqID_102637
aaacaaaacaaaagaaaagttaaaggaacaaaagggaacttaagacgacctttactactaacaagaaaactacccaaggtcgccgaacacgggcacggccttcatctccggggtccttcgaaccttccagagaggtagtagataagcctggtgcttctgacgaagttgtcatggagaacattctgtcaaacaatgatttttctgaaggtctacatttgtggcaaccgaatagttgccatgcatttgtagctgttgaaggatcaggttaccattatggagtaaggccacattcagggtcaagctatgctgttcttactcatcgcacacagagttggcaagggcttgagcaggatataacagaaaaggtcacccttggtactgcgtactttgttgctgcatatgtcagagtttgtggggaagttcatgagcctgttccagttcaggccactctcaaatttgaggatgagagctcttctaccaactatgtttctattgcaaggattttggcctcacaagaacgctgggagaagatggaaggttcatttaa

SEQ ID NO: 36664 - DNA, 487 bp, Setaria italica
  Peptide Sequence Number=SeqID_102638
cgaggccagtgccgctggaaatggggcctccgaggagcaacagaaaggtgacattttgggggagaaagctgaggagatagagggtgcggttgcgggcaatggggtggtggaggaagtggaggaggacgacgatgacgatttcatcacgaatgaggtgaagcggaggcttaaggagctgagaaagaacagcttcatggttctcatccccgaggaggaatgcgctgaggttgaggaggacggtggggaggaaggggaggaggaagggagcagctccagggagtggttggagtcggatgtcggtgatgggttcccgctgtgtgggttcgattctctatatgataagtactgtgagaggatgctggtgtttcataagatgatcgcacagctcatgaaggatccagagtcactgaacatgtaccaaaaagtctccaagatcagcatccaaattggcatcctaccctgcgcaacctctcattacaaaagaagg

SEQ ID NO: 36665 - DNA, 1381 bp, Setaria italica
  Peptide Sequence Number=SeqID_102639
cctatcccacaggcagtcggcgatctggggaatttgacagaaatatctcttggtgggaatagactttctggaagcatcccacaagagctcttcaactgcagaaacctagtgaagctaaacctgagctctaacaatctgatcggacacatcccgagatccatatcgcaattgacttcgctcactggcttggttttgtctcacaaccagctctctggttctattcctgctgagatttgtgggggattcacgaacccaactcatcctgaatcagagtatgttcaacatcacggcttacttgatctgtcatataacctgttaagtggtcgtatcccacccgcgatcaagaactgtgttattctggaggagctacacctgcaaggtaacttgctgaatggatctattcctgccgagcttggtgagctgaagaatcttagaactgttgatctctcttctaatgcattagttggacctatggttccttggtctgcgccattgctgaccctgcaaggcctttttctgtctaataatcacctaaatggcaatattcctgctgagataggccgcattcttccgaacattgcagttgtaaacttgtccagcaatgcatttatggctactctaccccagtccttactatgcagcaagagcctgaaccgtctggatgtcagtaacaacaacctctctggtgaaatcccattatcttgtccttggcatgaagaatccttgagctcgctggtcttcttcaatgcaagcagtaaccatttatcagggagcctagatgggtctatctcagatttcggacaactttcttctcttgatatccacaacaacagcctcaccggaagcttgcccttggcactgtccaatctcagttatttgaactatcttgatctctcaaagaatgatttcagtggttccaacccttgtggtatctgcaatatagttgccatcacatttgccaacttctctggtaatcggattggcatgcatagcttatcagattgtgctgcgcctggcatctgtgctcctgatagtatcaagcataaggagggtcatccaactcacgtgattctaaaagcagtgaccatctgtgccgccgttataattgtcattattgtggtggtttatgtgtggcgtaagctgtcaataagaagcaggccgatgcattttgaacctaccagtcaagcccaaagtctgcaattgagctcgctacaattgatcccgcctcaagcgatgcgctcctaggaaaggatgaaggcgctgggtagaataaaatttatggctagattgatgcactagcctcgtcaatttgtcatttgtatgctgttgtactcctggtccctgcgtttgagcatttacccccctttttgcaatgaacaac

SEQ ID NO: 36666 - DNA, 488 bp, Setaria italica
  Peptide Sequence Number=SeqID_102640
acacaacttcgatatgatctgatcgagtcgtcctggtcggcctcccaacgggtgttaagcttggatacggtctctctgtcaagtgggtcccaatgcaagccctcagcacatacaaaactgagagcatgggcgcgcgctggtgctgtcagatactcagatgaggagcatgcaatgcgagattaaggttgctcagctactcttacaaccttgcaacatttgcaatgataatttcatcaaaaagaaaaaaatatcacaatgacaaaccaaattggtttctagaacaaaaacgacaagcagtcattgctgatcccatgctaatccctgcgtgcccttgatcaccatgggcatttggcgacagcaaatcgatggtgcttgttgataagctatattgtaaaaggcctaatcctaataataactatagaagcaacaattcatggaaacacaaaagaacatctattcatggtaacaaaatgaaataatgaccaacg

SEQ ID NO: 36667 - DNA, 425 bp, Setaria italica
  Peptide Sequence Number=SeqID_102641
aacaaaggatgttgaggtccttttgcaatcttggctcatctgccaaaagatgaggttttctcccctcccactacataccaaatactagttagcattatcgtattgtgcgcctagccagtggcttataatttggaatcttctgcagtcacttattgcctatagtaccgccaattatttgcacttacacatgcctgttaaactgctcacatattattctattgaaattgtcaccctagtgtaagtgtactgcctttcaattgattgacaaaacaccatggtaccaggccagtggcctgggtgtggtatttttctccaaaccagtgttatgaaccagtgttttacgggagtaactctactttatgcattattgttgggaaacatctatggatctgaccctattgtccaactccaaccgccgtacgatt

SEQ ID NO: 36668 - DNA, 470 bp, Setaria italica
  Peptide Sequence Number=SeqID_102642
ccagcggctgcgccgccgtccggtcggcgttcggcattgtgctccgggagagcttcaaggtctacgacgccttcacagagggcctcgacgcgatgctgctgcggtcgaggagcctcgccgggctgagcaagccgatgagggtctcggctcacgagatcctgaagaaggcgtgcgcccagacgccggacctcaaggagttctaccacaagtgcaaggggagcaacgccagcaagagcctcgaataccctctcgtcagggtcgtcacgccggcgcaggcctccgccatggaggtgttgcccgtgcccatcccggaagaagatggccaggagaaagagccggaggcggaggcggaggcagaggcagagactagtgatggcgggggttcgacgacgtttgcgcgcaagatggagacgacgatcagcacggtctgggttgagttcgaggaggatgacaagctgatccctggtgat

SEQ ID NO: 36669 - DNA, 251 bp, Setaria italica
  Peptide Sequence Number=SeqID_102643
gccagtccgtgtatgacaccccggcccgtgacctggcctacacctgcttctgcaggcgccggcgagagccccccaatgaccacttcctcactccccactcctgcggcgagccctgctccaagcctctcgagagggcggagccgccgggcgccaagggggaggatgctgatgccaccaggtgcccgcacgtctgtgtcctgcagtgccacccgggaccgtgcccgccctgcaaggcatttgcgccggacagg

SEQ ID NO: 36670 - DNA, 416 bp, Setaria italica
  Peptide Sequence Number=SeqID_102644
tgccaccggttgctgcgggcgctgtagaacaccacccgccgcatggcgccgccccggcgcgggtccgcgccgccgagcaggtacaggtggcagccgccgagcacggcgcagccgaacccgtcggcgcccgcgtactcctgcggcaatggtggcagcgcgcgccacgcgccgcgacacgggtcgagcacgtcccacgacacgtgcccgtccttgccgtcgcgcctcacggcgtacacccactgctcggcgagcccgagccggcggcggaggccgtagaagtagttgccggcgagcaggcggcaccacctccggcacaccagcctcagcttccagtgatcggctctgggcacccggatgaggcaagcaatggcgagatcgtcggggaggccggggagcagcgggcattgcccaccgcg

SEQ ID NO: 36671 - DNA, 468 bp, Setaria italica
  Peptide Sequence Number=SeqID_102645
tgttacccgtccggagagaaagcgaagcattcttctctgacttcttgttcgtcttccccttctggttctggcacgggactcctgggtcagcttttattgggttccttgggtatgggattggatgctggacggtggcgagaagaagacggctgaatttgattgccagagttctttcttggtcgttcctcgtctaatctcatcttagaatcttcttgattgcaatccgtttcagggaacgtcttcgcattcgtgctcttcatctccccactgccaacattcaggcggatcgttcggaatggatccacggagcagttctcggccatgccatacatttactcgctgctcaactgcctcatctgcatgtggtacggcctccccttcgtctcctacggggtcgtcctcgtcgtcaccgtcaactccatcggcgccgccttccagctcgcctacacagccgtattcatcgcctta

SEQ ID NO: 36672 - DNA, 270 bp, Setaria italica
  Peptide Sequence Number=SeqID_102646
ctacggcaaagcgtatcttccctcgtcgagagagcgaaaggcaccggtagtgccgtagtgggaggctgggagcaccatggattggggtgctccggcattgatgagctccgcagccggcccgtcccaccgggacctctgctgctacggggccggaatcgcaggtcagtagttaatatccatccttatccgtagatagtaagtaggacatcagcacatgctaccagccattctctgttcctgtctccctgttacccgtccggagagaaagcg

SEQ ID NO: 36673 - DNA, 781 bp, Setaria italica
  Peptide Sequence Number=SeqID_102647
tccgtctccagatcccaccgagcctgtcatggccgccgctgcctcctgcggcatgcgggcctgccgccgcccctgctaatatattcattgccgtgccgaaccgagcagggcagagcagatcagtactacggcaaagcgtatcttccctcgtcgagagagcgaaaggcaccggtagtgccgtagtgggaggctgggagcaccatggattggggtgctccggcattgatgagctccgcagccggcccgtcccaccgggacctctgctgctacggggccggaatcgcagggaacgtcttcgcattcgtgctcttcatctccccactgccaacattcaggcggatcgttcggaatggatccacggagcagttctcggccatgccatacatttactcgctgctcaactgcctcatctgcatgtggtacggcctccccttcgtctcctacggggtcgtcctcgtcgtcaccgtcaactccatcggcgccgccttccagctcgcctacacagccgtattcatcgcctttgccaacgcaaaggagagggtgggtgccgggcacttgttcctcaactgccttttcggcaatcttctgcacattcacatactgaatttctgagaatggggatatccttgttgcagttgaagaatctagtcatcaggacaaagagtgtggagtacatgcccttctatttgtcattatctatgttcctgatgagtgtatcgttcttcgtatacggggtgcttctgcatgatttcttcatatatattccaaatggattggaacc

SEQ ID NO: 36674 - DNA, 433 bp, Setaria italica
  Peptide Sequence Number=SeqID_102648
ctccaagtacaaccgacgcagtgagtgatttacctagctaggaattcctccactttcttttgctctaatagcatgttttgttccatatgcaccaaaagccaagcgcagattgttcaatacaagagcatttgattgttgatccacagaagcatgccccaagaaagcacaatttacatatgaaacagcatttccaagaggacgaggtgctgcccggtaagtttcaaataacaaagttgttttttgtctgataatctgaaatccaatgtggaatgaatatgctcaggagtaaagtagtaggatgcaaaggaggctgccctaggaactcttccaaagtaatttgcctccgtcctgcaacaacctgaagacaaacagtagcaccagcaccgagaagtatggttgcaatgtctgagggaaatgggttatttttgtgacc

SEQ ID NO: 36675 - DNA, 555 bp, Setaria italica
  Peptide Sequence Number=SeqID_102649
agtaactgcaataacaaagttgtgtaatgacagctagcagtctagcataagcagatttggctgctaaagttatagatactaggaagatatggttctttgaaagctcggtggcctgtgcatagatgcttctattctccacattcctatcaatgtcgactgaagatctggaacctgaagccctgtccggtgatgaagcacctgatgaagccatcgaagaagatgatgagggcctatccgctgaacatgaagattttgatccagcggaggtatacatgcttgaagatttcattgctgaggacgcaagattagaagaatttcggaggaaaatcggcgacaagattaaagctaaggttcaaggggaatcatctgaaccacctcgccgtcgccaaagtaggccgagaaggtacatatcacgtaatcacgatgatcttgttgcaagttaattccaagacccgtcatgattccaagctgtatatgcatgccgtcttttagcgagaattaatttatcacggctagtgtgtcacagatatatggatgcccatagatgcgcgttaa

SEQ ID NO: 36676 - DNA, 273 bp, Setaria italica
  Peptide Sequence Number=SeqID_102650
tcccatcgtccccggctcccggctccgccgaggaagagcagccatggcgggctccgagcaacgcgtcgtcgccgtcatcatggttggcggccccaccaaagggacgcggttccggccgctgtcgctgaacgtgcccaagccgctcttcccgctcgccggacagcccatggtgcaccaccccatctccgcctgccgccggatccccaacctggcgcagatatacctcatcggattccacgaggagcgggaattcaagctctatgtctcgtctat

SEQ ID NO: 36677 - DNA, 246 bp, Setaria italica
  Peptide Sequence Number=SeqID_102651
cagcaacctgggcgtttctgattaggcgccaaggattgttccttgttcggccgatatgtttggagttccttgttgctcgaccgtgtctcgtggttttggtgagtgtacacccgtgaataagcaagggtagaatttggtgttttgttgcatccatggataatttatgatatatgcagcttatatatgtaagacatttaagcgccgatcctatatgtgaaataatagaacattattttcataaaaacg

SEQ ID NO: 36678 - DNA, 259 bp, Setaria italica
  Peptide Sequence Number=SeqID_102652
tacggcagcttctagtccaatcctatgtacatccccgatttacagcagcaagggaacgctaatcacagactagaatttgtaaccgagctgtaatatttccattttccacagaacgtgtgcatccgtatcaacgaactgttctaacctggataaggtgaattcgatcttccgatccgcagtttccgctttacaaaatccgggagaataattgttcgcagatgttcagcacaggaacctgccgagcgcgagcccgacgccg

SEQ ID NO: 36679 - DNA, 495 bp, Setaria italica
  Peptide Sequence Number=SeqID_102653
ctttccttggaggggcattgtccctttccggctttccccggcatttcccctctggttctaaacaagcctttccttgcccccgggcttcgttcttgttgcctcttggtgtgccttctgcggaatggcggcggggctgctgctcaagatggtcgggttctgcgtctgggccctcttctggctcggcggcaccgccaccgtgagcaccacggccctcgccggcggcgacgcggtggtcgtggacgcgcggtccgccgtcgcggcgacggacgacgacttcgtctgcgccacattggactggtggccgccggacaagtgcgactacggcacctgcagctggggccgcgcctccctcctcaacctgaatctctctaacaaaatcctgctgaatgccgtcaaagcattctcccctctgaagctccggctgggcggctctttgcaagatatgttgatatatgacaccggtgactctcaccagtcatgcactccattcgtgaa

SEQ ID NO: 36680 - DNA, 448 bp, Setaria italica
  Peptide Sequence Number=SeqID_102654
tacaaccgtcaacaaaggataatgatatccatggatgggagctcggaaatgaactcagtggtagtggagttggagcccggattgatgcagaccaatatgcagcagatgtgattactctgaaacaaatcattgacagcacctaccaaggcaacccatcaaagcctctagtagttgcaccaggaggcttctttgatgcagcctggttcactgaactcgtcagcaaacaaagccaagccaaatggatgtgatcactcaccatatctacaatttaggccccggtatgctcgccttgacttgccatgtacatgacttggagacttggaatctgcataactagatagaatgatgaatgtatcaggtgttgatgatcatctgattgagaaaattcttaatccatcttaccttgatggtgaggcgagcacgttcagcaatcttcaggggatactga

SEQ ID NO: 36681 - DNA, 634 bp, Setaria italica
  Peptide Sequence Number=SeqID_102655
taaaaaattaacttaaaataaccaaataacttaaccttagaataggtagaaggacgaagacaacgttacaagcaaatcttcaggggatactgaagtctgcagggacatccaccgttgcctgggttggcgaggctggaggggcttacaatagtggtcaccaccttgtaactgatgcatttgtgttcagcttctggtatctggatcagcttgggatgtcatcaaagtatgacacaaagagttactgtagacagaccttggttgtggtaactatggcctgctcaacaaaactacatttgaaccaaatcctgtactattacagtgctttactatggcatcgcctcatgggaaccaaggtcctctcgacgacattcaatggcacaaataagatccgtacttatgcacattgtgcaagaaattcggtgagggagcacatacaattcaaagttccgttcttttttttgcaactcctagtaactatctgaaccaacctatttccttgaattttttcaggaagggattactctgctcctgatcaatctcagtggcaacaatacaaaccacatttacgtggcgagcgaaggtgcacggacccagagtgcaaaggaaaggaagaaataagaaaggtttaggtaca

SEQ ID NO: 36682 - DNA, 667 bp, Setaria italica
  Peptide Sequence Number=SeqID_102656
caaagccaagccaaatggatgtgatcactcaccattatctacaatttaggccccggtgttgatgatcatctgattgagaaaattcttaatccatcttaccttgatggtgaggcgagcacgttcagcaatcttcaggggatactgaagtctgcagggacatccaccgttgcctgggttggcgaggctggaggggcttacaatagtggtcaccaccttgtaactgatgcatttgtgttcagcttctggtatctggatcagcttgggatgtcatcaaagtatgacacaaagagttactgtagacagaccttggttggtgggaactatggcctgctcaacaaaactacatttgaaccaaatcctgactattacaggtagacatacataaattctccatagcttcagttgctttactatggcatcgcctcatgggaaccaaggtcctctcgacgacattcaatggcacaaataagatccgtacttatgcacattgtgccaagaaattcggtgagggagcacatacaattcaaagttccgttctttttttgcaactcctagtaactatctgaaccaacctatttccttgaatttttcaggaagggattactctgctcctgaatcaatctcagtggcaacaatacaaaccacatttacgtggcgagcgaaggtg

SEQ ID NO: 36683 - DNA, 1654 bp, Setaria italica
  Peptide Sequence Number=SeqID_102657
cgcctccctcctcaacctggtctttaatattttcctccctgcagaatctctctaacaaaatcctgctgaatgccgtcaaagcattctcccctctgaagctccggctgggcggctctttgcaagatatgttgatatatgacaccggtgactctcaccagtcatgcactccattcgtgaagaacacgtccgcgatgttcggtttctcacaaggatgcctaccgttgaatagatgggatgagctaaatgcttttttccaaaaatctggggcaaaaattatttttgggttgaatgctctgaatggacgggtcccaatgcccgatggttctttaggggggccatggaattacacgaatgcagcttcttttattcgctacaccgtcaacaaaggatatgatatccatggatgggagctcggaaatgaactcagtggtagtggagttggagcccggattgatgcagaccaatatgcagcagatgtgattactctgaaacaaatcattgacagcacctaccaaggcaacccatcaaagcctctagtagttgcaccaggaggcttctttgatgcagcctggttcactgaactcgtcagcaaaacaaagccaagccaaatggatgtgatcactcaccatatctacaatttaggccccggtgttgatgatcatctgattgagaaaattcttaatccatcttaccttgatggtgaggcgagcacgttcagcaatcttcaggggatactgaagtctgcagggacatccaccgttgcctgggttggcgaggctggaggggcttacaatagtggtcaccaccttgtaactgatgcatttgtgttcagcttctggtatctggatcagcttgggatgtcatcaaagtatgacacaaagagttactgtagacagaccttggttggtgggaactatggcctgctcaacaaaactacatttgaaccaaatcctgactattacagtgctttactatggcatcgcctcatgggaaccaaggtcctctcgacgacattcaatggcacaaataagatccgtacttatgcacattgtgcaagaaattcggaagggattactctgctcctgatcaatctcagtggcaacaatacaaaccacatttacgtggcgagcgaaggtgcacggacccagagtgcaaggaaggagaatagaaggtttggtcacattcctgggcttggtgaagccgccgagctcacaagagaagagtaccatctcactcccaaagatgggaacttgcagagccaacaagtgctgctgaatggcaatgtgttggcgactgatgccaatggagacatcccaaagctggagcctgtgcaggtcgagggaacacagcccataaccgtgggtccttactccattgtgtttgctcacatcccaagcttctatgctcctgcctgcagttagatatttttattatctgaatttctttcacattctcggtgtgaacgatgctattgtcataggttagatgatgtctgggtgatcggcgaagcttgttcacctgcacgtgaagtaagctgtaaggctgaaagatttgtgatttgtcattcttttaagaaagaattgttcagataatgtatgagaaaaaggaggaaaatgaaaataaaaaaaaaaaaaaaaactaaaaaaagaaagaa

SEQ ID NO: 36684 - DNA, 346 bp, Setaria italica
  Peptide Sequence Number=SeqID_102658
ggcccggtccgccctacccccaccgcccaggcccaggcccgcggcggcgaggaggtgacgtgcctggcgctggtggcggacgagaccgcggcggcgcacttcctgctgtggggcggcgagtgcggcgccttcgagccgggcgacatcgtgcggctcacgggcggcatcttctcgtaccacaggggcaacgcgctcgtgctgcgcgcgggccggcgcggccgcgctgagaaggtgggcgagttcaccatgctcttcgtggagacgcccaacatgagcgagatccagtgggggcgggaccccgacgaccccaggaggatggtgcaggaggccgtcgtctcgccctact

SEQ ID NO: 36685 - DNA, 830 bp, Setaria italica
  Peptide Sequence Number=SeqID_102659
cttcttgctttcatcctcattctatccaatgactcaaaagctgcattgcctacttccacacgaagagtgggaactgcttcagctcctgcggagaggtacttgaccagtttagtgacatgtgttttattgatagccttgcggacaaggtccttcaggatagcatggaccgcgtcaacagctgcctcagcaggacctctgatactaacaaggcaagattctataaggcgtcgatatccttgctctggagctatcaagtgaggttggtatccatcagcttctgttataagctttctcacattttccattgagagttgtttatcgaactgcaaccgtttaattgctacaggaaattgattgtcgaagacatggtaaaccttctcacccccagggcgcactccatccagatgctctttgtaaatactgtcaaacatacggcatatttccataattgtgtacaacttccccccagcatcattagcaatgggctttccaagtcgattgagttcagtttctagctctgcaattgtctttgttataagagattggatcccgggaatcctagatttgatcacctgtccctattcatttaagcatctattctccatatgttgtgaatctgactcttattgatcttcctgggcttactaaagtagcagttgagggtcaaccggacagtattgttcaggacattgaaaacatggttcgctcatacattgaaaagccaaattgtatcattctggcagtttccccagctaatcaggatcttgcaacttctgatgcaatcaagatttcacgagaagttgatcctaaaggtgaaagaacctttggtg

SEQ ID NO: 36686 - DNA, 2403 bp, Setaria italica
  misc_feature (518)..(564): n is a, c, g, or t
  Peptide Sequence Number=SeqID_102660
ctcgagcccaacgacagacgcctagacgcggctgggcggtcggcctcacttctcacctccccccgcgcctccctccctcctgctccgcgtctcgatctcgtctcccgcgccgcctcgcgcgacccggccagatctcgccctcccggcgcctgcggccatggagaacctgatctccctcgtcaacaagctgcagcgggcctgcacggccctcggcgaccacggcgaggagagcgccctcccaacgctctgggactcgctgccggccatcgccgtcgttggaggccagagttctggtaaatcttcggtgttggagagtgtggtcgggaaggatttcctacccaggggttcaggcattgtcacccggcgtccgctggtgctgcagctccacaggattgatggggacagggaatatgccgagtttctgcaccaacccaggaagagatatacagattttgctgctgtgaggaaggagatagctgatgaaactgacagagaaaccggtcgctcaaagcaaatannnnnnnnnnnnnnnnnnnnnnnnnnnnnnnnnnnnnnnnnnnnnnnaaaagttttattgaacggtcatgaaagcacaatatatgaacttgttcttcgtgatacaagagtacagcagcctggtgtccctagatcctcaagcacaaggaacaaaagcacaaaccaaatgacaccgtgcagctgcagttgatctataaatgacctgacctacaacaggaaaaatcagctatatatgccccagaatgggggagaatcaccaaacaaggagtaaagatgaacatgcaagagcagggtaagttggccagcgagactatttggaccatgcaactgcgtcgatttctgcttgggcactccggtacagttccagccttttagcaaggttagttcttcgttccatgactgcggggtcttcgtcaagaagcttggaaagttgcttcatctctcttgctcctagttcagtgaagaagtggtcgagaagtgagcgctttgcctcacggacttgacaataaacaatagatttcgggatagagtttctcaacgtcgcgcacaccatattaacatatgatagaacagtttgtccaattcgtctaagataagagtcgttatatctatcaaaaatagagtggcttggatttccacccttctcaacatcctgaggaagcttcctgaagaaatctacagtcaagtagctgcattccatatcaaccagctttaatgtattcttcttgctttcatccctcattctatccaatgactcaaaagctgcattgcctacttccacacgaagagtggggaactgcttcagctcatgtgtttcattgatagccttgcggacaaggtccttcaggatagcatggaccgcgtcaacagctgcctcagcaggacctctgatactaacaaggcaagattctataaggcgtcgatatccttgctctggagctatcaagtgaggttggtatccatcagcttctgttataagctttctcacattttccattgagagttgtttatcgaactgcaaccgtttaattgctacaggaaattgattgtcgaagacatggtaaaccttctcacccccagggcgcactccatccagatgctctttgtaaatactgtcaaacatacggcatatttccataattgtgtacaacttccccccagcatcattagcaatgggctttccaagtcgattgagttcagtttctagctctgcaattgtctttgttataagagattggatcccgggaatcctagatttgatcacttgttccaaatgctttgagagcatcttcgctaaatattcagaacccatcctaggagcaaggtgcttgtattctggtgtactggaaaaataatcacgctctctacgcctagcagcaatcatgtccacatttttgttgatatcttgctgggatcgattaacaacaccaacccatggctgttggagccggtaagatcttccttccagtatatcaacagcatcggtacccttgtccatcagatcaattttcgtgagcacaccaaaggttctttcacctttaggatcaacttctcgtgaaatcttgattgcatcagaagttgcaagatcctgattagctggggaaactgccagaatgatacaatttggcttttcaatgtatgagcgaaccatgttttcaatgtcctgaacaatactgtccggttgaccctcaactgctactttagtaagcccaggaagatcaataagagtcagattcacaacatatggagaatagatgcttaaatgaatagggacaggtgatatttgctttgagcgaccggtttctctgtcagtttcatcagctatctccttcctcacagcagcaaaatctgtatatctcttcctgggttggtgcagaaactcggcat

SEQ ID NO: 36687 - DNA, 239 bp, Setaria italica
  Peptide Sequence Number=SeqID_102661
ttttcactcttaacccttatatcaccgacatacaggaattgccatcccttgagactcgctcgtacagccaagtccatgtcttccacagtggtgcgatccttccaccctcctgcttcactaattgctgatacccgccacacaccagcagttccgttgaaaccaaagaaagcatgcacagatgagcctgattcctgctcaaccttgaaatgataatctagcgacatcttctgtatccttgt

SEQ ID NO: 36688 - DNA, 292 bp, Setaria italica
  Peptide Sequence Number=SeqID_102662
cttctaggttagttgaattgtatgaaaatatattgcatttgaggacaaaaccatcctagaagcataaacacgactaaatgtttgattaaaaaagctcttacacgccaaacaatcaaggtccagttcaagaatatagcatgtcatagcataatgatagaattctagaatctaggtcatgaccgtagtgtaatgctttacatcataccctactaccatacttttttaacacttattgtacacatgccaccaatagactgctaacacctatttgcattcaaaatgtaagcatttg

SEQ ID NO: 36689 - DNA, 450 bp, Setaria italica
  Peptide Sequence Number=SeqID_102663
tttgttacttatttttgagcacaaaatatccaattcaactaacctagaagtgtatgaaaatatattgcatttgaggacaaaaccatcctagaagcataaacacgactaaacgtttgattaaaaagctcttacacgccaaacaatcaaggtccagttcaagaatatagcatgtcatagcataatgatagaattatagaatctaggtcgtgaccgtagtgtaatgctttacatcataccctactaacatacttttgtaacacttattgtacacatgccaccagagaacaactcctgtgttaccgcccattagggtggttactgtgttaccaaattcaaaatgcatgtctacagtgaccaaaaaatcccaacaaaaaatatgaatggatagctcatgtcatcttctaccatcatgcaaaatttgagatgcaacggtaaactttgttactaagt

SEQ ID NO: 36690 - DNA, 952 bp, Setaria italica
  Peptide Sequence Number=SeqID_102664
cagcaatcctgttcagtgagaagtatcaaatactttctccgccccaaaatatagctatatttgggtttgtcctaagtttataggaaaaaatattcatgtctacaacacgaaataagtacaccatgaaaaaataatttcatgattgatttgacaatattattttggtacataggtcttcatatgtttgtatatagatttggtcaaagctaagatagtttgacttaaaacaaacctaaaagtagctatattttgtgagggatggagctatcaaatcatgaagttagaccacagacatcagtaaaacacgcaccgcacaatggttttgggggaataataccttgtgacaaacataccttcaattgtacaactgggtacatgtgaaggtgtggtaaagacaagcaaagaagtagaactgacatcctatcatagtatttgaacaacatactgcacccattattatgtacttgataggacatttgatttagtatgagctaaatgcattttcaataggacaatgtgccgtgcactacaaacttttaatcacatgtgtacgacaaaatgataatgcagaattctgaaagaagaaaagaaatgagatcttgtgatggacagaggaagcagaaccagattctagaataggcatcgacgtgcatacaaggagcaggaaatgcaactaatcatcaggctcaattgtaaatcaaaattgcgaacgacattagggtgcaaaccaccaccgtacttctttagaaacatcacagtagttgttactctcattcattccttgttagatgttttagggtggaaagtgcccctttcatttgatattatagaattaaaaaaaggtgaaatggttacattttcataaagaatccctacatcatttagtgtacgttccattttttacaattttgacagttcatatacatagtaccattatgagctagattgggaa

SEQ ID NO: 36691 - DNA, 448 bp, Setaria italica
  Peptide Sequence Number=SeqID_102665
agactacattttcaagttctctatgacggtgcagaccaataattctctagatttctgtgtctatccatatgttggtgtgcaggtccctgagagttgtgtgtttttcgtaaacatacatgaaccaatcatttggcgcctccacgagatgattcaacacctgaaatttgataggatatatagcagtcaaccttctgctgtttcaattgaccctatactgaaaattgggcttctgaacatctctgagattcgatttagagtatctatggcaatgtcccctagccaaaggccaaggggagttcttgggttctggtcgtccttgatgactgcattaggaaacattgagcatatgccggtgcgtattgctcaaaggtaccgagaggaattgtgcatgcggcaaagtgctcttatgaacgcagctatatctaacattcaaaaggatcttcttagc

SEQ ID NO: 36692 - DNA, 1541 bp, Setaria italica
  Peptide Sequence Number=SeqID_102666
aaaattaagggaacttaactaagaaacaatactactagaagataagaaataagagtatctatggcaatgtcccctagccaaaggccaaggggagttcttgggttctggtcgtccttgatgactgcattaggaaacatggagcatatgccggtgcgtattgctcaaaggtaccgagaggaattgtgcatgcggcaaagtgctcttatgaacgcagctatatctaacattcaaaaggatcttcttagccaacctcttcagctactttccggcgttgacattcttggtaatgctagtagtgctttgagtaacatgagcaagggtatagcggcgctgtctatggacaagaaattcattcagagccgaatgagacaggatagcaaaggtgtggaagactttggtgacgtcataagagacggaggtggtgctcttgcaaaaggcatcttcagaggtgtcacaggcatattgacaaagcccatcgagggtgcaaaatcttccggtgttgagggttttgtacaaggagtcggaaagggcataattggcgcagctgcacagccagttagcggagttcttgatcttttgtcaaaaactactgaaggtgccaatgcggtaaaaatgaaaatatcatcagctataatggctgaggagcaattgctgcgtaggcgtctccctcgagctattggtggtgatggtttactctatccttatgacgagaataaagcaactggccaggctatcttgcatctagctgaatgtgctacattccttggtcaaattgacatttttaaaatccgagggaagtttgcttctactgatgcttatgaggatcattttgtacttcctaaggggaagattcttttaattactcatagaagagtactattgcttcagctaccaatgatgacccagcgtaagttcaatcctgcaaaggatccttgctcagtaatctgggatgtattatgggatgatctggtaacggtggagatgacccatgggaaaaaagaccctccaggatcgttgccttcaaagcttattttgtacttgaaagctaaaccttcaaactcaaaggaagttgttcgtttggtcaagtgtaatcgtggttcggatcaagcaactatcatttactctgcgattgacagagcttataaagcttacggtccaaattcaataaaggaattattgagatggaaggtaccaagaccatatgcccctcgcaataatagtggtcgaagtttccaagacttgacatttggttaaaagattaagaaacttatgttatgctaaaaatgtagaaaattgtgttatggataagtgttaatagtatgatacaagcaacatcctcctagattgaaggtattttaggttcacacattgagtggttagcatgttaatgaggcagtttattacatatatacggtagggaccaggataattttttttcatgtaaatagtttttacatatctgtgatcaagaattctttgatgctgatgtaaatgatgaccatatctgtgatcaagaattctttgatgcaaatactgccaac

SEQ ID NO: 36693 - DNA, 376 bp, Setaria italica
  Peptide Sequence Number=SeqID_102667
gctagagcgaatttatagtctttgcatgagtctccacaatatgttccttggctaaacgtgatgaatttctggatgtcctcttagctttaacatctaatggtggactagcttcagcattcctcaagttttttcttagagcttttaattttgtggactcattgcagtgatgaacagatgcttgtctcaacagtacacaaacactacacggaggtagcacaccatcctttgaagttagaaattctttcccctgattacaagcctcatgcttgattggtataatacaatctttgttgcacacaggacagccagttttacagctatcagaggacccagtacaaaatttcaagtcagtgctgttccatttatttattgacaa

SEQ ID NO: 36694 - DNA, 827 bp, Setaria italica
  misc_feature (814)..(827): n is a, c, g, or t
  Peptide Sequence Number=SeqID_102668
attggttgacatgtatgggaagtgtggcagcattgagtcagctcgtagattgttttgtttgatgtgcgagaaggacctgcattcatggacagcaatgatttcagggttggcttcgcatgggcatggcaaagaagcagttgccttgttcttcagcatgttggaggcgggattaaatcctgattcgactacctttattgtggttctctctgcttgtagccattctggattggtggatgaggggatacatgtcttcaattccatggagagtgagtatcgtgtctctctgagcatcaaacactatggttgcatggtggaccttttcagcagagcagggcttattcaccgtgcttatgaattcgttagcactatgccttttgaaccaaacttggagattcttggggccctgctgagtgcatgcagtatcaacaatgaattagagattggggagctcgtgctcaataagattgagtcagtctgctcctacaaaggaggtgctggtgtgcttctgtccaacatgtatgctaaccaaaacctgtggcaggaagttgataccattagaaggaagataaaaactgaagcaattgccaggaagccacctggtcagagtttgattgcaacagaagttctttgcatgagttggtgattagtaattgagcggattcacttttgatgaagctgctgctcctgattttggtcgggttaggaaacttgtaaagaaacctatcctttcattcaaaaataaattctaggctgagtattggatgtctatcctcacatgttacttgttttaagatgtccaggttgtctttttgtnnnnnnnnnnnnnn

SEQ ID NO: 36695 - DNA, 554 bp, Setaria italica
  Peptide Sequence Number=SeqID_102669
ggagctagaatgattctcaaagaaacattgtcagtcattttactaaagccaatagtagtaacttcatgatagtttttctcgaatacacaggagagctgcgtatcattgcattaagatagaagaaaaggctcagatagccatacaaccacacaccacccacacttagggtcttaaattacatcctacttatcattctatcacccgtccttagaatgaagcgaccaccacctaaacaacacacactgctaacccccaggtcgagcagcaaccagaccactaagtccgttggcgcctgccatcatccagtgatcagcctcatcctgtgccaggagaagcgttcgatctaacctgggcgaggcaccattaaacactatatcattcctcatcttccaaagagtccaagcccctaaaacgaccagcgagttaaatcctcaccgaacttccatgtttaatctatcacctggatgctgccaccattcaaaaaatccagccgagattgattgaggagcaagatcagggagtctgaaatggcgcagcagctgaagccagaattg

SEQ ID NO: 36696 - DNA, 554 bp, Setaria italica
  Peptide Sequence Number=SeqID_102670
gtgcctgtgaatttgctccgatccggatggcagagagtaggtgccatcggagtgtaagcaaacgtgccaagagtcagggggggcatcagcagcatctttagttttgcttgtggttccatcttgatcagcatgaacagttttcacaggcctgtatgcaaatgcactaatatcaggggggctggcagcagtttccttgttatcacttgtatatctgcttcttgaaggggggcctagatctgatttctttgatgcgcatctgaatttgcctttttctggagctctgagaatagatctcacagaaagtgtgttcttcacatcctttaaaggagcacgaaggccactggcacgggagcctgggtatctgaaagatgataccaatgcagcaaacttatccattgatttttctgcaattccactgtacatattcacatgggaaacattgcatccaaatcttccttcagtccttatatttgcatcatcaaggtcatcagtatcacgaccttcatcaatgactggcggactatcatcagaactaatcggactgtaacgattca

SEQ ID NO: 36697 - DNA, 1261 bp, Setaria italica
  Peptide Sequence Number=SeqID_102671
ccttatctgacagaaccagtatgccagatgacgggtttcctcaccctcacctacacggctgtcatcaatagcagttgtccctgttatcagctccagcagcactaccccaaagctgaagacatctgcttttgttgagattttccccgtcactgcatactcaggagccaagtatccaaaagttccagcgagtctggttgccacagagaagttcccatccggagcatctttcatcagcccaaagtcggacacctttgcccggaagtcatcgcctagtagaatgtttgctgacttaagatccctgtgaatgaaccggtgatgacccaggttgtgcaggtattccatcccgcgggcaacatccagcgcaatgttgagcctcttcttcaatgagagaggctccaacccaaactgcttccactggaacagatgcctgctcaaagccccattaggcatgtattcatagaccagcagcctctcgttcccttcaatcgcgtatcccagaatcgacaccaaattgcggtggcggaccttggttagaacggcaatctcagcttggaactcgtccaaagccttgttgctgacagccacagactccatcctcttcaccgcaatcatggtgccatcgtgcagctcccctttgtagacgacaccgaatcccccatggccaagcacattctccttggcaaaattcttggtggcgccacggaggacctgcactgcaatcacgaaatttccagcctcgatcatgtgaacaccaccagtcaggctgctgctccgctgtgcgtgttgccttgagatgtgccgctgctgccatcattggtcgccacaacaatcttggccaagttatctggatcggaactatcacggggatggacgaccacagaggcgccctgtggcggcgttgatgcccttttcttgcagaagaacacagcacccaccgatatcaaagcagccacgctgactgcaaccggaatggttgtgcccagcaagacagctgatgaggtcttcttcctatccccccgggatggctgcattactgccatgtgagcctggtgcgccgccgtcatgtgctgctggagaacgaggggaattgcttggctgtgcatccggtgctgctgccgtgctattgaagttgagattaccggagagattgacctggacactcggcttgaaggtgggcagtggcccggataagtcattcatggacaagtcgagcttttgaagcgaggcaagcttggtgaggctgtccgggactgtgccggta

SEQ ID NO: 36698 - DNA, 861 bp, Setaria italica
  misc_feature (1)..(29): n is a, c, g, or t
  Peptide Sequence Number=SeqID_102672
nnnnnnnnnnnnnnnnnnnnnnnnnnnnnttgttttttttttttaaactaagcattacacatgtcttgatcacgactcggaaaagccagacttgagtatcaagattggaataacacaaagaagcaatcctaccaccaaaaagaaacatatcatctatctacacaagaagcacaagcacatgggcaatggtgcgctatctttttttttttacctacaaccaacaaattaaacgctgtgcgaaaacaggcgagagaaaacaggggagagagatgtacttattatcccatcccagcggtcggtagataaagatgtattcctcctcttcaccggccgtccgccgaggtgaacgactcggcaaacccggctggccgggccgggatgctgcccttgctgtcttccaggctcaggatgctcccgtccgtcatgctggcctctgcgtcctgccagctcttcaccatctgcagcagcggcaggtgcaggtcgatgcccaggtagtcctcggcctcgtccttcacaggcttccacttctccaccatcgggaccagcacgttcacggcgtgccccatgtccggccgctgagagggctcccgggcagtgcagtgtccagcaagctctgcgatcacgctgatgctctcgaagatttcttcgtcggtcacatcaagagtgggatcgatcgctgctctcagcttctcctcatccttccttatctgacagaaccagtatgccagatgacgggtttcctcaccctcacctacacggctgtcatcaatagcagttgtccctgttatcagctccagcagcgtttacttaaagctgtaggtactattctttacttattttcttttgttttctttttttact

SEQ ID NO: 36699 - DNA, 496 bp, Setaria italica
  Peptide Sequence Number=SeqID_102673
agggcacttgcgagttgcgaccacacaacaatggcctggcgaactcgagtcctgctcgtcctcgccttcgctgccgttgccctgctagccagcggcaccgcggccgcggccgtgggatcatccgctggcgccgaggcgatgccgtccctgcacgctctgcggcgcgtggaggacgacgcgagcagcttcgtggagggtgaggaggcggcggcgtacccgcggaggagggcgctgtacagcagcgggtccatcaactacgccgctcttaccgcgagcaaggccgcctgctacggcccatgccctgcccgcgggcaggcctacagtcgcggctgccaggccatctaccagtgccgcggttgagccgcgttgcagtgctcgcgtcagttgatcttcccctgagagaacgcggttgttacttgtatctttcttgtgctagttctggcgcgtttgttctgcgtggattcaccatataagcagtttatacattgatgtaaaa

SEQ ID NO: 36700 - DNA, 1146 bp, Setaria italica
  misc_feature (1101)..(1101): n is a, c, g, or t
  misc_feature (1112)..(1146): n is a, c, g, or t
  Peptide Sequence Number=SeqID_102674
ctccaagctccgctccaacctccaagctctgctccccgttgtccctctccaccaccacggacctaaaatttagttggagcagtaacacctgggcttgagcttgcaagcaccaccaccgcgaacgtcgtggcgcgcatgtgggcggcctctacatcccgcgtcccacctccaccgccttcgtcgtcggcctagatccatccaacaagctcacgacctccattcccccggaggccaccagcctcccgcggacaaagcctcagcgccagcgagttcctgtttgcggtggggagagaggcgccgcgatggctgcggaccgcggcctcctccttctgctcctctctgccgccgccattgccggggtggcctccgccgctggtcctttcttgtccgatggcgtgttccaggtgagcgccggatctactgggaggagcttgctgcaggccaagaagaattgtgccatgaactttgagtttcaaaactacacgatcatcacaagcaagtgcaaagggccaaaatttcctgccgaccaatgctgtggtgctttcaaggaattcgcatgtccgttccgtgattacatcaatgaagacagcagcgactgttcttcggcaatgttcagctacatcaacctctatggcaagtacccaccaggcctgtttgccaacatgtgccgtgagggaaagaaggggcttgcctgcacagatgcccagagcagcatcgctgcgaatggtggccaacgagctcaaagcagctctcttgttttggttacgctcgtttgtggattggtagcattgttgttccattgaatgatgatgccttcagtttcgccaaaaatggtgtttttgtaactgatgaggctcaagttcattctctgtgccttgtggtgctaaaattgtgggcgggtctgagaatttcttccttttatgtgtaaaaatctttcctaatgtaatttatgacagattgcatattctatgggcttcacacctgtcgtctgtcgatgccgaattagagctttgggactcaactcactataccattgtattgtgactgttgcattaaattaaattgaattcataccattacttcaaaaaaaaaaaaaaaaanaaaaaaaaaannnnnnnnnnnnnnnnnnnnnnnnnnnnnnnnnnn

SEQ ID NO: 36701 - DNA, 946 bp, Setaria italica
  Peptide Sequence Number=SeqID_102675
cgccgtctccggcgggcccatctacgtcagcgactcggtgggccagcacgacttcgcgctgctccgccgcctcgcgctccccgacggcaccatcctccggtgcgagggctacgcgctcccgtcccgcgactgcctcttcgccgacccgctccacgacggccgcaccgtgctcaagatctggaacgtgaaccgcttcgccggcgtcgtcggcgcattcaactgccagggcggcgggtggagccccgaggcgcgccggaacaagtgcttctcggagtgctctgtgcccctcgcgacgcgcgcctcgccggccgacgtcgagtggaggagcggcaagggtcccggcgtcagcgtcaagggcgtctcgcagttcgccgtgtacttggtcgaggccaggaggctggagctcctgcgccccgacgagggcgtcgacctcaccctcgcgccattcacctacgagctcctcgtcgtcgcccccgtgcgcgtcatctcgccggagcgcgccgtcaagttcgcgcccatcgggctcgccaacatgctcaacaccgccggcgccgtacaggccttcgagaccaagaaagacgcgaacggcgtgatcgccgaggtggccgtcaagggcgccggggagatggtgtcgtactcgtcggcgaggcccaggctctgcagggtgaacggcgaggaggccgagttcgcgtacaaggacggcatggtcaccgtcgacgtgccgtggtcggggtcctcgtccaagctctgtcgcgtcgagtatgtctactgagccggggcgaaacgactctgccccggcacatttgcctatcatcaggctgtaataatcaagtgtgaagggactgaagggcaaagttttagagctcttaacggtttcatttttttgttcgagtttccttttgtataagaatcctataacgtgtgaattaatggggtgctttcttct

SEQ ID NO: 36702 - DNA, 420 bp, Setaria italica
  Peptide Sequence Number=SeqID_102676
aattgaatcagctttgattcaccaccttatcatggagaaagctctgatgctcgactatcttactccacccatgccatctgcaaccaagagaactaccctaaacttctaagcatacagattgtttagtttacaacagacacagatgctgaatggcgcaaccaacgtacacaattcctcattccatcttcacctgatctcaacacccactttcctgttcttgccttctttgggcctttctcacttccttgccacaacctttacatgtgaggacttccctggaattgtcgctgcagcgctggtgctgtaactgtgggagtgacgggaattgccaccaccggcaccaactaccaaagccctaactgatctcaatcaccactttcttgttcttgctgcctttgggccgccctcgcttcctgcctc

SEQ ID NO: 36703 - DNA, 387 bp, Setaria italica
  Peptide Sequence Number=SeqID_102677
aaacaagcactcatcaattgcaatcgataacataaaggtgattgtgcaatttactaatcacattactgctttgggctatcagtattgttttgggttgtactttcatgtgattagtgctaataattttagaacttcaggcataatttttttctaattaattgtttatggttcacagcttaaactgaacaaatcatattctcaccccaactccctggtggcctggttctcttcaatcattgtcatatatcactacaaataatcaaatatgcatgtagcagattaggcagtagatgttgccagagttcactaactcgcacaccattatggtgtgcggcgttatttcaattgtccttggcacagaacttataatattacttgtgttcaaac

SEQ ID NO: 36704 - DNA, 388 bp, Setaria italica
  Peptide Sequence Number=SeqID_102678
gttggaatcaagaagctcaggttgttgactgttgttctttggtaccttgatgtaaactgtcctctgcacagtatcccctacaacgttatttgttaaaggcatcttcttcttccaacatgtattgtcactatcacgaaacacagcaacagcacataaacaatccgtcaggcagagctgctggcactggtcgttaggtatgttgtcgtgctgctcatagtcacattgaggccaatccacattgctcattgttactactcacacctgctctgtggcacctgcttcatcgaagtcacaactttgtggctggaaatcaggcttgcagcctttactctcaccaataaatgagtactgtgggaggcacacgcaggtagtctggttgtttaagaca

SEQ ID NO: 36705 - DNA, 4631 bp, Setaria italica
  Peptide Sequence Number=SeqID_102679
ggatagatattactactaagctagagtccagagcttgttgaatgtaaacaaaaatacaacagtgcattacactccgagacaaatataccggaggcagaccaggagggaaaaaaaacggagatggcagggaaccaaaaattacacctggagacacgtcttttgtggttctattttacaccccaagagcacaagcgtatgacacaacatgcagacatgcaggccggctcagacgagcaaatgaattgggtggggaagactcttacactgacctttgggggttggtttacaagccagccatgggatgtggtgctatggtcctgctgctggcaaatctgtatggccgtatgaaccggatcgtagttatctttctgtcccttgactatcaaccgagccgagagttgtcacgagaggtgcaggtccgatcattcttctgttcgacattgatcattccaacagaggggtttatctcttctttggtgcccttttgaccttgatcattcttctgttcgacttgtcaccgccacctccaccgctgcccaatgagaaattcccaccctgaaactctagactgcctgcagctgggaaggatgggttctgctgtgctgcttgttgttggcccccgaactgaaaagctccacctggctggactgcaggagcaccaaataccggggcagcaggcgtactattctgctgtccgaagggtgaaccaaatactggtgccggtgctggtgctgcttggttcgtgtcatctgccatgctgtcttcattcatctgatcatttccaggggagcccatgccaaaggctgtgttcgtatttgccattccaaatgcaggctgcggagtagacgagtttatgcctgtgtttgctgaggtaaacgagaaaacagaaggctgagatgagaaagttggagctggctgtgctccaaatgcaaaaccaccgcttgaagacgctgattgcccaaatgtaaatgtgctgggaggggatgaacttgagccgaaagggttgctgaaagtggaggctgacgaagctgtggaggtgctggcaaatacacttgtactggccactgctgatgcaccagcagaagagctagctgaagaaaatgtaaacccagtacctgagctagagctgaatgggttcgcaaatgtagctccagttccaaatggtgaattaccaaatccagaacccgatgtagatgttgttgctccaaacgagacagttccaggtccagatgaggaggctcctgctccaaaagacacggtcccaggtccagatgaggcagctccagctccaaaagacacggtaccaggtccagatgaggcagttcctgctccaaaagacacggtcccaggtccagatgaggcagctccaactccaaagggaacagtcccagatcctgatgaggaagttcctgccccaaaagacacggccccaggtccagatgaggcagttcctgctccaaaagacacggtcccaggtccagatgaggcagctccaactccaaaaggaaacagttccagatcctgatgaggaagttcctgcaccaaaagagaaaatcccaggtcctgatgagggagctgctgccccaaaagctgatgaagttccaggtgtggatgatgaagctccaacaccaaatgacatggtccctgaaccagtcgaggaagctccaattccaaaagataaggtcccagatccagatgaagaagctccaacaccaggagtcacggacgggaatggtgagccaaattgtggtttgggactctgggatggttgttgaattgtgccctctgactgcgtcggcttactaccaaagaatgtgctagcagcagatggttgagaggtactgccagcagccgatgatgtgctgaggccagtaggctgggctggcgagttgaacccaaaaaggctgtttccggagcttggaaatgtaaatgatgcggttgaagcagcctgaacaccaggtgcagtggaagtattagatggtgcagccgtagctgagcctgcagcatcacttgaagctacaactggagaggaagtaggcgcagatgtgattggataacttgaaataggtgatgtaagttttgatggtggcatgctggctgaatctggagctgtagactttgcatcatctgtagcacctcctattccaaatgatagggtgctagctggctttaccccggcagttgtgccatctgattttgctgatgacaagccaaccgaagcactggaagaaaaattaaatcctgtaaatgcaggagatgatgatgatgaaatagctggactgctactggacacagcaaacaaggtggaagcagctgagccaacagaaggtttatcagtaggtgggacagttgcaagctttggtgatgaagagtgcgggaagccattgctcaggctcgcagaagtagatgcagcggaagcaaaatggacaggcacattctgtgttgttgatgcagctgatggcaaaaccttgtccgatgatttaatgacatcttctgctttttctgttttatcgcctttctcagaactgttgtcggatgttgttagcttggtgacactctgcccaagtgttgaattgtttttaacattcggtgtttccaaatctgatgtattagactgcttgaggccaaaaataaaatttgaagcgccagtctgtttatcgtcattaactggagcaagcggcattgctgacacacttgcaggacgggtgccaggaggcgcattcaagaatgcaaaaccagcattcttatccacagaagctttgggaactgcttttccaggatcatttgatgaaagcaaaccaccagatgaagagacagttttagatagtgatgctacaggctgttcactaaccggagaaccaacaatgttcttcttcattaagtttgattcaaccttttgctctaatatattttgttcaactttctgctcttttctaattgactcagatctctgcccagttgtttcaatctctatcttacttgatgggctcttggatggaatggggacctccagatcatcatcgaactctggtaagtcctctatcacagccattttaaagcttggtttccgtgatgtagaagcagatactgagttccccaaaaaggtagacttatcagacaaagcaacttttgatggtccatcttttatcatatttagcttgtctttcttcaacagggaaccattcaagtctggatcaaggggtccatttgcaccatccaaatcttgaaatttcagggaactagacgggtcatacatactgcttggtccagcatcttgcaaaatgggtttctttgacattgaattactagcattaccagttacagattgctgtccagactgcttctctttaggcgatggagctattatattaagctgctcaaatatcttctctgccatcttgtttgattgagctggtatgggtggagcgctatcactaggtttaccatctccattattatgggatcctaggggcctcacagattgacttgttccaagcaatagtctttctgagctcggagattcctggatggatgtgctgtcttcaatgaaatcagaatcacttgtacggctagtaagaaggtttcctcgaggaactgaatgagcatctctaaaaggagacatcatatttgacttctgccggattctgcgaatgggacctatggatccaacttcattctctaagtcaccccctcttcgtttcaatacctgcctgccaccgacatgcaaactttgtgctcgttgggacaatgaagatctgttcacttcgctagagctcggagccttaaaatatggagagcgggacattctatatatcgctgaccgcccacgtaatcccgaagtcacatagccatttacagggagcccagggttttcattcccaaattcaattggtgcctgaacaattggtggtccaaatctcctatcataggcagtgttgcttgcttcacctttgttctcaagaaacaatcggctccgcagattacttgattggggttccctcgaataacgggagctcatatattgtttcgcaagttctgcaggagaactggtaccatgactatgtactttaacagtcggagatttatctgcagccatctggtgtgatgtggagcctcctattccatcaattctaatatcttcattcttttcctcacgtgaaacaatagatgtaggcggatcaggctcaatggttcttgcacgcaacaagtctgtaagacgatcaaactcaaccctagtgaacgtcttccgcattaacaagtgctctacttcagacaatgctttgtcatctgatgtcgcagctatgttcttcccattatccattccaccctctgggagtggaggtgaatcaacattagttgaatcaggtaagtcctgtgttggatcattatttcttccgggaggcgacgacggggccggcggtggggcgaggcgcttgcggaacaccgagccgaagagccgcgcggcgccgccagcgatgaggcgggaggccgggtccacgagccgggatacccacccgccgctcccagtcccaccgccgccctccccgcccggccccgaggaagcggacgccgctgcagcagcggccgcgaggcggtgcgcggcggcggcggctgggggccgttcgtagggc

SEQ ID NO: 36706 - DNA, 438 bp, Setaria italica
  Peptide Sequence Number=SeqID_102680
cacaaaatttaattcatatccaaaatttgcagagtaggtgcaagcaaaatcaggattttctttttcaatttgcaccaaagtgtcagagaaatgtacgcgaaatcgagcaaaagaaacaactttccccattgttcgaattctcgttacatcgatcttgaggttagagattagtagactttgctggcgtacagcaaacagaaccgaatagatcggagccggccgtcacaccatggaaacgccgtctgggatccgagcatcgctgtcctcgcgcgccttcctctcacgacgcctgcggcggaccagtgtgaggatgagcgcggcagccgcgacgcccacgaggtccgccgcagcatccttgggcgaggcactgacggatccaaagaggccggcctcgtccaaaggcctccttgaacggcatcggccgcgaagacgaaggga

SEQ ID NO: 36707 - DNA, 172 bp, Setaria italica
  Peptide Sequence Number=SeqID_102681
ggaaggcggcgctcaggatggcgagaagaggaagtggcctggctccggtggttgggaggaggccacgccggccgcccctctccgtgcggtgcgacgccaccagccgggacggaaggattacgcaacaagagtttacggagatggcatggcagtcaattgtctcatcacctga

SEQ ID NO: 36708 - DNA, 3261 bp, Setaria italica
  Peptide Sequence Number=SeqID_102682
cgaatattccatgttgttcaactagcgaaaaggaatgattcccttatgggcaaacctgttctagttcaggagtcagaagtttttgccttcggtgaatttgattctccaatcgttccattatcttcaattgatgacattgaagacaatcaagactctgcttcgaggacttatgttcaaacagaacaagagtcagaatgctgcacctcaggtgaacttgattctcaaaccactccatcccctttgcttgatgagaagattgacaaactggacggccctcctttgagcaatgctgccatgctggatcaggaatcagaagtttgtgttccaagtgggcttgattctcgaatcgctctatgttcttcaactgatgagaatgtacatgaattggatcatcctcctttgagcagttcagttttaatcaatcctgagtcagaagatcatgtgttgggtgacactagttccaaggttactatgtgttctttagttgaagacaagattgatgaatccgaagatcctcaaccaaaccataattttcctgaggtacggcaggaagctcttgcatcccctgaattagactttcaggttgctccatgtcccttgaatgatgataaggttggtgaaatagaagggcctccatcgtgcaatggccgggtggaatcagaaaaggaatctgattgctcaattgaatctgattcccaaagtgcgccatgttcttcaaattcaccagtactagctgacacaggagtattgacttctcctgtcatgcctaataatgaggaaatgaatcagttgtctcctggtccgccacccgctgtacaatttcaaaatgattcctacgaagatcctcaagctcaagcaccaccccctctccctcccctccagtggaggcttggtaggcctcggctagggcttctaagtagaaaaagctctatgcctgagcctgcaaggagcatagatcctgttttccaggcatcaaaccaagacatggatatcaggctaggtttgcttgatcaaccagatagatcaatagaaccagtatcctctcaagcgaccgaagaagatacgcatcagagttctttgttagacggtagtgatcaaaatgtagaagttggattgtcgaccagtgtcacagtaactggtgtggcaaggactgaacactattggccattctcagaagcttcagagaacattaagggaccggagcatatttcttcatcatttaacagaaatctggatgctggggtcacatcagcaacagctgacgaggaacatctggatgattctggggtgacacatggagcagttttatactcatcagacccgctgcttcgattacctgcagatgaacagcaggaacctcaactgtgcaccttatcttcagatactcgagaaactagtgtgcatcccagccgtatgcatccaggtgcatctgaaaatgataagtcaacagatgctgctggtggcatggaaagcacctcaacaaagggacctgattatgaaaatagtttttaccagcaacctcagcatgttgaatcgttctcaaagacttcagattatggagagcatattacaaatgcatcggtggagggtgtaaaacatcagtctggtacaagcgagacactttcagacccagcaaagcattctgcaccaggcacattgttgaaagatgggaatagcaaggggagtcaaattttgcaggaacaaaatgtgggtagttctcaggacaataagtcaggaggcccattgcccagctcggaatcaatggcatctgaagattatcgacatgatgaatataatttggagagagaaaatagacacccgcctagcaacccaggcccactagtggcatggcctggtgataaaaataacttcttcagtggccttgatgaagctagctttgcgcatgctgagcaaccacctgtgatgggatggactgttgggcctcagatgattcatcctaagtatggtatatcagcagaagagagccaatttgagccaaatatcaccgacaatcatttaatcaagaagcctatttcaattaaaaacatcccaaggaatccactggtcgatgctgttgctgctcatgatagaagctcgatgcgaaagatttcagagcttgcaccatcggctgacaagccgaagcccaccgagagaaatctgttgctagagcagataagaaacaagaccttcaacctgaaaccggtggctccttctcagccaacagccatgagatcccctgctagagctaatactagaaacttgaaggttgctgcaatcatagaaaaggcaaatgccatccgacaggcggtgggaagtgatgatgaagacgcagatagttggagtgacgcctagacgcccatctgttcccctctcggtgttcatcaaggacatcgtggacaggttggggttgcacagccatgtcattttttggttagcaatggtagtcttgtgtatagtatatgctcataatcttctttctttctttcttttcattcttctcttattctttcggccgattatctgtatacttgcctctcccagcagcaaaggctgttgcagtggacatgatccggaggagagcatgcatattcttcaggtctatgtaaatttaacagttctagttaaacacgtctatctactggggaggattatgacatcaatgattccatacatacagaccttaagttacaaaaatataagagatccaaaaaaacccgtttactgatgtattaatcaacgaccatgaaacaattggaggcatatatccacactgctgtataatcatgtaatgtgaccaatgtgtcgcagaacgagagaactgagaaatgtgtatgcaggctatacaaggacttccatggaaaggctgtacccggagacgagagcagagaggccgatggcaacgaaggcgaagaatgccatgctgatagccgccgccgccgagtcggtgaacaggttgtccgccttctggcgcatgtagtccgtcaccggcgccgccgcggacattcccgatatcatgaggtaagcgacgacctggtctccggcgaagtcgacgagggccgacgccttcctcgtcccgatcaggtcccgcccggagccgagccggtgggcgtcgcgcaggacctgcgccgtggcgtacagccacgcgagaatcgagatgcccaggcagtagttgtattcggggtattggcggaagtcctggctgtcgccgtgctggttggacgccatgacgatgagggcgaggagggagaagagccacgccag

SEQ ID NO: 36709 - DNA, 1376 bp, Setaria italica
  Peptide Sequence Number=SeqID_102683
atcctggtgttcttgatcaccctgatgggtgcctggcttgtatctgaatggattaacccataagtgatagctagcttctcagtatggctaagcagtagctttctccttttcttcttctggtacgttatatactatgcagctggtgtctggcacatatcctgcctttctgatctgaaaaaccaaacgaatcagctcttcatatatctctgcagtatctggatgtggcttcccctcaacttcaaatacatggatactttgttcaatctgtatccagctccatccaggccgagtattcagtgatcttgctttcattacatacttgaggctctcagcttcatcaaacatctgttcttgttcatacaagctcaccatctgcaagtagttggctgaattgtatggctctagtttgaacaattttcttgcagccacttcagcaagagcaagatttccatgtactgtgcaacctgttagaagggctccccataagcttgctgctgacttgaatggtgacttcttaatgaagtccattgcttcatccaggtaaccgcaccttgacaacaggtcgaccatgcaggcatagttctcgactgtaggtgtcacaccatatctgctttccatgctatcaaaatactcccacccttcagtaatcaactccattgatctgcaagcagtaagcagtgcagtgaaggttatactgtctggcttcaatcccgaattacacatgtcgtggaacagctctattgcctcacggccatgcccatggaccgccagcccagtcaacatcgcattgcaagacaccaaattattcttctgaatcctttcaaatatccgctttgcacttgttaagcttcctgcctttgagtacatgtcaattagtgctgttctaacaaccatatcataatcataggctcttctcagtgcaaaactgtgcagctccttgcctttctttagcagagcaagtcctgcacaagcccgcagcaagaccgacatggtaactaaactgggctggacatcgtccttctgcatctcattgaagaagtagaacgaatcttcatagtccccattattgcagctccccgagatcagtgaagtccaagaaaccacattgggagtcaaaccgattgccttgacctgccggagcagcagcacagcctgcgaactcagcccgttcattgagtaaccggtgatcaggctgttccaagtggttatatctggatcaagcctattcatcttcatctcttccacaagcttcagcgaattgtcaaactgaccggcgtttgcgtagcctgcaaccagcgagttccatgtggtcatgtttctaagctccagcgcatcgaacaccttcttggcgtaatcaaggcggccacacttggacg

SEQ ID NO: 36710 - DNA, 503 bp, Setaria italica
  Peptide Sequence Number=SeqID_102684
ttcctcatccggcagggatcctcgagccgcagtgcgcgtccgccggcgaggccggcgagctgctcgggagggatgggttgccgggctcatgagggagctctgcccgttcaagatgatggagagcttcccggtgatcgacatcggcaagcacgcgcacctgctcgaggtgctctactacatactcttgccgaagccggccgacgacgactccgcggcggaggccgacgccaacggcaatttccacgacgacggctacgacatcgaggagcagccggcggccggcagcggcggtggcggggaggagcagcggaagccggctgccggttgcgagtacgttaagcagctcttcctcgccgtgtggggcatcgtgtcggggctcaataatacggccgggcccgtgcgctacgtgacgaagccgatcgagttcgccatcaaggcgccgtggaagatgctggccgtcgtgccgggcgttggggtcgttcgttgttcttggtcgtacgggt

SEQ ID NO: 36711 - DNA, 294 bp, Setaria italica
  Peptide Sequence Number=SeqID_102685
acgttgaacttgttgacggccgtgtgcgagtactcctccgtcttgaaccggtagatgtcgttgagctgctggaagtccagccagaagtagccccgcacgtggtagctcagcgccgccagccgcgtcacgatccgctccatgatctccttcccctccgcgtccggcttcagcatcagcagcgcgcaccgcagcgccatgaagaacagcgcctggatctcgatcgggtacccgtacacgcccatccggcggtcgatcatgcagcagccgtcggcgcagagcagggtggggaaggtg

SEQ ID NO: 36712 - DNA, 933 bp, Setaria italica
  Peptide Sequence Number=SeqID_102686
gagaaataatgagcaatcaggcaaggaagagtatatccgcagcaagcaatctccaggaaaggttgctgttcggccaactaatggtgtgactactagtctgtcacctcgcaatgtgatgtcctctactccagtgcctcaaagctctgtagctgctaatttagcacacagcggtgtttcatcagctactaatgcagcatctcgtgctgctatatctgctgctaatttagtatctagcagtgtttcggctactaccgcagcatctaataatgctatatctgctactaatctagcacctaatcgagctcatccaccaagatcaagcaatcaagatcggagtgatcgatttcttcagctgcaaacattcttgagaaataatgagcaatcaggccaggaagaatatatccgcatgcttcggtctttgtcatctgttggactaagtaagcatgccattgagctggagaaacgggcagccaatcttttggttgaggaagggaaggagctgcagaagatgaaagttctgaatgttctgggcaagctttcgcccactgatgctccacagttcccagctcagcccgctactgtcaagcatctgccattcccagctcgccgatgaaaggagtgggtgatttggttatgttgctgcataacaggcattcaaccaagtttcttctgaactcttgccacctgaatgccgtgtcacggtcacaattgttgtgttgtctgtaagaacaggcctatgtatatccatccggatgggttagagtagattgactgacatgctctcatggtggtatcttacaatctgttgtgccattgttggaaatctgatgcaaccattaactctaagacggctgcttcatagagtttcttctctggccaactcagcacccttctgtgcaagctttcaccgactggtactccaaagaaaaaaaa

SEQ ID NO: 36713 - DNA, 490 bp, Setaria italica
  Peptide Sequence Number=SeqID_102687
taatagaaatacctcaaaggatgggaatgacttagaattccagcaatatatattccaataaacacaactgcgggcacattaaatgcttctctacccctttatcaatctccaccctaactatcaccaacaaagaacactagctaggttatttacgtgtcaatcaccattcattttgcttaaaataatgcactttcctggtgtcctaaatgctatgatgtacagctgcggggaagcaaaatggacaaagatagacatacacacactacaaaaaatgaagtaatgaactgatcctaactcatgacaagttcaggcaactaccaataccaggaaatgatcaggcctcaagactcaagcatcgggaactgatggaaagtattgtgacataaacattctgaatctgattttgtactccctaggtgaaattacagttggggatagattcttcggaacaacaagagatgtcttcacccaagattccagctgtttgtcc

SEQ ID NO: 36714 - DNA, 1242 bp, Setaria italica
  Peptide Sequence Number=SeqID_102688
aagatagacaaacacaccacaaaatgaagtactcaacaaaggaaacttaatgctaaacacataggatgaccgatgacgtactgctcattgagtcattgtatagagcttgaactattcccggatggacacggaacctcagcagcatgatcataactcatgacaaggtcgcacggtcaccaataccaggaagtgatcaggtctcaattctcaaagactcaagcatttggaactgatagaaagtattgtgacataaaccccctgaatcttattttgtactccctaggtgaaattacagttggggataggttcttcggaacaacaagagatgtcttcacccaagattccagctgtttgtcccaggtatattgtctcaaataatctataatcccgaatacaagctctttcttctgtttgtcaactccaacaagcaaggagtaatccatgacattcatgagacttagaaaagctgtgtcattccaaatagcacgttccatgaggtttttggttttccttgaatgtatatcggcatggtacgcatatcttcaatgaaattttgatccaacagcaccttttcaggattttccgaatcaggaacatatcgtgagaaaagagcacccttcagatcatatctacgtattatattatgtccaaacaaaagattttccataaccatgaaattagtccttgcctccttgccgttcctagtttctttaacctgatatattcccagaatttttgcaagacatgtagggttacttgagacctgatatacactgaaatgcttgaagtacccaagaccaaactttaagaatgagtggaactcagtcatcttaatttgttttatgataaatctgtcatccattgatttcgcaaagaaaaccttactctttccgccctgtgcattccaatgtttgcagcggcttatcgatgaaatatatgcaagttctgatgggcaacatatcttccgaagatcatggaattgctttgcatatatacaaacaacagtatatttgcttctaagagctatgttttgattgttcagatcaattgcaggatgcatatcttttaaagctgacagaaatgaatcataaaatccagatgttgattccataggtgatattggtgatgcaagcatggatgacagcatagaaacatttctatccaagttgctggatgcagcttcagaagagaacccttgttgttcagatatagttaatgcgacagcaataatgctggaacctc

SEQ ID NO: 36715 - DNA, 418 bp, Setaria italica
  Peptide Sequence Number=SeqID_102689
tattgtatggccacacacgagtgcacggctcgcagagcgaacgatcctttgcctggcttccatggcgccctctgctgctcccatctacgccggctgggcgccaccggctgcggcgaccatgctagccgccacgaatctctcgccccgcctgcgacagctgcccaccagcccggctcgtgcaaacgtatcgctctgcccgcagcaccatggtaatggtcgccgggcgcgcaacgccgacctccgctgccgccgccggctcctcacggcgcgaggcgagcgccccgacgatgacgacgacgaggatgaccaagacccgtcggcgactggtggtgggttcgactacgcggtggcgctgttcaaccgcggcgagttccacgcgtgccacgacgtggtggaggagctctggtacggcgccgag

SEQ ID NO: 36716 - DNA, 1108 bp, Setaria italica
  Peptide Sequence Number=SeqID_102690
cgagtgcacggctcgcagaccgaacgatccttttgcctgccttccatggcgctcgcgccctccggctctgtcgctcccatctacgccggctgggcgccaccccgcctgcgacagctgcccaccaccccggctcgtgcaaacgtgtcgctctattacctacggcaccgtggcagttgccgtggtagtgatggtggcggggcgcgcaacgccgacctccgctgccgccggcggctcctcacggcgcgaggcgagcgccccgacgaggaggaggaggaggatgacgaggacccgtcggcgactggtggtgggttcgactacgcggtggcgctgttcaaccgcggcgagttccacgcgtgccacgacgtggtggaggagctctggtacggcgccgaggaccccgcgcggacgctcctccacgccatcctacagtgcgccgtcggattccaccacctcttcaaccagaaccaccgcggcgccatgatggagctcggtgagggcctctgcaagctccgcaagctcaacctcggcggcggcgacgacgacgacccattctcccgcttccgggacgacgtcgccgccgtcctgcaatttctctaccgcacccaaaaggagctcgcagcatgcaccgatgacctctgcttgaccatggacggctcgccgagctcgtaccaactgctcggcaacttcgccgccggccagcagctctaccggttgcaagctgatgatacacacgaggacggcgcttccaccatcgtcttctctgtacctgatcatcccgcctcacgagcagttccgtcctgcagggtgaagcttccgacattacatgccacggagcaaaatctgacagagcttcaacgtgcataccaatatatctagcctagcccatcattgttacgtttttcggctgaggtccagtcgagagtggctgaaccatttatgtcattttcagtgaggtttaatgggcaataaataagctgccatgtagctaattttgtgacatggtatattatttatgaagtgagaagaaactagtttcatgaaaaaagaaaccatctttacaaataaaaaaaaaaaaaaaaacaaaaactgagacacgacaacggagggg

SEQ ID NO: 36717 - DNA, 311 bp, Setaria italica
  Peptide Sequence Number=SeqID_102691
cccctgcctacaagagaaataagtcccagcaataaggaaagctaccgaaatgcaaagcaggacccaaattgataatgttcacgtgaatatttagcagatcaggaaaaataagttatctagaattactctgaagtgaatgaactcattactagttagccaaatagactaatcaaaatatgctcaaactgggaaagtttagtggcaaaataagcatgactactagcatctaactaacacctggccctgtagaagataaaacaaggcattctttatttcttatccagcataaaaaaaaaactgtccatatgcag

SEQ ID NO: 36718 - DNA, 564 bp, Setaria italica
  Peptide Sequence Number=SeqID_102692
agaagacatatactgaaaaggaaaatgatacttctgaaaggtattgtgagatattacctgtggtatagaaacctgtgtagggatgatagctggttatgaacatggccttaaacagatgtctgaactgcattgtcttgagttggatcatgaagacgtcaagacttgttgatataaaaatcacatgaccattctcatcatacccatggatcaatgttcccacaattggcgatcccacggaaaggagcttgtccagtttgatggatttctgaagcatccatctggcgacaccatcagaaccggccttcctctcccatagttggatggtcacatcatctaacaaagcggcgaggccaagcttgttgtcctccattcgcacgagctccaagcatgactcctcagtgcccactggggcaccaaacacagctagagcctgcctatccaaatcaaactccaggatgtggttcccatcgctcccagtatcatactcttgaaccaaccagcaaagtgaatccttagtgaggacgctgggattcaccaaagtaaccggaacaccgatggcaattg

SEQ ID NO: 36719 - DNA, 567 bp, Setaria italica
  Peptide Sequence Number=SeqID_102693
atagatgggagtgcaaattaggttagttactagatgtagtgtactagttggttggcacaccatctaccttaaagtttactatgaatagcgatcatgggaccgaaacaaaaaatccatgtattgttaatgctactaatgcttaataagagcatgaaagatgttgcagaagacatatactgaaaaggaaaatgatacttctgaaaggtattgtgagatattacctgtggtatagaaacctgtgtagggatgaactcattactagttagccaaatagactaatcaaaatatgctcaaactgggaaagtttagtggcaaaataagcatgactactagcatctaactaacacctggccctgtagaagataaaacaaggcattctttatttcttatccagcataaaaaaaaaactgtccatatgcagcagagcatttccaaaaagaatagtgctacatgtttcatatggctgagatagatgggatgcaaattggtattacagatgtagggtgtaactaggtgaggtagacaacaacaatactaacttaaagttacaatagaaatagacgaata

SEQ ID NO: 36720 - DNA, 535 bp, Setaria italica
  Peptide Sequence Number=SeqID_102694
gatccgggagacagcctccagactccctggtggcaggcccagcacccggtggcggtagcattcaggccttgttgcgctgctgcacatgaagatgaaccccgccagtgatacagtgatggttgaggaggaagctccagtgtggacatcgtcctttgttgccaccactagggagtgcggccacttgcgcggtagcaggaaggtagaggcgggaggtgagggctggcttgccatggaggtagctggagcagcatgggtagttggatgatgtgcataagcaggtggctgtgccgagtgagctgaaggaggcagaaaagcaggaacagggggccagttatcaacatcatgtgggggtgatgattctggaagcagagtaattggctgaaacaatgtgctcaatttcttaacttgtgtggaggtaagctatgggttgaacatccctttgaaaaagttctccttcatagcttttcttaggcttttctcacgaagcggcaagaaatcaccatggatcgtaaatttaacctacacaaataaaaga

SEQ ID NO: 36721 - DNA, 451 bp, Setaria italica
  Peptide Sequence Number=SeqID_102695
cgcaacacctccattgccattgtaatcggacaaaggggctgcgttgctcggagaacaaatcttctgctcttcagatcggctgagggggagtcgactcccccctcagccgatctggtctagtagtcttaagaacatatgtttctctgcctcttaatcctttttttccctcttcaattattttctttctttttgcggtttaaatttaattcatttgctcttcaggaaagtttcacaggttcacctcagtaaagaattcaaacgagaaccttttgattaacatgtcagtttcgttcttgcccaaatataaattgtgaacgctccgtaactggataaaaagattgaacattgtttctggatcaagatgtaaatggcgtcgtcaaattacaacatcaacgagaaatgattcaggcagcccctttgtccaatctcaatggcaatggaggtgttgtcg

SEQ ID NO: 36722 - DNA, 397 bp, Setaria italica
  Peptide Sequence Number=SeqID_102696
caacccgtcacgcgagttctccttccggacgccgccggccacactccccttcaagttcgtcatcgtcggtgaccttggccaaacgggatggacggattcgacactgaagcacatcgcggcggccgactacgacgtgctcctacttcccggcgacctgtcgtacgccgactccatccagccacggtgggactcgtacggccgcgtcgtggagcctttggcgagcgcgcggccatggatggtgacccagggcaaccacgaggtcgagaagctccccctcgtcgagccgacgcccttcaaggcatacaacgcgcggtggcgcatgccgttcgacgccggcgccacgccgtcgggcgacaacctctactactccttcgacgtcgccggcggcgccgtgcac

SEQ ID NO: 36723 - DNA, 464 bp, Setaria italica
  Peptide Sequence Number=SeqID_102697
attgtcttgttcagtaccagcactagctgcatagaaaactggagaagacaattgccacaacaacgattctgagaggagtagcatcacttcaaactcgtgcgctggtgatgatgatagggatgaagttttgcaagatgagtcatccagcagtatatatgaggaccaaattgtctcagaagtagcggcatctgaaaaagatgcagatccagttggaccctctgagaaaactgcggtatctaatgaaagaaagccatttattaataagctacaatggttcttgagatttggcagaccttcaggtgaaggcaatgtggagaagagtactggtgaggtatcagatgataaacatgctgttgttcctcccagcacttcccctcctgatgttagttcagatagctcccgtggtggcataaatttggcttctggtgataagaaggtcatgggcacactcaagaatattggac

SEQ ID NO: 36724 - DNA, 2465 bp, Setaria italica
  Peptide Sequence Number=SeqID_102698
tgttggagaccggatccagaagatggtagttactttcaaacacctacttgccaggccatgctaagaagaatactgttaatgtggtgccttcaacacccggagtgtggataccgccaaggaatgcatgaactactagctcctctagtctatgttcttcaagttgacattgataaattgtctcaagtaaggaagctccatgaggattgttttaatgatgattttgatggggtgcctttcccagataccgatatggttttcagttataaacctagaaaggactcgaaatggcattctggagctgacaatggcaatgattctgaaagagcttccaaagttaacagtcttgatgagcttgacatggatacaaaagaaataattttacttagtgatgcgtatggagctgaaggtgaactaggtgttgtattgtctgaaaggttcatggaacatgatgcctattcgatatttgatggtttgatggatggaggtagcggagtggttcgcatggcagagtttttctctgcatccaaggttggatctagctcaagtctaccacctgttattgaagcctcatcatctttgtttcatctgttgtccattgttgagccatctcttcatagccatttcattgagctggatgtggaaccacaatatttcgcccttcgttggctgcgggtcttgtttggccgagagttctgcctcaacgatcttttagttgtatgggatgaagtttttgcttgttccaatgatatgctgcttagagaaaatgaagaatacagtttcaagatcttgtgctcatctagaggggcattcatcacagccatggcagtctctatgattcttcaccttagatcatctttgttggctaccgaaataaatacgtcttgtcttcagagattattgaactttccaaacaatgttgatgtgcataagctaattgagaaagccaaatctctacagtctattgctatcgatgcaaacacgccatccccatctttcctatcaaaggacagccacgattatgacagggtttacagtaatcttgctacttcaactcctccaaggaccccattgcatcccttacctgagagttactgggaagagcagtggagaaacctgcataatgatggaacagctcccaaggagattgaaaaggtccaatcttataagagatcactaaagaaatcattgagtcaaaggcttggtttatcaaggacagaatcagatccttctccagttattattagtgccaagaattcagtgagacgttgtcttctaaattcttatgatgacgtagtacgggcaggtgaagtcgctgggaaaattgagcaggatgaattccctatctcaattcacaaggagcgtgaaaggccctcgcggctaaagttaagggcagctagtgagaatttaacactaagctcgagtgtggaaacagccaatccacttgtagattctccagtgaaacctactgatgagagttcaataaaaggaatagaagcttgttccacgggtgagaattctccagttttctatgcagctagtgctggtactgaacaagacaattgccacaacaacgattctgagaggagtagcatcacttcaaactcgtgcgctggtgatgatgatagggatgaagttttgcaagatgagtcatccagcagtatatatgaggaccaaattgtctcagaagtagcggcatctgaaaaagatgcagatccagttggaccctctgagaaaactgcggtatctaatgaaagaaagccatttattaataagctacaatggttcttgagatttggcagaccttcaggtgaaggcaatgtggagaagagtactggtgaggtatcagatgataaacatgctgttgttcctcccagcacttcccctcctgatgttagttcagatagctcccgtggtggcataaatttggcttctggtgataagaaggtcatgggcacactcaagaatattggacagaacatgcttgaaaatatccaggtgatcgagtcagcattccagcaagaccgtggccagccaagtgccatggagaacttctcgaacaacatcctgggaggcaaaggccaggttaccgcgatggctgctctgaccgagctccgcaagatcagcaacctgctccgcgagatgtgatgtacccgcagtcccacacccaaggtgccacgccccccattctttcccgattcattagctcctcctcagataacgaaggcccctgtagttaaaattaaggcgcctaggcaccctctgtatatatagattccatcccattccattgagcccggtacgatagaggctctcctgtacctaaggatcggctgtcaattgagttgcgcgagatgagagagtaaactctctccggcgttaggaagcaacttttcgatggaagaacaattttgttcgcgtaaagattagcacaataaataaataaatgaatgaaataatctgtgtcc

SEQ ID NO: 36725 - DNA, 414 bp, Setaria italica
  Peptide Sequence Number=SeqID_102699
ctcagtgaatctacttcatgatcaccagcatcgtacatgcccccaatcggcccaatgaaatccatcctatctcctgaaggaacatagaaggctgcgggattcatacagtgcatgtagcagaatgagcaggccacagcgacgagcagaagaaacagccgccgctcccaccgacctcgacgcggttgggccacctcctcctcgtcgtcgtcgtcgtcgctgtcgtcaagctcggcctcggagtcgctccttcgcgcaaacgagacgggtgacgccgccgcggcgtccgaggagacggagccaccgtcgtcctccgaggccccggtgcccgaggcggagctggagcagtcgtccacctccgccgcgcgcgccacccggaggagggatctcgcggcggcgctcggggtcgtagcgcag

SEQ ID NO: 36726 - DNA, 607 bp, Setaria italica
  Peptide Sequence Number=SeqID_102700
caggtacgggcgctacacggcggggctgagcgcggcgctgttcgggcgcggcggcgcgtgcggcggctgctacgagctccggtgcgtcaacgacatccgggggtgcctccgggccagccccacggtggtggtgacggcgacggacttctgcccggccaacatgggcctcgccgacgaggccggcggctggtgcaacttcccccgggagcacctcgagctgtcggaggccgcgttcctccgcgtcgccaaggccaaggccagcatcgttccggtgcagttccggagggtgagctgcgacagggcgggcggcatgcggttcacgatcaccggcagcgcgcacttcctgcaggtgctgatcaccaacgtggcggccgacggcgaggtggccgccgtgaaggtgaaggggtcggcggacggggtggatcccgatggggcggaactggggccagaactggcagtgcgacgccgacctccgtggccagccgctgtcgttcgaggtcaccggcggcaggggccggacggtcaccgcgtacagcgtcgcgccggcggactggatgttcgcgcagacgttcgaaggcaagcagttcgtcgagtagcagatgctgcc

SEQ ID NO: 36727 - DNA, 616 bp, Setaria italica
  Peptide Sequence Number=SeqID_102701
aggttacaagtagaaagtaagtacggtaaaataccaagttagaagtgatagtgtataatgatcggtacgcgccaaggaaaaatacatattgcccagttaaattgtcgatgtttcttgtacgctgcagtagcacaagttgaggaagaattgcaacagcctccagataaatggaaaacgtccacattacctccttgaaagtgaactgctcatggatgagcaaggccaatataagacagggtagaacaagaaactgatggcggaaagtgtcatgatccttgtcatatgatctgcggaccaatttgtggcgcctcatataccaaacaattgagaatgagctacttaggaaaatcagcttcatgactgtattgtacagggatataaaatccgtaaacatgtccaagtagcgagtggcaaaaacaagtgcatataactcttgcgtcttcaaggaaacaccggcgcaggactttgatggtgtggatcttgagcaggaggacgaggacgctcatgaggtgcgtcatgtccccggcgagcctgaaggcgttcatctcgccggctttcctggaatcagcacgcctccgtctcgtctcccccctcccgccggcgtctcgggcgtgtg

SEQ ID NO: 36728 - DNA, 458 bp, Setaria italica
  Peptide Sequence Number=SeqID_102702
tcagccaaacggagtgaacctctatcaaccagcttcgagtgtcttccatctctatgcggtgtccgcaatttctttgtgatttcactgcattgaggatgtgttgttatagcagacgactttctctttatgcctctagatgtagcaccctcaaaagcattctggttttcaagttgaatatggctgtccattaccaagttgcagcctaagtttccatcttttgatcgacctctgaatgaaccatccaagcattttgcggaatacttctgagtcacaatccatttgtcatctagccaaagcttcctcaatcgaagatccgatgcatgtgccctcgactccagggaggacccaaggagccggacaagataatgcttcttgcccagcactctcaccacctccgcaaccttccacgagtagctatcaaaggcctcaagaatactacccacagcccagcatactgg

SEQ ID NO: 36729 - DNA, 441 bp, Setaria italica
  misc_feature (2)..(2): n is a, c, g, or t
  misc_feature (4)..(4): n is a, c, g, or t
  Peptide Sequence Number=SeqID_102703
ancncactcgcctttcagccaaacggagtgaacctctatcaaccagcttcgagtgtcttccatctctatgcggtgtccgcaatttctttgtgatttcacaagttgcagcctaagtttccatcttttgatcgacctctgaatgaaccatccaagcattttgcggaatacttctgagtcacaatccatttgtcatctagccaaagcttcctcaatcgaagatccgatgcatgtgccctcgactccagggaggacccaaggagccggacaagataatgcttcttgcccagcactctcaccacctccgcaaccttccacgagtagctatcaaaggcctcaagaatactacccacagcccagcatactggatcatccgccggagggcaaggtctcatcaaccttcttggcaccctttcaacagccacgccagagtcaaccggactt

SEQ ID NO: 36730 - DNA, 187 bp, Setaria italica
  misc_feature (181)..(181): n is a, c, g, or t
  Peptide Sequence Number=SeqID_102704
tttttttttttttaacaattaaaccgacaaaatatgatgcggtgttttccttttcaacaaagaatgtgagataacatacattgatgagaaacaatgagctgatgttaacataactacatggtacataatcatgaacaagtaaactgaggccgatattgatgaatgccaggcaccagggaancatttg

SEQ ID NO: 36731 - DNA, 423 bp, Setaria italica
  Peptide Sequence Number=SeqID_102705
caatatacagtatacacatacagaagaagacaaacaaaagtagaacttgcttccttagttgaacaacctatagtaaaacaaaattgaagaaaaccctgatttacgaaggtacatgaaagagtcgcattagtggccgtagtggtgatggtcgggaggactgaagcagatatattggagattgaagatgcaggactggtaacaataccttgcaagaaggatctaatacaaaaagattgaaagatgtaacagtagatctgctatggagaatgttaacataagtagagaagaatttacattagcatttaggtgctacatacagtgatgccataggcttgtggacaaaccatgtcttatgtcctgattcatgcttatgatcacttaacaaagaataaatgtaagatatgtttatatgcacacacatgt

SEQ ID NO: 36732 - DNA, 874 bp, Setaria italica
  misc_feature (847)..(874): n is a, c, g, or t
  Peptide Sequence Number=SeqID_102706
gccgggttcctcgccgcgcctcgactcgccggcgcgatggacggcggcggggaggcgctgctcgtgcggaggagcaagggcaagaagaggccgccggcggcggcgcatgcggagagggactccggcgccgggggtcggttccgctcgctcatgcgggactacaacgacctgctggaggagactgaagcaaagaagaagatgctagcgagcgcaaaccggacaaagctcgccctcgctgctgaagtcaagttcctgcaaaggaagcacagatcctttgccaagagttcgaataagacacattacaagctgaagaagcaggctcggtacgttccatctccgttgggaagggcttcagtgtttgctgatcatgatgtgaccaggactgaaggggcttcttgcagcaaaacccaaattttgacttgaatcaaggctctgcaatggtatgcgataatgatgaggggaatgattaccaggggcataggagccatctggaacttgataactttgatcaggttggggtggatgaagagatgattgcagccgatgtcaaattatctgtttgtagggattcaggaaattctccggcaagtgatgataagaggacaatcccttggcaagaccggttagcattgaaggcctagtccttccatagattggttaagaaataacaattctctatgataattgattacccttgctattcccccaaatgcttagtagtctttgtacaggaacaatcgataaggatagttgtatgcatggtgccatggtgcactgcctgatctacaaattcagatggttgatcttatgcaagtttgacatgagaattgtgatgctatgaatgaannnnnnnnnnnnnnnnnnnnnnnnnnnn

SEQ ID NO: 36733 - DNA, 214 bp, Setaria italica
  Peptide Sequence Number=SeqID_102707
ttttgctcttgcacccagcgaaggccgtacggactcgcaggaaggccggtggaggccgccggagaagccggtcgttgaggactggcgtgcgatcaactcgaggaggaacgccaagtggtggtacgccgccttccacaatgtcaccgccatggtcggcgccggcgtgcttagccttcccttcgccatgtccgagctcggctggggagttggcatc

SEQ ID NO: 36734 - DNA, 1772 bp, Setaria italica
  misc_feature (1757)..(1757): n is a, c, g, or t
  Peptide Sequence Number=SeqID_102708
cctggccgggtcgtcgtcctcggcaaccgtatgatctgggttctggctggagattcaccgcatgatcggcaagtagcttctcttattcgatttgcgcccaataagaggagccttacctgcctgccgcctccactccttctccatctccattgctgaaggctctgccatccatcagccatggggacccaagcaccagagagctattctcctgcgaaggatggcaagactgcacaggagaaggcgatcgaggactggcttcctatcaacgggtccaggaacgccaagtggtggtactccgccttccacaatgtcaccgccatggtcggcgccggcgtcctcggcctcccctacgccatgtccgagctcggctggggccctggcatcgctgtgatgatcttgtcatggatcatcacgctgtacacgctgtggcagatggtggagatgcacgagatggtgccagggaagcggttcgaccggtaccacgagctcgggcagcacgtcttcggcgagaagctgggcctctggatcgtcgtgccgcagcagctggtggtggaggtgagcctcaacatcatctacatggtcaccggcggccagtccctcaagaagttccacgacgtcgtctgcgagggcaagtgcaagcacatcaagctctcctacttcatcatgatcttcgcctccgtccacttcgtgctctcccagctccccaacttcaactccatctccggtgtctccctcgccgccgcggtcatgtcgctcagttactcgacaattgcgtggggagcatccttggacaaggggagggaggcgaacgtggactatggcctgcgcgcgactacgacaccagggaaggtgttcggcatcctaggcggtctaggtgatgtggcatttgcatattcagggcacaacgtggtgctggagattcaggctaccatcccttcgacaccggagaagccatctaagcatgccatgtggaagggcgcgctcgttgcctacataattgtagcaatgtgctacttccctgtctcactggttgggtactgggccttcggcaacagagtcgacagcaacatcctcatcacactctccaggccaaagtggctcatcgccctcgccaacatgatggtcgtcatccatgtcattggcagctaccagatttacgcgatgccggtgtttgacatgatagagactgtgctagtgaagaggttaaagttccctccaggcttgacgctccgcttgatcgctcggactgtctatgttgcattcacaatgttcgtagccatcaccttccctttcttcgatgggctgctcagtttctttggtggatttgccttcgcgccgactacttatttccttccctgcattatgtggcttgcaatctacaaacccagaaggtttagcctttcatggttcaccaactggatctgcattgttcttggtgtgcttctgatggtactggcgccgattggaggactccggaatatcattttgaatgcaaagacatacaaattctaccagtaaacatgattagccaacataaaccccttgtttcaaccaacaattaacagacccgcaaaatgtctcagatcatcatcagctgaaacaagttctggatttggcacagtgtgacattacattctttttggcacgacaaaaaatcgcattaggtggtgtaaggaaccgactacagcgtctaatatgagttttttgtcatgccaaaaaatgtgttgtttagtgtgtgttgctttcatagtgatacntcttggtgtttcttg

SEQ ID NO: 36735 - DNA, 427 bp, Setaria italica
  Peptide Sequence Number=SeqID_102709
tgttgctgctgctgctgatgcacagctcttgtacagcatttgttgtcatttgtatatgctgtggctgctgctgcctctgttggggtggctgttgctgctgttgctccctggctttcatgagctgagtttcaatatatgacgctgcaacatccgaatgtttctcatttgttcgtgctatgaatatatcccaaaaaacagaccaccactcgaacagaaagccaccaggtgcatcaattgcaactggatctgaagagaccttcccttctgcttggaaggcctttgcagttgcctgcaaatttctcttcataaaatagtcatatatgtaaacatccagcatcttgtccgcctcccagttagtctgcgacatggctgctgctcccgcggcgcgccggccaggcgccgcaaccctagcgcaagcagcaagcga

SEQ ID NO: 36736 - DNA, 280 bp, Setaria italica
  Peptide Sequence Number=SeqID_102710
cagcaacgaagccagtcacagtctcacagctactacaacaaacaaagcgatcaatccttgctcactagcccgtgcatcatttcccatggcaaccactgtgatggcctccgccacgagctccctcgccttcgccgccggcggcggcttccctgcccggctcccagcggccagcctagcgccgcgccggcgcgcgccgctcatcgtcagggccgcccagaacgaggatgccgagacaagcagcgcagcggccaagcccaagccggcggcgaggagcccgggg

SEQ ID NO: 36737 - DNA, 424 bp, Setaria italica
  Peptide Sequence Number=SeqID_102711
acccgacaacgacaataccctaaataacccctcccctctcccgaactcgccgctaaatctcggcagcagcatcggcgcgcgccgcccggttccttcgactcccgaaacagcgggccggtaggcccacgctttcaccgccgacgccaccctctcccctcgcgccgcacgctccccgccaccgcccccttcggccaccatctgctacctcgcggcgttccctcccgatgtcgttccgaggccgtggaagaggggccgcgggagagggggagggttcggcgggttcgaccacgcggccaagcacgtgccgcacgaggatttcccggacatcaccctgccggagatgacgtgccgtaaggcgagcaaggaggagaaggcgctgatagtgtccacattgaagctcgaggagttctgggaggacttcctg

SEQ ID NO: 36738 - DNA, 259 bp, Setaria italica
  Peptide Sequence Number=SeqID_102712
gttctggtgtccagtccatttcctattgcctctgaaattgagagaaacagtttagaagatgatttagatgaatgggatgatctaacggaagaataagtagaggatctggaagagaagggatcaaccatagttagggagaacaatcaggtgggataggttgctggggattgggtcaccggtaagttcagccgtaaagggtatcggtttctctggagttggtggtgtgtctggatgagcgaagagctacgggttgctttct

SEQ ID NO: 36739 - DNA, 1678 bp, Setaria italica
  misc_feature (1)..(37): n is a, c, g, or t
  Peptide Sequence Number=SeqID_102713
nnnnnnnnnnnnnnnnnnnnnnnnnnnnnnnnnnnnngtataaccacgaagaaaattctcgaaaaagtactctcagagcattcatcaactcaacaatgtaagagggccagtatcatcccatgagcatcagagggcgcccttcatggagttacaagttacaaaggtgatcgcaaaactggatgaaccatcttatggtaaagaaggcaatatgagcaaacaaaaaaacctcaggccaacagtgcaatacattatcacaggtcgcgctgaggcaacacgagttaacaaaaatgctatcatactgctggcagcagtgaattcatatccacaactgctccttgcgatattctctcacaatgaccggtacactggtgggtggaagcatgccatagtctgttacgatcatcgacacataatcaggaggggttgcatcgtacgtaagatttaggagttggagatttgcattttctgcccagttcttaagatggtcctctgccttcccaggaactttcaaaatgacatccgggtcaccaagctcatttgcacatatagaatcaagctgcactctctcatgaaatttgtatgcctcacagcaaaccagaaccggtactccaaatgcatgtgcaaccatagccacagatgctgtcccaactcgagaataaactgttccatttgataatattgaggacgcacccaggaagactcttgtaacttcatgcatgatgtatgagatggcatttatgtgtgtgtatgtgcagttaatgcccctggacactaatctccgcagtaatccctgtccctcaagctttggacgagaatctaccactataacacgaaacttcctcccaagttcatgagcgtaatccaaaatcatttcaacaactgatgacgatccatatgtcagcaagacatcattatctctgacctttgtgatggcatgactgacaatagccttatctgcaagaactatcttctcatttataaaacgatcaatatcagactgaagactagctttggcttcagactctgacaatgtatgtggtagcttggcaatcctattcttcagaaacctaatagcattgcccatgctaattgaaagaggcctgcactcaataagaaatgacacatagctactgacttttgcagtaagatctctgctgagagttttgtttggaggtgtagtataatcttttattgcctctctgaatgcaagaagcattgctatacatcgaccattgccaccagatacttcaccagacaaatattggagcccaaccttgtacacagaaggatgcattggttcaagttgaaagaattttgactccaggtcagggagctgagtgccatgcacatattgtggcagatgcctaaacaattcaaccctgtttcgagcttctgattggttgactaccgcacgtttttttgctttctccaccttatgcacatcatcaaactgcattcgaggatgaggggcatctaactttctttccctttctgaaaggcgttcggtaaccttcttctcagaagctactgtacttgcagcttgaggcacatctttcttcggagcagtttttgctgacttggcttgcttggaagtcgctggaccagcagattttcctgcctccttcgcggcagctttagcagcacgttgagcctcctgaatagcacgcctctctgcctt

SEQ ID NO: 36740 - DNA, 363 bp, Setaria italica
  Peptide Sequence Number=SeqID_102714
gcggcttctgcctcgggtcgtgcacgtgggccaacgtgcacgcgttctgcctccgcctcgccgcggaggccggcgccgtcgtgctctccgccgggtaccgcctcgcccccgagcaccgcctccccgcggcggtcgacgacgccgccggcttcctgcgctggctccgcgagcagtccgcgaacgccgccgccgacgacggttggctcgccgaggccgctgacttcggccgcgtgttcgtcaccggcgactcggcaggcggcaccatagcgcaccacctcgccgtgcgcgccgccaccaccaggcgcggcgagctcgacctggacccggtcacggtccggggctacgtcctcctgatgccgttct

SEQ ID NO: 36741 - DNA, 1206 bp, Setaria italica
  Peptide Sequence Number=SeqID_102715
atctgtttctgtcaggagtttgcactgtaacattgagagaactagaattttcatccatctggtattctgggagctttcttgttgtgcctgttggttgaacaccataacctttcgtaccccaaacctcaaaccgggaatcttggtgacagatcaattccttgccaatgactgttgagtacgttgaaaagtttacatctaacctacgtgatggctgatggatgttctcaaaaactggaaactttaactgcgtagtctccgagaaaaggacaggatctttcactttattgccagtgaactccaatatttttctcaaaagccaatagcagttcgttaccatgtgactactgtcaagacaatttgaatcaccatagactgcaatcctcccttctcctgcttccatcattccaagaatcgaggacagcttgctttttccctgggtgttttctgtatctagtgttcctatgtgatcctgcacagtccttgagctttcctggagctggaagctatgcaagaaacctcccgctggaaattgcactatatcagttccagaagcatagtgggtctgctcaccatttattgagaagtcaccagtaagtattttgtcccccaaagcaatgccaaatggtgccagaagttcattaagtgcaggtacatttgcacccccagtaattggagtccaccaactgcgggtattctcatcaaagaatgtcatcttaatcattgtatcaacatggtaccactcagcaaaaacagcaatgccaagtcccttgtgtataacatcatccctaagtttctgaatctcttcatcaaagtattcatcctcaagatcaaccataagcaatgtcccataattgctagcatcaaagcaagtaagtggtgatccaagtgtctcaatatagtaccctgcatctcttagcatgttgaacagaatgtgaaagttcgtgtgcaagtgatcaccatgccagtcaaggatatcattatgaacattaagggaatcccttggaacatatcctgacgggtacttgatattatgatattggtcccacagtattctttttgacctaacaggtgttggaactaccttgatcttcaagtaaagaacacatgtactagtccgtgggctgctttctccatgagctgctggggtataaatagtcagagtaacattgccactaattatgcctgagaactgagaaccctacaata

SEQ ID NO: 36742 - DNA, 324 bp, Setaria italica
  Peptide Sequence Number=SeqID_102716
ccggtcgaaggggctgtgatggctgtggtgcgaacccagcggcgacccggcgaaccttgactcctccagcagggagtgcgcgtgtagcacggccggagcggaaggagcgtctgctaccacgctgctcatcgcgccgccgtccaagaagacggcgaacggccgcgccacgaccgcggtcatggccagctggctcgacaccaagcagaagaggatgaaccgaggcatctcttcagactacgagagagagaatccgaggaatgatgtctagaatgtagagtaggagagcaaattggtgatgcagaagctcttgctctcacaagtcag

SEQ ID NO: 36743 - DNA, 665 bp, Setaria italica
  Peptide Sequence Number=SeqID_102717
ttaatttgttactttgttctaagtagtagtcttttttaagtattgttacggtttgtcttctcaaaggctctactaaggaagtatttgagccagctattcaggcagccctgtttgctcctggtgagcaatgtagtgcagctgcaacgctggggatgctgtactactatatgttgtctcatcaggaaaactctgacttcttgttgtgccgtggtgaagtagaagaaaaaattttatctccttggctgcaattgttggagatggaaggcttaaaatttgtagcaaacaaagttccatcaagtatgactatagatacggatagtggatgcatctctgctattgtctgtggtggcgatgtatataaggcagatgcatttgtttcagccacgggactctcttctctacagtccattgtcaaaaacagtccatccctatggtctcatcgagaatttgccaatcttcttcacctgtctgcagtagatgtgatctctgtaaaattatggtttgacaaaaagatcacaattccaaaggttgccaacgtatgttctgggtttgatgattcatctggttggacgttctttgaccttacctcaatatatgatgattattacgaagaatcaataacagtggtggaggctgaattttataatgctagccagctgatacct

SEQ ID NO: 36744 - DNA, 691 bp, Setaria italica
  Peptide Sequence Number=SeqID_102718
ggtcagcagggtccccacggcggttcgcgctgacggcggtggggcgcaccctggtgccgtctggcccgtcgggcgcgtcctacgccgactacgtgctgcagcaccaccaggatggttgttcggtcgcgtggccgcggctccacgaggcggtgctggaccccgcggggcccgagccgttcgcgcgcgccaacgccggcgtccccgcctacgcctactacggcagggacagggaggccaacgaggtgatgctccgggccatgaccggcgtgtcggagcccttcatggaggcgctgctggacggatacgccgccggattcgagggcgtggccacgctggtggacgtcgggggcagctccggggcgtgcctggagatgatcatgcgcagggtcgacaccatcagggaggggatcaacttcgacctgccagacgtcgtcgccgccgcgccgcccatcgtcggggtgcggcatgtgggtggagacatgttcaagtccatcccctccggcgatgccatcttcatgaagtgggtcctgacgacgtggaccaacgaggagtgcacggccatcctcggcaactgctacagcgcgctgccggacggcggcaaggtcatcgcctgcgagccggtggtgccggaggagacggacggcagcaccaggaccagggcgctgctcgagaacgacatcttcgtcatgac

SEQ ID NO: 36745 - DNA, 1245 bp, Setaria italica
  Peptide Sequence Number=SeqID_102719
cctgcagatggagatgcatatcatgctgttggtttctaactatggttctgctcagacaatcccgatcattgtggagcaggagttggagattcaggaggttgattcagagatgattgcagaccctgatgtagagtcaatggcaaaatttggtgatgctgaagtagaagaacctataaatgatgctgaaatggaacaggaatatgcagtaccaagtgtcatggaggaggctgatagctctgttgatgatgcagaagtagaggagtttattgctgagatggcagaagaagtttcaggtagcagtggagaagagatggctggagaagcttcaggtagtggtagtgaagagatggcagacttcattcagaattcggacatcccttctcaatctgctgcggagcctgaacaagcagaggacatggcctccttgcagcaagatgttcagactgaggactccgagggtgatcatgctgatggcaaggaggatcaggaagcccatcatggtgagaagttgggttctgatatgtggccaagttacttggacaaaatctcaaatcctgctacacttggtgctgctcttgctgctattattgttcctgctgctctggcactgctttatatgaggcagaagcaagctcgtgttgccatggactccaatgaaccagttgagcaggttgagcaagttgagcaagtcggaagtctttctggttcaggaagcagcgagggtgtggccaagagttcacgatctcaaaatcctgtggtagaagaaactgagaaacttggtggctctggtgcctcacagtatagcagcagcttgtcatctgggcttggcaggaggagaaaggccagggaggaggggagtttgggccttgagccagtggtgtcgaggagggattccacggcgcagtccacagcatcttatggtagtttcaccacatatgagaagatccccgccaagaaaggaaacaaggaggatgaggcgatgacccctgtccggcgttccagaaggaatgtgaaaccaccagaagcctaagatgtcaggaagctggtcctcttaacacttcctagaggatctaactcttagatttagcatacacttcggttgctgcttatgggcatgtctcggtatttgacagatgtgtatggcgtgataaaaacagttctctgctgtttttcctttaaaatgattaggacttgtgtgtttagcataactggctaagatttcataattgattgttaacttgcttt

SEQ ID NO: 36746 - DNA, 256 bp, Setaria italica
  Peptide Sequence Number=SeqID_102720
ggggggaccaagatttttgtttaagtcactgatccaaccggcgcaattatccatgggtctgaacttctaattttcaacaataaaactgaaaacttgaacactctttacaagaactcagcaagactatctgcatggttgcaggacatacaacaaagtggcagcagcacgactgaactgaagggacaagagaacacccttcaggactccacgggctcacctccgcagcaggaggttgcggacactgaagattcatcag

SEQ ID NO: 36747 - DNA, 585 bp, Setaria italica
  Peptide Sequence Number=SeqID_102721
ccagcagatcgatccggacacagataaaatctcattcccgcagagcgatcgctccctcctgccgcggctgcttcgcttctcccttctttgcagctacggtacgatgcggtgaaataaatcataccgccgcgagaaatttcccaagaaacgcaggcagagaaacagagctcgagtggtgagtagtgagacgacggggagatggcggagtgcagagtcggaggcggcggcggagacggcttgattaagctgttcgggaagaccatccccgtgccggaggccgccgccgccgtgggcgaggctgataaggacatacaacaaagtggcagcagcacgactgaactgaagggacaagagaacacccttcaggactccacgggctcacctccgcagcaggaggttgcggacactgaagattcatcagctaccaagaagtcatcaggagaccagcagcagggcgagacgaccaaccagaaggagaaggtgaagtaagtaagtccttgtacaagatcctgccgtgcccccggtgcaacagtatggacaccaagttctgctactacaacaactacaacatcaaccagccacgcc

SEQ ID NO: 36748 - DNA, 1489 bp, Setaria italica
  Peptide Sequence Number=SeqID_102722
aactagaaaaacttagaaacaactactttaacaaggactcagcaagactatccgaggctgataaggacatacaacaaagtggcagcagcacgactgaactgaagggacaagagaacacccttcaggactccacgggctcacctccgcagcaggaggttgcggacactgaagattcatcagctaccaagaagtcatcaggagaccagcagcagggcgagacgaccaaccagaaggagaagctgaagaagcctgacaagatcctgccgtgcccccggtgcaacagtatggacaccaagttctgctactacaacaactacaacatcaaccagccacgccatttctgcaagaactgccagaggtactggacggctggcggcgccatgcgcaacgtgcctgtgggtgcagggcggcgcaagagcaagagtgcatcggccacttcccacttccttcagagggtcagggctgctctgcccattgatgctctctgtgcagcagccaagactaatggcacagtgctcagctttggctccgacatgtcctccttggacctcacagaacagatgaagcacctaaaggagaaacttgtcccaataacacggatcaagagcagcgatgaccggtcagctggttcttgcactgaaggatctgcaaaggtagaagactcgaaccaaaaggagaaagttacagcagataaatctgcaaatgttgttccacatccatgcatgaacggggtaaccatgtggccatttagctgcgcaccaccacctgcctgttacacctcgggcatcgcaattccgttctacccggccgctgctgcttactggggttgtatggttccaggagcttggaacaccccatggccgcctcactcccagtctgagtctgcttcaccgcttagcactgcttctccagcatccacaaagtccaattgcttcacgccaggaaaacgctctagagactgtgatgaggaaggagataccaaaggacatggcaaggtgtgggtgccaaagacaatccggatcgatgatgcagatgaggtggccaggagttccatcttgtctctaattggaatcaatggcgacaaggcgggcaaagatggcagagggtgcaagcttgcaaaagtttttgagcagcagaaggaagaggcaaagacagcaactcacgcagtcatcaacagcttgccattcttgcaggggaacccagctgcgctctcacgctcactgaccttccaggagggatcttaagtatcaccttaagcctcaatgatataaagaccgaccatttatcatggtacagctgaaattttgtacattagaggattgtaaactaggtatgggcaatggagtgtatgacatagctcgtagctgcaaatggaccttgtaacaacaatagatatttgtagatagctatatgggttggggacggatagagagagcaagttctcttatttgtggataaataatataataattttggttaaaaaaaaaaa

SEQ ID NO: 36749 - DNA, 375 bp, Setaria italica
  Peptide Sequence Number=SeqID_102723
ccaacaatcgttgcagtagttgtggccacaatccatctcggaggcagccgagggggcacatcctcgtaacaaacatcacaggtcacctccgtcgaggaggttgggccggcattattggcgtactgaagaggaataccagcctctgagaacagcctgtccctgcccttctgatcgagaagctcgaaaatcctctccacgtcccagcggtagtggatgaggagcgtccgggcgtgatgctccctcaaccctagcagctctatcaccttcctaagatcctccctctgtgccaacaagagggattccttggtgatcacggatgaggaggaccaatggcagtcctcgaggtgctcgtcctcgaggacctggaggacggac

SEQ ID NO: 36750 - DNA, 271 bp, Setaria italica
  Peptide Sequence Number=SeqID_102724
tatactgttccgccatttccttttactacctgttatctttctcgtatgttatgctgtttgtacaataagctgcatccgtctatgcatttcctttcctggattaaaaaatgcagcttttttttaagtttcctatgctaactagtgtcatgtatgtacttaagacatcgataaggttgctttggttgggcactgggagttggtgcccccaaaatttagggtcttgtcgagcgaacgaacagctgcttccactaccacgaaagagtcttatcat

SEQ ID NO: 36751 - DNA, 418 bp, Setaria italica
  Peptide Sequence Number=SeqID_102725
cctgtcctgcatcaaagtatgaatgaatacagaagagcatagctcaatcctgaacatagcagggctacaccttaatcttatagctctcccactttagtcggagagaaaaagaaacaaaacaaaatgattgcaccaacatgtaacaattcctgtgcggcatcaagcatcggtacaaaatgggtctcagctcaatcgttaccagacctagattcaaaaagaatggctgccataacagttcctaacccatcgaacggaaccctagctcacccctacccagccaccgataactcccaatcaccccacggcccatcccaatatcccacagcggatcgagattcaagaaccaggtcccgacaagaacctgggcgcaccacggttgagcagctacgcgcgaagcaagactaaagagagaaactgt

SEQ ID NO: 36752 - DNA, 619 bp, Setaria italica
  Peptide Sequence Number=SeqID_102726
aggacggaaaaggacaagacaaataggacgaaagggaactccggcggggctcgcgcattcccttttatagctaagcaggagtgagaaagggagcggcgcgggagtgagaaggggaggggcgcgaaggccagggaagaagcaatggagtgctctgcctgggcggcgattgagcgacgaggacggtggagcagaacttcggggatgacgccagcggtcattgggctctggcgtcagggcggcgcaggagcgggtatgccggtggttgagatttggcggaggcgagcgtcgtcgtgcggtagagttgatggaagtgaccgggttaacggcgctagaattgagggcgcacaggtgagaagacaggcggtcacgggcgcgcgggcgagcgcggagcaacagattgtcgggcggtttctggcagggtggggaaggagctgtcgctgccgtggtcgagggttggcggaggagaaatcgtcgggtagcgaagaccaggcggcgcaactgtgtcgaagtgacggaaaagactggcgacatcgggctctgcggccgggatctggcgatgtgatgatgggcgcgggtggcgaggtgctgcagaaaggttgcagaggggcttccgctgcga

SEQ ID NO: 36753 - DNA, 525 bp, Setaria italica
  Peptide Sequence Number=SeqID_102727
ttttgctgaggaaaatcccaatttaagcattgtttcatctggtcgaggaaatgagatattatcgaggacatgaagctggtgatcatgtggatactgatggtatgaagcaggtcggtagcttacctgattatttgttagatatagctgtcaactcttacttgaaggcacagtatacaatgtaccttcatgaatttcttaatacacaattgcaactcaaatcaccagagcctaattcagcaacagatcttgttctcgatccacaagagggtaaatggaaaatagcagatcagatgcacaatgtgcataatgacatttctaaatctggtagatataatggagccatggaggaggtcagttatgctggatccacagaagagccatctaaagtggacaatgttgttgagccaccctacttcataccaggaaagtttccagacccagcatacaagtcaaatgcattacaaaaatacagtagcagaccaaataccaaaaccgtggtgatgtatttggagggaggctacttgc

SEQ ID NO: 36754 - DNA, 488 bp, Setaria italica
  Peptide Sequence Number=SeqID_102728
acaacaatacaactttcaactgaaattatgtaatcaagggctgcaacttgagaagcatgattactgaatttctcaagctcttcttttgtcgctagcatctccttgctaaccaaatttgggaagtatgatctcaattttgatatatatttatcaccaccataaatttcacctgctgcaagatagatccatgtggattcaggatagcccatagcgcgcagaaaaatgcccacctcatttggagtcagtggacagttgccttcagatctctgttcagttgagtttatatccttcagtttccagtggcttgttctctccctcataattctcaactcatttgcttctgaatcactcagaccataagtgcatcccgtaaatgctagcatatccttttcatatcgtagatgaagagcgatgaattttccgtgagacctaacctaggtcctcaattggatccaaaaacccagtgcttggtaaagacagcgagacga

SEQ ID NO: 36755 - DNA, 717 bp, Setaria italica
  Peptide Sequence Number=SeqID_102729
aattactacaactacaatttagacttactagaaatacaactacaagaccataagtgcatcccgtaaatgctagcatatccttttcatatcgtagatgaagagcgatgaattttccgtgagacctaagacgatccaccagcttctgttgtgtaagtgttatgttggctcagaacctttcctaggtcctcaattggatccaaaaaacgcagtgcttggtaaagacagcggcatctcaatctctggatatcaattggaagaccattgttagcaagtcgtgagtcagatttcgggatgtgaactaccttctgattcttccagagctctttcacttcctcataataacttgcaccagaccatgaggtaaagtgtttccgggttcttggagcagattccaagctttcaggcaagtcatccacaatgtggacatctccttccagagctttaataaaatgaggctgatcaaagatatctttaaatgtactggtatcttgccagaatgatcgcttatctaactgagggacaacaagtgttgcattcaccaaacgggcaactgcaaccatatcacagattccagtgcgcatttggttgagtcctccattacttctgacagtcatatagcgatctgacttgcctggaaccttatatctagaggttggtgtaacacaagcatcataaccgtagccaatagatgcccaaagctgctcgcttgacacctga

SEQ ID NO: 36756 - DNA, 807 bp, Setaria italica
  Peptide Sequence Number=SeqID_102730
acccagttgcatatttcttgtcacgaggacaaaagaagtaccattccatatctctgctcttgacacaagatttatctggaagatcccaaggagagtatttgtacagttcaacctccgctatagcttcaacaagtagtttctttcccgtgattttctttttaagttagtatgagcaaagctcaacatctgttggatggaagcgaaatccaggtggaagggaagtttgtgccattattgcaagatcttaacaaggagattagcagaaatagttcagtaaatgaaaggactagccttgacagtaactcaagaagattcaaggttcaatcaaaaagaagattggttcagttttcaaaggggaaatttggaaggaatacaagacagaaaggagagagagacagatcacgacaggttgaatgcttgagtttggagtgagaggataaaagtttgtctcgcaagaggagatctttgtccaagtgcaaagaaagatgtttcagcactcagacaacagtattgggagaaggcgatcttagtccaagcacggaaagagatgtatcagcgcttagacagcagtattcaaaaagatgaatgccttaataggacagatggacactatcaatcaaccacagaatgagaggtcacgagaacaatgagaaagagccctcgagaagacccaagcaaagagcaatccaagcagaggcccacaccaaattgctgaagagcttgggtgggtgagtttttgacagggacgacgagagaacttgagtattgttgattagaccaacctactaagttccttccgctattcct

SEQ ID NO: 36757 - DNA, 492 bp, Setaria italica
  Peptide Sequence Number=SeqID_102731
ttgttgtcgtctagtccttcctttccgtcttcgtttagttgttcccatgccacatcgttcagagcaccaaggatcttgcagtgccagtcgttgtgtctgagtacctgcacaagcacctcggcagtgattctattgttgaggtgatgccatctgaaggccatctccctcagctcagctctccagacatcgtcgttcctgtcttgcttcgacacattcagcatgatattgcagtctaggttgggcaacaattcctcaagacgatgagcatccgaaactgtctgctgtctatttttatcccacttaattgttcaacgtaggatttgcatctgtttgatgttctaataagatttccatggtgttgtgaagtgttggcggtggaaattgtagtatatatgtctgtgtaatccatttgaccgtactaaataagtaaaggaactaaaccaaataagttaaggaaataagaactaactaagaaacaaataacttaaaaaa

SEQ ID NO: 36758 - DNA, 1046 bp, Setaria italica
  Peptide Sequence Number=SeqID_102732
cctgtcccgtccgtcctcggccctgctcggctcctctgctccccgtatcatctcccgtgcctcgagaaggagagcaggagtgcgcgcgagagggagaggggactcggaggaggatcccggcggcagcaagcatggggatcgtggaggaggcgcacaacctgcgggtggtgggcgaggggaagcggggcgtcatcgtgctggcgcacggcttcggcacggaccagtccgtgtggaagcacctggtgccgcacctcgtcgccgactaccgcgtcgtgctcttcgataccatgggcgcggggcccaccaacccggactacttcgacttcggccgctacgccacgctcgagggctacgcgctcgacctcctcgccatcctccaggagctcggcgtccagtcctgcatctacgtcggccactccgtctccgccgtcatcggcttgctcgcgtccatctccaggcccgacctcttcaccaagctcgtgctcctctccgcctccccgaggtacctgaatgatgtggactattatggaggctttgagcaagatgagcttgatgagctctttgaggccattcgatcaaactacaaggcatggtgctcaggttttgcaccactatgtgttggaggggacatggaatcggtggcagttcaggagtttagccggacactcttcaacatacgtccagacattgcacttagtgttgcccagacgatcttccagagtgatgtgcgcagcctccttccgctcgttagtgtcccatgccacatcgttcagagcaccaaggatcttgcagtgccagtcgttgtgtctgagtacctgcacaagcacctcggcagtgattctattgttgaggtgatgccatctgaaggccatctccctcagctcagctctccagacatcgtcgttcctgtcttgcttcgacacattcagcatgatattgcagtctaggttgggcaacaataactacttacaaacaataacgtaccaagaacaattagacaactttaagttaagtttagtaccctaagtaacgtaattactttacta

SEQ ID NO: 36759 - DNA, 621 bp, Setaria italica
  Peptide Sequence Number=SeqID_102733
atctaccgttcatcgccttctagtacttatgtcccatcgtcctcattgagagcttctcggacagatgatagcatttgctgctcgtcctcattgttagctccctgcacatgtgacagcgttagctcctccgtatcaacatttgaatctggaaggggtagttcttggctcggccgtgaggtttctggcgatgcatttagaacgatatcttgacgatgctacagtatgtactggttcatcgcatcaccgagaacctcaatccgctcatcagtagggatgtctatctcgcacgactcatccaacactgtaacaacttgcacccaggcgtattctagcaggtgcctttgggaacacatgatccgttactgtcatgctggttgcgacctctcgaaacttattttgtttcctttcataaggtataaccaacttgcatggtgtatccacttgtatgtcgtcaacgggatatctcacatttgcaatggagccagcactacttggagcaacgaatcctgcctaggcaagtagcatggttggttctgcctgtcgttgagcatcagataccgtcgggtcagccatcgtttggctcatcgcatgatttggccaagaactctaagaactccgtct

SEQ ID NO: 36760 - DNA, 393 bp, Setaria italica
  Peptide Sequence Number=SeqID_102734
ctcgccttttcgcccattgaagaatatttctataagaagcagcatgcgacctgcatggaccgtgcacatcagattattagaagtttgagaagtgatgtcaacataagagaatcaacttcagattcaaatgcttcactaaatgtttacctctccaatgatgacattgccaagctcctagtcccactgctgaaacttcggcaggcatgttgccacccacaagtggggagttctggtctctgctccctgcagcacaaccctttgtcaatggatgaaattttacaggttcttattggtaaggcaaaaatcgaaggagaggaagagcttaggaaaattgtagtcgccctgaatggtttgctgggctagctgctattgaacaaaggaaccaagaagcta

SEQ ID NO: 36761 - DNA, 442 bp, Setaria italica
  Peptide Sequence Number=SeqID_102735
ttcagtttcagggagttataattgtctctttcaaggtgttgtgtaattgtctctgcattcttatgattgcacaagattttcaattgcctctgaaattactatctgtaagaataatgaacatcatgatgctgcaggatcgaatgccaagtcattcgcacaaaaagtgttattgtaatacatttgtttctctaaaaagggaattggatacagtgacataccggagaaataaatcagacatagtagtacatgtgaacatgtttaccattttgttgcaagatggttcctgttcgaatagaaaagtaggaactatcagttgagatgtaaaaaaagagaaatcgactcatgttttggcattaaaagtattgcgcacaacaccacctatttgatattatttccacaaacactgggttttgcccaactttcacatcaacagttgttgtta

SEQ ID NO: 36762 - DNA, 255 bp, Setaria italica
  Peptide Sequence Number=SeqID_102736
tgaaaactcgctcatttagaaacttaaagccagggcagataggtcccttccatggtgcacatcagatagatgtaaactgtaataatattgaatctgcacaagcaaggtagatcctacaagtttgagagcacaaactcatacccgtgaacatgaaacccgcccgctgaaaaactcatgataggcacatttttcatccaaacccatgccccgctcgggtctcgggcgacccacgtgtcacccatgcccgacaacaga

SEQ ID NO: 36763 - DNA, 654 bp, Setaria italica
  Peptide Sequence Number=SeqID_102737
gtaaaagctattaggtagaaagcgcccagctaacattctttacaaaggatctctgcgctgctcaaatatccagacttgcagagattatttattaaaactgtatatgtgacaacattaggagagcatccatcagctatcatcttatcccagcagtttaaagcttgaactatatttgcttcctttgaatgcacatcaatcatgcatgtatggaacacattgtctggcttcacacctttttctttcagttgcctaatcaacatggttgctttttccttgtcatgctgtttcagagctgcatatacaattacagtaaaactgataagatcaaggttgaaccccccgtgctcccatctcattccaaacatggtatgcttcagttaaccttccttctttgcacaatccgtgcaaaagtgctgttaagctaaaactatttagcacggcacagctattttctagatcatcaacaaattcctttgctttcgaggcacctagcgtcaaacaaagtacactgatcaatgatctgtaagtgtaattgtcaggtgttaggcccctatccaccatctgatcatataactggaatgccttcctaacattacctacacggcaatacccgtctatcatgacatttaaaagtcacttcatttggtactaggg

SEQ ID NO: 36764 - DNA, 349 bp, Setaria italica
  Peptide Sequence Number=SeqID_102738
cgcgcgccgctgcagacctcttccgcttcctcgtccgccgccgctcgctacacccctccgacggcgcgctcgcgcccgtcgtccgccacctcgcgcgccgccgcgacttccccgccgtgcgcgcgctcatccaggagttccccaccgcgctcgggcccgacacgctcgacgcttacctccaccagtttgccagagccggccgccccacggacgccgtcaaggtgttcgacgaattgcccgagcaactccgtaaccgcgaggcgctcacttctctggtctcctcgctttctgctgagggcttcccttcgcacgcagagcgtgctgccaagaaggtcgccaatgagatctt

SEQ ID NO: 36765 - DNA, 647 bp, Setaria italica
  Peptide Sequence Number=SeqID_102739
cggcggcgctcctctcccccgccgccgcctcgctcagctcctaaacccctcttaaaccgcccggccgccgccgccgccgccatgacggttcccccccaaggcgacgatgcggccaaaaaggacaaggatgtgcctccaccgtcctaccgctcgctggccgcgccggtcgccaaccccgtcgacaagttcgcgctcctccccgcattcctcaaggtccgagggctcgtcaaggagcacatcgactccttcaactacttcatcaccaggggaatcaggaacatcatccaggcaaacaatcggattgaggcccgcaatgacccaaacatctaccttaggtacacaaacgtccatgttggcacgccctcagttcaagttgattacaaagtcgaagaaatcacgccgcacttttgccgccttactgaccgcacttattctgctcctataaaagttgatatcgaatataccgtcggtaagcagcatgagctgcagtttaagaggaacgttctcattggctacatgcccattatgcttagaagttatgcatgtattctgcatggaaaggatgaagctgaactagcaagactcggtgaatgccctcttgatcctggtggctacttcatagtcaaaggaactgagaaggtcattct

SEQ ID NO: 36766 - DNA, 1953 bp, Setaria italica
  misc_feature (1857)..(1861): n is a, c, g, or t
  Peptide Sequence Number=SeqID_102740
cacaagtgcctgagctggaccaattggatctgatgaatcaacaataatagcatcatatttcccttcaggagaattcctcaagaaatcaacagcatcaccaacatgaagtcggacacgaggatctttatatccaatggataagttcggaaagaactctttgcaaacatcaataactagttgatcaatctcacatatatcaatagtctccactgaatcatgtctggctatttcccgcagtactacaacaaccctatgtggcctggagaggctcactctctgttccgatccaccgcgcacaggtcgtcgttgttcctcctcgccgtcgtatccagagactgggaccttcaaagagcaacaggacccatggaggctggagacgcaggaaacggttctgcagcagcggcacagataaagggaagtggggatgatgccgcccacaaaccgctgcctccttgctgcgtcaaggtcaaggccggcgtgcctgaatccgaggccaagtgccatgataccgtggtttcgggctggttcaccgaacccagatcgcgcttcggtaaaacaagcaaaatgcagtactacaacaaccctatgtggcctggagaggctcactctctgaaagtggagaagattctgtaccaagggaaatcaccttaccaagagattttagtttttgaatcttcaacctatggaaatgttcttgtgcttgatggtatagttcagctgaccgacaaggacgaatgtgcataccaggaaatggttactcaccttccactatgttcaattccatcaccgaagaatgttttggttgttggaggtggtgatggtggtgtactgcgggaaatagccagacatgattcagtggagactattgatatatgtgagattgatcaactagttattgatgtttgcaaagagttctttccgaacttatccattggatataaagatcctcgtgtccgacttcatgttggtgatgctgttgatttcttgaggaattctcctgaagggaaatatgatgctattattgttgattcatcagatccaattggtccagctcaggcacttgtggagaaaccattttttcagacaattgctagagctttaaagtctggtggtgttctttgtaatcttgctgagagcatgtggctgcacacacatttaatccaggatatgctggctatctgtcgtcagacattcaagggtgctgtgcactatgcatggacaagcgttccaacatatcccagtggtgtcattggatttttgctatgcgcgaaagaaggtcgacccgtgaacttcttaactcctgtgaacccaattgagaaaatacaaggagctacaaaagctggaaaggaactcagattttacaattcagagattcatcgggctgcttttgttctgccaacatttgtaagaagagaactggaatcatataccactcctagtacttctaatgaaaaggagaagccaaaagaatcagtttcgaagtcgcagaagataaagatattgccaaacaatgccattgttacagcttcctaggcttgaaccgtactcgatctacttctccgaattctggtgcatccaagctggggtcgtgtatagttgtattcttaccgtaaagatagtcactgagatggtaatgacgatgcgccaggagcatatatatagtgtctttgtgagtgatgactggttgaataaaggaggaattgaactgctgtgatgcctaccagaataatgtgttcccctctgtttctggtgtttgttgtgcacagctgcacaagttcccaacttgcaacttgtaagacctgttgatgtaatataatcctattttgcatttgtcctgagaaaaaaaaaaaaaaaaannnnngtagactagtagacaactaatagacaataggaacaaagacgttaccaaacaataatacccaagtaggtagtacaattaggaatttttagaca

SEQ ID NO: 36767 - DNA, 459 bp, Setaria italica
  Peptide Sequence Number=SeqID_102741
gtctcggtacagcaagtgcaggggattaattgaaggctacctgcgactgcgagcgagtgcgtccagcaagtacaagatgattgatgacacggagcatgatgcggtagcttgagaccgcgcacaggtttctttggttgaggtcctggcaaacctgcctgaaccaggcagcgatctcaggcgttcgatttcgagcgtctggagctggatcgagctgcctggcagctccgctcaggctggaaccaaacaggcctacactaactggattcggtggtggttcggccgctgtttcgtgcaatccaaccactgcataccggcaggtgcggccaaacattggcactagagcgatgccaggtacaatctgggatctcacaatctgtactaatacaagtaagcgaggagagtaaaatgggacttcggtctagtgggaatataatccctggtttgatctagttgatcgtg

SEQ ID NO: 36768 - DNA, 354 bp, Setaria italica
  Peptide Sequence Number=SeqID_102742
cgtccaactgctatcttgaagcctgccggcaccctttcgtcctccgtcagcgtcagcgtcaggcagaggcactctggagctagcgtcgcccatcgctctggttatgcacatgccatgttcgatgaaatgcctagcaaggttgtcattgccctacagatgcacttgtgactcttgatgcagcttcgtatattctaaggattggagttctaacatacaagcaaatggcatcgatcacattcagtccaggaaacctgcatgccctctctgtgcggctgggaatattgggtgggactggggcatttcaatatggtcccttcaactgtggtgtgcagcggcggtggaaaaagccagtag

SEQ ID NO: 36769 - DNA, 315 bp, Setaria italica
  Peptide Sequence Number=SeqID_102743
cgtggttttcacgcttggaagctacagcaagcccaaacaaacagacagggaactcccgcgagcgaaggcgagcggcgattagggttccgccgcccgtccgtcgtccctccgctgccggtcccggacttcctccgccggatcccgtcctcccccatcgaatcctgctctccaccgccaaatccctccctcctctgcacaggaaggtgccatatcgagagctgccaccaccaaatcccggccggagctacagacaagtccgatctcctctgacggcgagctgctgcacaaaagtccggtctccttccactcctttat

SEQ ID NO: 36770 - DNA, 431 bp, Setaria italica
  Peptide Sequence Number=SeqID_102744
ccctccagcgtgtcagtctgtatgcgcaggtagttgtcctcgcagccgaggagctcgaagagcacctcggcgtggatgtcgaccatgtcgacactggcgttgtagagaagtcgatgagcgggttgaagccgtcgtaggcgagccagttgagcatgttccacttgttgcaatccgccgcggtgtacctctccgcctgcttggcgatccccgtcccgatggagatgaccaggatgttcctgtacacgcttgcccccacgccgccgtcgtcttgcctgcccatgcggtggtgcttattccgcttctcctccatgccggcgatcatcgcggtcatggcggccgtggtcgggttgttgcgacgttccagccggcgcacgaggccgccgtgcacgaggtgcacgtccttgtcctgcagcttccggcggaggcggatc

SEQ ID NO: 36771 - DNA, 244 bp, Setaria italica
  Peptide Sequence Number=SeqID_102745
caccaggtacatgtagtcgtcatggccccatgacatgagcacgttgtcgaggccgcagccctcggagtagaccccgaacttggtgttgaacttggggttgtggtagtcagggttctccttgaagtactgcacattgtatttgttgatatattcagaattagggatgaacatatacagaagatccagacattgaattttcacttctctggaatatggcacaattgtagcctgcatcccccaattg

SEQ ID NO: 36772 - DNA, 311 bp, Setaria italica
  Peptide Sequence Number=SeqID_102746
ctgcaacgaaacattcagacaagaagatggcatcaggaattcagaattgacacatacattgacacttccgagttaactgaagaggcaggtgtaatggcataggtcgaggttgccagatgcgaggtcaacaatgcatgtctattataccttgttgatgagggacatgtagtagggcttcaccttctccacatctatcctgacgttgctcttgctgtacaagtcatacttgctgcagacagggggtacaagacagtaacatcacccagttgtaagtaaagtgtccacatctcgttgctatcaaagtatcaagt

SEQ ID NO: 36773 - DNA, 1404 bp, Setaria italica
  misc_feature (1)..(75): n is a, c, g, or t
  Peptide Sequence Number=SeqID_102747
nnnnnnnnnnnnnnnnnnnnnnnnnnnnnnnnnnnnnnnnnnnnnnnnnnnnnnnnnnnnnnnnnnnnnnnnnnnggtttcgtacgttacgttcatttttttagtttttttttttctacctactgcaaagaacaaatgcagaaacttttattcgaaaccgtatatccgatctgcacgacacaaatgggtacactcttgactcgactcaggtatgaaaatgttcatacatgacacattgtgctatatatgcagtctacggtatatggagtcttggaacaaccctttggttcccctcctgggtgccctttattttcaccatctcagcttctccgggaagtacttgttgatgagggacatgtagtagggcttcaccttctccacatctatcctgacgttgctcttgctgtacaagtcatacttgttgaacacatgcagccacttgaggttctccttgtcctcatcgttcatcaggtgcgtgtaggctccatgcttgtgcagagggtagaatgagtgatatctgatgatgaacagccccgcggaaggaagggtggtcttgttctccttggccaccaggtacatgtagtcgtcatggccccatgacatgagcacgttgtcgaggccgcagccctcggagtagaccccgaacttggtgttgaacttggggttgtggtagtcagggttctccttgaagtacttgaagtggacgttgcactcgtcgtatgcgcagccgacaggaaaggtgtcaccaacgactgcccactgtgggagctccccaaaggttgggtggagcagcaccttgcccaggtcgtggatgaggccggtgaggtggagccagtcctggtcggggtagtccttgcggatggcctcggcggtctggaggaggtgctcgatctggggcatgtccaggtccgggtcgctgtcgtccacgaactcgttgagcagctcgatgcactcccagatgcccatctccgtcttgtccagccgcccgtactcgccgcgcatccgggacacgaactcgtgcgtctgccggatgtggttcacgcggtagaactcctccaccgtctccttccgctccgactccgcatcgtagtccctgaaggttttgccgaaggcgttggcgtccggcacgatgaagccgccgtccagcaccagctccgccgggttggcgccggcggcgaccttcctctccgccaccgcatcgagctggggctgttcaatggtgatcgtcatcttcttccccgatcagcctcaccaaaaaaaaaacccttgaaacagcaggaggttcaacgacgacacgaacagagtccaagaacacggcgacggcaatggcgatggccctctgctctgctcaatccgattcggtgttgtcattgggctgtgctcctctccgccaccgcatctgca

SEQ ID NO: 36774 - DNA, 599 bp, Setaria italica
  Peptide Sequence Number=SeqID_102748
actacctctgccgtctcgaagagcgactgggccaatcatgcggttgagtgccattggacgcatggacaaccgcacgacatatatggtaagacttatgttgaaaaattgtgtattagaatatcttgtgcgttttcgctagatagcgtcttcaaatctcttttgcttcatttggaatctctcgccctgttgcatcacccctctagaatgtatataattgtaggatgttgaaatttacaaggaagtgttctttaagtgagtatgaattgtgtttagagtgatttcagtgagacctgtaagagaattgacaagtttgcctttgcgctgggatgttagctctgaaattgcttggagttggttggcatttaagcttgtctgaggtagctgcaggtacaggctggtgatgacgatggtgtgtgctaggtgttgaacaatgtttgttctatgaagaaatatatatatacttaagagttttctgctgaaggtgtggacagttattataatatagtctaactcgttgctcggtgggaatttgataatatacttaacatttagcttttgcaattacttttcggcaatacgatttggcaatagttctctgt

SEQ ID NO: 36775 - DNA, 347 bp, Setaria italica
  Peptide Sequence Number=SeqID_102749
acagaattcattcatttctctatccccccttcccttccccgcaactactctctgctctctactacacgcttccaagaaacagagcaacccacgcagaccagaccgaaagccaaaattctccaagtgatccggtcgccaatccggccacggatcgaggctgccgtctgttcccgccgccgccgctgccgctgccgatgggctccgccgatcgcagtgagatcgatggggtcgtggtggcggagaaaggcgcgaggagctgcgtcgaatgccgcgccaccaccacgcccatgtggcgcagcggcccgacggggcccaggtcactttgcaatgcttgcgggatcggtata

SEQ ID NO: 36776 - DNA, 296 bp, Setaria italica
  Peptide Sequence Number=SeqID_102750
tactttctttcttcttccactcacagtcgtcgcagtcctgcacacacaccacaccacgccacgcccggacaaagcgaacgactagcaggcgggctgcgtgagaatcctctgcgtctcacgaccgatcgccggggaagctagcagcggcgtggacacaagcgaatcacagcgggttcgtatcgagggttgctcgtggacatgggaggtttaaggcggtggctgccgtttggcggcgggtgctgctgctgctgtggcaggcgggcggaggaggcgagggggcgtgggcggagtggggc

SEQ ID NO: 36777 - DNA, 464 bp, Setaria italica
  Peptide Sequence Number=SeqID_102751
tagaactaataagtgtgattgccattcacccagatcgcaatctgatcttttttctttcaactatggaacctaggaactgaaatcatatgacatggatagcgaggaagtgtgcaccctccaaactctaggggtttgcccccataatattttaccatatgttccctatttcgcagagtcatcggcccttgctggtaagcactgaaattgtggcttgtgaggtactagacaaatttgacgttccaggtgtggatcacaggagcagctagcaacataaacatatctgtagaattaggtatctgatggtacttcaatgtattccttcttgtgcattttgtccacttgcggcatgcgtataaattagcactacatatgtatgcaattgcctaagtcgcgcaatgtatgatgtttcaacttcaatcaagttaaagttcaaatcccgcactttgtgtttctagaatcaaaaa

SEQ ID NO: 36778 - DNA, 572 bp, Setaria italica
  Peptide Sequence Number=SeqID_102752
tggtgaagtggggaaagacttgctcaatcaagatgctcccaattctgaggaacacaggcttgggtttcatcaaccgccatttaatagtgttgatcaccttcatcttcattgcctcgcactgccatttatgcccagttggaggcaagtgaaatatacccctctgggacctttagggggttttctggaagctgaaaagctattggaaaggataaaaccagaagcagaagtgtacagttagcatccatactttgaccggtacctgctattcctgcttttattgactactttgtactattctttctggtccgtatactctctgtatgtgatgtgtttatttacatcgtttcctttttcttaaatcttgtgtcctgatttgtacttattgtgttttatgatcactgtttagacttctggaaatacaaaagactagatctgatattttagaactgaatgatcctagctactctagaggttgaactgagttttcattctgtggttatgtattgaaatttgaataagtgcccatcagcacaatattaatgagaagttactcggcgatttttaaataaggt

SEQ ID NO: 36779 - DNA, 548 bp, Setaria italica
  Peptide Sequence Number=SeqID_102753
taaatttaaacaattttaacttaccaataagacccagcatagtactgaataaactaaggtcatgtactgaataaacaatatatatcatctgtatgctgaatagcaggagctgtttatgttaaataatttaacggcaaggatacctaatgacaaagcaatagcaaggatactagacatgcatatatattgtgctctaacagtactgaataggattaactatcctggtgcacggcagccacagcagcaaatagttgaataggattaactaacattactgcagcaaggataagtgagctgtttggctattttttttctatcaagcaatgcaaacaaacaatcagtataaattggaatttatttactgcaaggtacccggcagctaccaatttgcttcccagatataaatgaaatatttttaacaaacagttcactgcagaacaaaacagagaccgaactgaagaggatacaagctaagtaaaaacagaaaaagagatcagcaagctgtagtcaacataggaaattgatagactcttagagtagaagtaaga

SEQ ID NO: 36780 - DNA, 336 bp, Setaria italica
  Peptide Sequence Number=SeqID_102754
ggctggatcgcgaggggaggaggtagttggggtggtggatgcggcagggtacgcgcacggcggcttattaataagggcggcttcctctggcccgcctgcccccgcccggctcggcggctggctgcctggctccgacccaacccaactggccgcggccgcggctgcggttgcgacgcctctgctctggtctgggccgtgggggtcggcgcacggcttgctgcttgggcgaaaggccgtggtggtgccaaagatttttgccaagccgaccacgaggagctgcttattttacggcgtgatagtggggtttgcggcgattagggcggcccgcttcgcggg

SEQ ID NO: 36781 - DNA, 800 bp, Setaria italica
  Peptide Sequence Number=SeqID_102755
ttaaatgatcaacagacgtcctcatttcaaaaaaaagaaaagaaaaaagaaaatgatcactggaccaatagcagttccttctcagcatatttttgaagaacgctcaatgcctcaatgtatctttctcgactgtgtaatctaatctttgttgcaaatgcttctgttcagatcagtttgtcagtaacttaaaatgcttccatcaactagtcgccactgtctgcgagtatagtagcttgaaaagtcttcatgttcatctgggctcatcattggcagggctaggattataggctccatggttgtggatatgctccttagacacatttcagggccaatctctgtgaccccttcttcctttgcaagattcctgaagtaaattgttgtgtagttccccgttgggaagaaaacttctattagatctccaagaaccaactggggctgggagatagctccatcataccaatcttaaggaaaaagaaggacaatgtctatgataccacttctttgggatggaaatatcaattagatcattacatgagtgaaagatatgaaactggagtctgggagatagctccatcataccaatcaagtgtcccagaagctcctatccttttgtcaaacctccatattctgcggtttgatacaaaactaaaacaggagtcgtggctaacattaatattctcaaaaaatgtggatagtttatactctgcaggctccaaagcatatgtctgatctatgaccacgtccactgtacaaagaatagcatgaaagttgtccatatcctctggatctgaactattaaa

SEQ ID NO: 36782 - DNA, 457 bp, Setaria italica
  Peptide Sequence Number=SeqID_102756
ttattagtctaaaactaggtttctttgtcctaggtcttactattgtaagtcttggtttttctattgttgacattgacatgagtgacagaacaatccaaaagaaggtacgggaagcccaagtggcccaattcaactacactcttgttgtaggtgctcaagaggcagagactggaaatgtatccgttagggtaagaggtagtgatggcctagccacgatgagtcttgatggtctcatcacacgtttcagggaggaaatagcagctttcaaatgataacgacgctccataatttgtttctcaagtcattaactccccattcgtgattttgactgagtttgtagtgaattgcatcaaattctacgctcacagttcagtcccgcacaaacatgactgtgttcgaagttagcccctacaattttgctgcttcagtttcagaagcctggctgggtcggtttcag

SEQ ID NO: 36783 - DNA, 358 bp, Setaria italica
  Peptide Sequence Number=SeqID_102757
tttcggtttaaaagtttctttagtttccttattttgtaaagtctttgtacgaatgaagtattcgggatgtgtggtcctttagttgatctatgccgtggaccacacatcccgaatacttcattcgtcaaagctttcgcctgtctgaaggcgtcatcatcatattggagaggaaaagctgaccgcgaaagcctgcagagagtatatggaatttctttccctgattctaaacgcctcaaggaatataaacattttttagaggaggctaagaaacgtgatcataggacactagggctggcgcaggaactcttctttttccatccacttagccctggaagctgcttcttccttccacatggtg

SEQ ID NO: 36784 - DNA, 819 bp, Setaria italica
  Peptide Sequence Number=SeqID_102758
ctttctagttcggttagttcttagtttactttggttcttttcgtcgactgagttttgtagtgaattgcatcaaattctacgctcacagttcagtcccgcacaaacatgactgtgttcgaagttagcccctacaattttgctgcttcagtttcagaagcctggctggtcggtttcagagtttatttgctcaactctgtagatgattggcgagttcctatttgggcaaagggcctgaaaagaatatgtggagcagtcaagtgcctacaaattaacaagtaggaatcacgtgtttatgaactgaattaacatttggcaacgttagcatgcttcagtcggtagtcagtactggctcgctcctgggtccttttttttttttggaaagttgccaggagcactggcccgtcatttaagaggaggaggtgaggcacccgcgcagaccgcgcgctcgaacgcggctcctggatcctgagttgggttcaccatggtcatcgcatttggcatggcatcccaacttcaacttctgaagcggacgggcaacaagctaggttttttcgttgtagaggacggaggcgcagctcatgacatggaagatggaagagacttggggaacaggctcgaaatgacgataacgctatgaattatgatggcagctaccagctagctaggcagctagctagctctgaatgcagtgggtatcagctgactcgactgacccagtgtgcagtagaagtcagcgtatgctgtaatgttcacacgtaagcaaaataggtattttttttaatgtcgagaaatggtgaaagaccctttggttaaaaaaaa

SEQ ID NO: 36785 - DNA, 2581 bp, Setaria italica
  misc_feature (2502)..(2532): n is a, c, g, or t
  Peptide Sequence Number=SeqID_102759
ttcggcggtcgcggagcttacgcatccgctaggtcgacgcctccgccgccgcctccgctcaaatccactttatgctagtgtgcctccggcgaggcctctcgctcgtccggcagcacaccccccgcttcctcccctcgccgcctctccgtcccgcccgcctcttcctccaccacctccccgccgccgacgggatgggtgagagctctgcagccgggaaggacgcgaaggggaaggggaaggccaaggccaaggctcccgccgcggcttcggccctggtcgtcacgcgcgacgactcctacctggaagccgtcacgcagacgaggatccgcaagttcgaggagatccaggcaaggcaggccctcgagcggctcaacatcggcggcgagcttatcaaggtaactctacctgatggcgctatcaaggaagggaagaagctgataacaacgccaatggatattgctaaggagatatcaagtggattggcagctagttgtttgatagctaaagtggacgaaacactctgggatatggggaggccactggaaggtgactgtaaactgcaattgttcaagtttgatagcaatgaaggccgtgacaccttctggcactcaagtgctcatattcttggagagtctcttgagagagtatatggctgcaagctgtgcattgggccttgcactacaagaggagagggtttctactatgatgcttactacaatgatctgacattgaatgaggagcactttggtatcattgaaagccaagctcaaaaggctgttgcggaaaagcagccatttgaacgcattgaggtcagcagggcagaagctcttgaaatgttcgctgaaaataaatttaaggttgaaatcattaatgagttgcccgaggacaagaccattacagtatatagatgtggtcctttagttgatctatgccgtggaccacacatcccgaatacttcattcgtcaaagctttcgcctgtctgaaggcgtcatcatcatattggagaggaaaagctgaccgcgaaagcctgcagagagtatatggaatttctttccctgattctaaacgcctcaaggaatataaacattttttagaggaggctaagaaacgtgatcataggacactagggctggcgcaggaactcttctttttccatccacttagccctggaagctgcttcttccttccacatggtgctagggtatataacaaactgatggactttatgcgacagcagtatagagatagaggataccaagaggtgttgagcccaaatatttacaatatgcaactttgggaaacttctggacatgctgcaaactacaaggagaatatgttcgtttttgagattgagaaacaagagtttggactgaagccaatgaattgccctggccactgtctaatgtttaataatagagttcgttcatacagagagttgcctcttcgcatggctgattttggagttcttcatagaaacgagcttagtggtgcacttacaggtttgacacgtgttaggagattccagcaggatgatgctcatatcttttgcagagaggaccaaatcaaggatgaagttaagggtgttttggagttcatcaattatgtttatgagatatttggcttcaaatatgagttggagttgtctacgaggccagagaagtatttaggtgacattgaaacctggaacaaagccgagcaacaactgacagaagccttgaatgaatttgggatgccatggcagattaatgaaggagatggtgctttctatggtcccaaaattgatattggtgtgtttgatgccctcaagaggaaatttcaatgtgcaaccctacagctggattttcagctcccccttcgcttcaagctgagttactctgccgaggatgaagccaaaattgaaaggcctgtgatgatacacagggcaatcctaggatctgttgaaaggatgtttgccattcttttggagcattacaatggtaaatggcccttgtggctaagccctcgccaggccattgtttgctccgtatcttctggttcagtggaatatgcaaaacaggttcttgccaggctacatgaagctggttttcatgttgacattgacatgagtgacagaacaatccaaaagaaggtacgggaagcccaagtggcccaattcaactacactcttgttgtaggtgctcaagaggcagagactggaaatgtatccgttagggtaagaggtagtgatggcctagccacgatgagtcttgatggtctcatcacacgtttcagggaggaaatagcagctttcaaatgataacgacgctccataatttgtttctcaagtcattaactccccattcgtgattttgactgagtttgtagtgaattgcatcaaattctacgctcacagtcatgtttgtgcgggactgaactgtgatcgatgactgtgttcgaagttagcccctacaattttgctgcttcagtttcagaagcctggctgggtcggtttcagaagtttnnnnnnnnnnnnnnnnnnnnnnnnnnnnnnntattagtagtattagtaggtattacctaagtaggttgtttgtagtccct

SEQ ID NO: 36786 - DNA, 554 bp, Setaria italica
  Peptide Sequence Number=SeqID_102760
gaaaggtgtgtgtcatcctcagttgatgaaagtgggctgacgttctacagcttctgcacctgtgatcgtgatcatgggggtttgattgcagcgatgagctagtctcccctaatgttagactagcatacagaagcagatcgtaccttcacaattctgactaccagtaaactagtggcccatgtgatggcacacaatgagcagcagctacaccccttgggctggttaactagagggcacatttggcagtctgtctttctaattgcctcaaatgctgcagctattttacctgccttctgggccctccggcaaaagaatggattctttacacatctagtggaatttccagtgcattataccattcatgtgatgtgggcacctggtgcattctatcttttcgtgtattattttttttggacttctggctttccttcatggctgttgtgggtacattcatatgtatggctacaattgacgaagcttcaaagagagcaatgcatacagccgtatttatactcacagctcttttagctgcaactggtgcaacaagatctgca

SEQ ID NO: 36787 - DNA, 1090 bp, Setaria italica
  Peptide Sequence Number=SeqID_102761
ttaattatacataattcttctgatacactcctgtccaaaactaggattcagatacaatataatggacaggagtgtatcagaagaattatgtataattaaaaggtcaagtaaacaggacttctggctttccttcatggctgttgtgggtacattcatatgtatggctacaattgacgaagcttcaaagagagcaatgcatacagccgtatttatactcacagctcttttagctgcaactggtgcaacaagatctgcaaatattggaatcgtcattgcgattggttctcttggcctgcttatgggatggctattggaattctctacagcaagaagatttatatgctggccctggcaaattaatcttaatgtgcctcaaagttggccaaacttcggcactttattacggaatactctggaggtgttgaacaaacgcttccgttggatatttctacttttgggtttcatcacattatcatttgcggctacgagctggaagctggaatcgaatagcaactactggatttggcacagcatgtggcacataaccatctacacgtcttcatttttcttcctgtgctccatgcgtgtgaacgcaaggaaccgcaatccagagtcaaactatgagttaacgaggcaagactcattgccaaggtcagaaactcaaccaagggagaactagttaaggaacgaggatgatcacaagtacggtgtccacgtccttctggtagcgatttggatgtcaatgtacgatggttccatacaagaattggctgagttggattttggcttgattcgttttggcagagttgggttatggcagattcgttcaacagtatgcaggcctgtttatgtagttgtacatggcttctgttgcaggctggggcgtataataacttaagaacgcgatcgtagaagagggatttgggaacttcacggtcagctgtatcgcatgagaattgtaaatagcgtggtgcagctaaatgatctttttgtgggacgttcgttgagaacgtggtgaccatgtaaatgttgtaaacgtacgttattccaaaacggaacaagtctctttttttaggaaaaaaaaaaaaaa

SEQ ID NO: 36788 - DNA, 270 bp, Setaria italica
  misc_feature (264)..(264): n is a, c, g, or t
  Peptide Sequence Number=SeqID_102762
gtccacgcctcctctgctgcccccctcctatttggctggaggatggagcggcgggacttgctctcggcgaccgtcctggccgtcctcctggccaccggcatcgccgccaccacggccgcgaaaacggccacctcccagcggcacaagccgcggcggccggtgccggcggccgtctcgtcgtgcgacgtgtacaataagggcagctgggtggcggacgagtcgtacccgctgtacgacgcggcgagctgccccttcgtgcaaggngttcga

SEQ ID NO: 36789 - DNA, 221 bp, Setaria italica
  misc_feature (16)..(16): n is a, c, g, or t
  Peptide Sequence Number=SeqID_102763
cgcatcttgattcttnggaatcacttgttgccatgtcaatatcatcagaatcatccgtatttgtagaatagaatcgaggcctttgctgttcatactcatgatcatccttttgtcttgtgttatttctctggtactgcttctccctcatacctgaatgatatctctgataaaagaaatcaggtaaagctgcactgtccccctcccaatcaccgactgagtta

SEQ ID NO: 36790 - DNA, 480 bp, Setaria italica
  Peptide Sequence Number=SeqID_102764
ttcctcagaatcagatgcgctatggcagctcaatgtccaaagcatgaatagctcgattagtgagagcggagcgaaggttaagaaaccacaagcaaagctaagagacggctcagattccaggactccagttcattcccaaataccatcagcatcgaggaaagccacaaacggttcaaacagatctgttaggcaacctttaagcagaagcgacagcagaaggctttcatcaaatggaagacaagctggtacaaagtagggactcttacaatgatcatgtgcagttttttgccttcttttttttttctcagcgtttgtcatgagagattgcgaggttgttctcgtgtacagcaatgagtgacaataaacccaattgattgtgtcagtgtggtgagttgtgatctcaacaactggtgtgtgaggccattaaccatttttcttattggcctatcaggctatgttgagttgttgctaattttttgt

SEQ ID NO: 36791 - DNA, 2541 bp, Setaria italica
  Peptide Sequence Number=SeqID_102765
ttacgacaagaaagtacaaatacgaatgaatgaaggtgaagtgccctatgaggaggctggattcaatgccgatgctcatcttgattctagcgacatgtcgacgtcgcgcccgctgaagatgttggttagtgcagttttgtccgacaagaggccagatgaagttccacagctcttggagtccatgctgagtaaacttgttgaagaatttgaaaatcgtctaaacagccagaatgaattggtcaaagcggctctaaaaaatggtactgacagcaccaaatccttttcgaaatcaaaggttctggttgagaccactcctaatactagtgggagaaagatggatgcaacagatatttactgtaaccataaacaaacaaaaaaagaagcatcaagagaagtgtcactgaagcaacattcaattctccaacaacagtcaaaaaatgttgaggaactcaaggctgatctgataaccactaaggcgggtatggagtatatgcaaatgaaatattctgaggacgtaaaccttcttggaaggcacctgtttagcctggctcatgctgcttcaggttatcacaaagttcttgaagaaaatcgaaagctatacaaccaggtgcaggatcttaaaggaaatatcagggtatattgtagggtacggccctttttacctggacaaggaagtccttccaccgtgggttccattgacgagggcaacataaccatcatcaccccttcaaagtctggaaaggaaggccggaaaacttttagcttcaataaggtttttggcccatcagcaacacaagatgaggtgttcatagatacccagccccttattcgctcagttcttgatggatacaatgtttgtatcttcgcatatggccaaaccggatccgggaagacatacacaatgagtgggcccaagaacatgactgagctaacccaaggtgtcaactatcgcgcacttggcgatctatttaagcttgctgaacaaaggaaaggaaccttcatatatgatattgctgtgcaaatgattgagatttacaacgaacaagtcagggatctcctcgtcactgatggtctgaacaaaagattggagattcgaaataactctcagaatgggctcaatgtgccggatgcaagccttgtccgtgtggcgtcaacaatggatgtcatggaattgatgaatgttgggcagaagaatcgtgctgtcggtgccactgctctaaatgacaggagtagtcgttcccacagttgtttaactgttcatgttcaaggaagggatctgacatcagggaccattcttcgtggttgcatgcatttagttgatcttgcaggcagtgaacgggttgataagtcagaggttactggagaaagattaaaagaagcacagcatataaacaaatcattatcggccttaggggatgtaattgcttctcttgcccaaaagaatgcacatgtaccttacaggaatagtaaattaacgcaacttcttcaagattcacttggaggtcaggccaaaaccttgatgtttgttcatataagcccagagagtgatgctgtaggagaaaccatcagcaccttgaagtttgccgagcgtgtctcaactgttgaacttggagctgctcgcttaaataaagaatccggagaagttagagagcttaaagagcagattgctcgacttaaatcagcattagctctgaaagactcaggatcggagcaaatcatgagtcgtgactctgacgcatttaacatgaagatgccttcgcctggtttttcaaataggcgacagggtagttgtgatttactgtctagccaaactaacttcagacaaccaatggaggatgtcggaaacatagaggttagagccaatcctacattgaggcaaaagaaaccaagctttgacctccaggatttgttaacatcaaatgattctccttcatggccagacagcaatttaagggtgaattttcagatgggagatgaaagggaaatggtcagtggggactggatagataaggttgtagtgaacaacaataactcagtcggtgattgggagggggacagtgcagctttacctgatttcttttatcagagatatcattcaggtatgagggagaagcagtaccagagaaataacacaagacaaaaggatgatcatgagtatgaacagcaaaggcctcgattctattctacaaatacggatgattctgatgatattgacatggcaacaagtgattcctcagaatcagatgcgctatggcagctcaatgtccaaagcatgaatagctcgattagtgagagcggagcgaaggttaagaaaccacaagcaaagctaagagacggctcagattccaggactccagttcattcccaaataccatcagcatcgaagtaaccaaaatcgtgtattaccttttttggaaccacggaaaataagaaacaccatttcttgaaacaaaaaacacattaatatacaaattaagttactgttgagcaatttcttgaaactttgcagtgtatatgacttaaaccttttgcatggggggg

SEQ ID NO: 36792 - DNA, 220 bp, Setaria italica
  Peptide Sequence Number=SeqID_102766
aatttacacctgcatctgtcgcaggaaactagacgtgctaatattcccttcagaattcagattcatgtaaaaatgtgtggatggaattcccaagcaagcagtgcctgcaaggctgcaacctgctcagggatcttgcagacatggacagaaaatatagatactcacagtcacagccatggcagagtgcgggctagaacagtggcaggatctatcatttgat

SEQ ID NO: 36793 - DNA, 661 bp, Setaria italica
  Peptide Sequence Number=SeqID_102767
agcttttttatcaccattgtgatcactcaacacatttggcaagccattcatttagcgatttcactatcctgcctatcaagaacaggtgtttttacaaaaaagtaactgctgtgtcaaacagattcgggatgttctacaccaccagttactgcatacaaacagtcaatactgcaattcaaaattcccatatataacaactaaattctatgctacaactctatagagttcacaattcagttctgtaatgaggagaagccagattagtctgaccctgtcaaattctgaaagatccaaaacccaccaatgctaagcatgctgatcaccctacaaaatggccacacatgtcaaacactaaaataagatatatagctttggttatcactgaccacatcttgaccattccataggcacaatgaaatggaaatagtaagatcaattgagaaagtttgcattctactatgtacaacctaactaaaaagccaacacggcaaacaaagaatcacccatgcaaacggcacccgagctaatacagttgtttgctgtactttcagtttatgagctgaaaactatctaatggactaccacaatttggcaagctttcagtctatgagcagcaagaaatatatatagctacaattgaaagaacaatcgactaagccaa

SEQ ID NO: 36794 - DNA, 394 bp, Setaria italica
  Peptide Sequence Number=SeqID_102768
gttcccggtcctcttttccagtgtaatcagttgtattcattatatgaaaaggaacattaatattccatttcttaaattcctcatcccaagcaaaaagcatcccacgaggtgcaataatcactggccggcagtctggaaacactttcatatatgtctggataaatacaattgctaaccgtgtcttccctgtccctggagcatgacagatcacacatcctccaacaacatcaggctttgctccatgcttcagctcatcaagcctaatatcaccaactagatttgtccacataaattcaaatgcttcacgttgatgctcgtacatagtagtaatgacccctggaatcagatcccacaccgttccatatagatggaaatcttgagagtgctcagtggc

SEQ ID NO: 36795 - DNA, 673 bp, Setaria italica
  Peptide Sequence Number=SeqID_102769
ccttgcatgactctaggcctagctactgatggcgagtttaccggaatgccacttctagctgcgatccagcttaaaacaaatagaaaaattctagaaagatgcagttcctacattaccatacaactagacctggaacaaaaactaaatcctgccaagccgcaagatttgcagtaactaatgtgcatcttgacaggaattgatacagacttatacacttttagggttggggtgaggtatccttaaatttgggcagtcatacaatctacccgtcccatccgtctatctacttctatgatggaacagttaatgataaagagtatccacactacttgtttggtaaatagattttctttgtgaatatcataatactgcttccacgtacaagggggtggatgatttattgtaccaataaaaatcaggaaatcattcagttcctacaatggcagtttctactgccttaatttcgataaaattcaaatccaccttttacacaacagaattaattatactaatcattcgacagtaatggaaaaattgccatagaattaattatttctatgtgacagaaataattgttataataactatgcagcactaagggaaaaatcgtgagtcaaacctgccttctacatgacagaattaattataccaactgttcaacattacggcaaaa

SEQ ID NO: 36796 - DNA, 632 bp, Setaria italica
  Peptide Sequence Number=SeqID_102770
ccgatcctccatttccccaacaccgccgagagacagcagccggcggcgacagacaaatcgattcgaacgcgcgagcagccggcggcgatggcgtggacagcgaccctgtcccggagcgtgaaggagatccgcttcctcttctgccagtcctccccggccagcgccgccgctcgggagttcgtgaagaagaactacgcggagatcaagtcccgcaacccctccgtgcccttcctcgtccgcgagtgctccggcgtccagccccagctctgggcgcgctatgaaatgggtgtggagagatgcgtgaacttggatggcctgacggaagcgcagattgataagaagctcgaggagctcgcaaaggctggagagtctgccaacgcgaagtgatgttgggaagttccacaacctctcgtcatgatgttcacaaataagtgaaactttagcagtggttttcctgctgtcatgacttctgtgctaagaatgaaatgaagtcttggattgtatatctttttgcgagaaagatactgttattcacttgtttgttatgcattcttcttgagtttatgcgtatctcattggttcaccagtattgcagtaactgaaaaccgctaatagttctgtaacgttttctt

SEQ ID NO: 36797 - DNA, 748 bp, Setaria italica
  Peptide Sequence Number=SeqID_102771
ctagtatcattggggttttcagttgttccagttgcatcacagacatggaaagcttactttgggctatcacgaagtgaatcgccaaaggtctgtgactcatgttaagtggagcatacagtggctttatgccaatcatttacattgtataaaatttgcttgtttgttaattagagctcaacattagtgcccaaatgttaacacaatacttttgtctgccctattgatgtcagtaagacagtaagattgcagagtaagatgtctacttaaaagaataaaagaaatggtagatgaatttgcaaacctggttatgggataagctaaaactttggtggaaatcaatgggttttgctgcagtgatatgcattgatgacagacacaacaagcatgtaattgtaactaatgagattttttaattaatatccaaaaatttccctgtcctgcatctgaaataatcacttgttaccagcatcattcttatgttctaccagttcaccagatctaacatagtcctgttgtgtttctaatgcataatttcttacaggatgatagcagacaagctgcatccattttgttccctgacaaagctctatccctgaagttgaaaaaacatcatgggcgagcggaggctcttctgttagcagcctatgggaaaggccttgtcctaccccaacttgacattgatgttgattgctgattgactggccatttttcatattgatggcactgacaaacaaattgttgcgtaggg

SEQ ID NO: 36798 - DNA, 403 bp, Setaria italica
  Peptide Sequence Number=SeqID_102772
tcacggtctcgatgcacctcccggaactacggcatacattgagaagtctagtccatttccaactgatggaaagctgggatggtggagtacaggtttttcatatggcttgtggattgcttctctagtatcattggggttttcagttgttccagttgcatcacagacatggaaagcttactttgggctatcacgaagtgaatcgccaaaggatgatagcagacaagctgcatccattttgttccctgacaaagctctatccctgaagttgaaaaaacatcatgggcgagcggaggctcttctgttagcagcctatgggaaaggccttgtcctaccccaacttgacattgatgttgattgctgattgactggccatttttcatattgatggcactgcaaacaattg

SEQ ID NO: 36799 - DNA, 650 bp, Setaria italica
  Peptide Sequence Number=SeqID_102773
taaatttaagtaactttaacttaacttaagttagttacaattacggggttttcaagttgttccagttgcatcacagacatggaaagcttactttgggctatcacgaagtgaatcgccaaaggataatagcagacaagctgcatccattttgttccctgacaaagctctatccctgaagttgaaaaaacatcatgggcgagcggaggctcttctgttagcagcctatgggaaaggccttgtgctaccatcagggaagttcagcaaaccccaacttgacattgatgttgattgctgattgactggccatttttcatattgatggcactgcaaacaaattgttgcgtagggggttccatcaagtacataacttattgaggtttgagtgcactgtgtgcctgcagaactgcaacagagatcgtagctgacccattcaacttttgtggaaagcattggatatttctcattgtattttgagcgtaacaggctagcgcagatgagacatgaacgtttttttaacatgtacctattccaagttgagaaggaaccaaagcttcgcaaccgtttgctgagactgttgtaatcttcaagaactttttttaacatgtacctattccaagttgaaaaaagggaaaaaaaaaaaaaaaaaaaac

SEQ ID NO: 36800 - DNA, 662 bp, Setaria italica
  Peptide Sequence Number=SeqID_102774
ttccgccgctgccgctgccgccgcgcgcccgctcccgcagcgaccactcgtaccccgaggtcccgcgcgggtgccaaggcccgggcgaagctcctgttggaggccgagccccgggacccctggctcgcctccctctcgcttctcccggccgacgacagctccggcgccggcgccgcccccaacgggtgggcgattggggtggatcccgacaccggcggtgccatcgccgtcctctcgcccgacggctcctctcaggtgttcgacaacccgctcgtgcacattgtggtgtcgaaggtcatccggaagcgccttgacaccaagtccatcatccagctgcttcgcggtctcgatgcacctcccggaactacggcatacattgagaagtctagtccatttccaactgatggaaagctggtctgtttcttgtctcccaaataacatgcactaaacgtccttatttgcaagatagctgtaactagcacatcaattttctctgtgttggtttttggagcgatattatgctgtcaggtagtgcatatgagagtagtttgagcattgatagtgctcactaacatgtcttattactatcctacacttgtgcaaccactaaattctgcccttgatattttggtattctcatctttctgtatttgtcctagcat

SEQ ID NO: 36801 - DNA, 482 bp, Setaria italica
  Peptide Sequence Number=SeqID_102775
acctgagctaatcagcagatccatgatctgttcctcactgacccatgaaggcaggaaatctgatagttctttcttcatttcctctgtaatattctccctcaaagtatccagttgttcagaagcagaagtgattgctggtaacaaagcagcatcctccccatcatgcagaatcgagcacttagcaacatctttgcagctatgagtagcatctgttgacctacgatggaatgccatcaagaactcctgtttgtttgctgtctcgtctaccaacccagaaaaatgcttctgcattgcaattgcctccttactgtcgagcttcccagcatccactccaacagttgggatcacccgctttgggtgcaaaatttaacatagtcacgcaactcgtcgtagcttgagtgctcactataaggaacaagatggatctcaagtgaatctttcaccctaacagcaaaaccttccttcttggtttcatacatcca

SEQ ID NO: 36802 - DNA, 415 bp, Setaria italica
  Peptide Sequence Number=SeqID_102776
cgtgttcacgtcgcaccattcccatcgcaaagccaccggctgacttgcgttagttgtgtgagattaaagagctgggtcggaaagtctgacgggagattgttaggagagctggtagctctcatctatttttttttttttgtcaagttaggggtaagactatctagttgactgtgagctctagtggacctggatcagatgaggccccaactttggcgtgttgtgccggaaccattgcacactctcaactgtttatatccacaattcagatcaaagcatcattcacttttttctagaactctcctgctatggacactgagaaatgacgcaccaaaaggagctggtaatttaggacatcacgatttcactccaactttattccagtccacaagaaaagttcaggatcttttattacccg

SEQ ID NO: 36803 - DNA, 381 bp, Setaria italica
  Peptide Sequence Number=SeqID_102777
cctccttcttcaatatatcttcaagtgcaaagacaacatgagttgatgagaaattctaagtttacaataggaaaggagttaaacaacaaaacgtgcaggtatcagatattcatctctccgaatagttactacatcatgactacatgatatattcaaatgttgacagcaaataactaatcttcaaattcttcttcaatcagattgtgtccttactcaatggcactgtgaatctgcatttacactcaagagagctcttgtgccaagcatcaaacacatgtattctatgataattattctgtacgggggagctccacaagaagtgaggcaagtatcatggagaaggaaatggtggattaaagtggtgaactacaaggcaaacaa

SEQ ID NO: 36804 - DNA, 422 bp, Setaria italica
  Peptide Sequence Number=SeqID_102778
ctagaagcatccgcttccgtccccttcctcctctccttcgcttcgccgccgaaccaaaccaccgcaccccttgccgccacgttcccgaccctcctcgcgtcctcctccgtgcgcggtcggcgtccacgaggccgctcgatcccaaaggtcagatccgaactccatcctggtccaaaccacgccgaatttttctaggttttggtacggatctagggtttgccgctgaatctcgtgtgaggctgtcgttcggttcgcttatggccgctgggcgccacggagggtacagggattacgaggcgagggagcgggagctcgacgctgagggctccaggaggagcaaggagcagcagaaccatcttggcggccgccaccgtgacgcggaccgccgccgcgacggcgggcgcagcaggggtggctaggta

SEQ ID NO: 36805 - DNA, 240 bp, Setaria italica
  misc_feature (224)..(224): n is a, c, g, or t
  Peptide Sequence Number=SeqID_102779
gccgcgtggtgccaacgccgcgttcgttttttaaacgcggggccgcgaaacgaccgccgcgggggagtcgctgcggcacggcgccgcgcggtcgcgtgccgccccgcgaaaacaaacagggccaaggactatactatccgtatgtacatggagattggctgtggtacaatacatatcttatcttgacataaaaaaatataaactctgagctaagtctattttanctcatgcgttgataca

SEQ ID NO: 36806 - DNA, 1029 bp, Setaria italica
  Peptide Sequence Number=SeqID_102780
ctagaaggatttgagacagaggagagatgagcgagcgaatgagttcagggccattcagttgcagatagttcgtctacaagcagaaatttcaggaaccattgatcatggtgatatcactgctcctgtggtagatgagaatgatctatcgttaaagagattgggagaattgaaggtgcaacttaatgaacttcagacagaaaagaatctcaggcttcaaaagattgacgtccagatcaactgtattaatgaaatgtgcaacataatgtctcttgatcttaaaaaggcactctatgacgttcatcctagttatgctgagttgggaagaagcaaacctgtgagtattagtaacagcacgctcgagaggcttgcaggaaaagttcatgcattaaatcatgaaaagaaacaaagacttaggaagctccaagatcttggcagcacactcattgagttatggaacctcatggacacaccagttgatgaacaaagatgttttgaccatgttacttctcttatcaaagtgtcacaaaatacagtgatgccccatggatgccttgcacatgaccttatcgagaaggttgagattgaagttaagagactgacccatctgaaagccagcaaaatgaaagagctagtcttcaagaaaatgactgagcttgaagaaatctatagaagtgttcacatggagattgatagtgactctgagcggcggatccttaatgatctcattgattctggtagagcagatctatcagagttgctggcaggtatggatgatcgaattgcagaagcaaaagaacatgctctaagcagaaaggacatattagaaaaggtggagaaatggacatcagcatctgaagaggagacttggcttgatgaatatgaaagggatcagaaccgctacaatgctggtcgaggagctcacataaatctcaagcgtgcagagaaagctagggtattggtcaacaaaaattccaatcgcttatggagaatttgactgctaaaattaaagtgtgggagaaggagaagggt

SEQ ID NO: 36807 - DNA, 377 bp, Setaria italica
  Peptide Sequence Number=SeqID_102781
agccagtaactgctagggtgacataaatgataaggaaatggttataaatttttgcaatttacattattatcttgtgaattatggctacactttattgaataatttgtttctgctcctcccattcgtagttggcagctctggacttcattgcatgtgcagctgccgatgcatttgctatgactgacccaggaagtcagttctcttctcttgttcaaggctaccgcatgtactatggtggtgggaatcttcccacaataagaccaaataaacggcggttagctagcatacttgtgaagaatgccacaatcgagtggcaagagtttgaaacaagagtaagaaaactcatacagcaaactaagcaagttcatgagagacct

SEQ ID NO: 36808 - DNA, 1842 bp, Setaria italica
  Peptide Sequence Number=SeqID_102782
tcatgatcagtgcgaatggtggcataaaccaagcaaagggttgcgatttgcaatgctgttacaatctcccggctgctcaatgcaactcttgtcattccaaaattcttgtacagtaatgtttggctggacaaaagtcagtttggcgatatatatcaggaggattattttatcaattatttgaaatctgatattcggattgtaaaggatcttccagtagagctgcaatcattagacctggaggcgatcggtagtcttgttaatgatacagatgtcatgaaagaggcaaagcccagtttatacgtgaaaaaaatactgccaattttgctaaggaacagagttgttcactttataggatttggcaatcgcttatcttttgacccaataccttctgaccttcagagactgcgatgcagatgtaacttccatgctcttcgttttgtacccaaaattcaagaaatgggtgcacttcttgtagagaggttacatggccataggtcccatttgtcgcctttgaaggatactcttttaggtccgtttgctgtcaagtctgcccccagtgcaaacaagagtgatgcatccaaatacctggctgttcatctcaggtttgagattgatatggttgcatactcattgtgttactttggtggtggcaaagatgaggaagatgaattagaagcttatcgccaaattcactttcctgtcctgacagaactgaagaagacgacaaagttgccctctgctgctttcttacggtctgaaggcaaatgtccccttgcacctgaagaggctgtgcttatgctagctgctattggtttcaagcgcagcacaaatatttacattgcaggtgctgaaatttatggagggaggcataggatggctgccataagtcgtctttatcctgctttagtaactaaagaaacccttctttctccatctgagcttgaaccatttaggaatttctcatctcagttggcagctctggacttcattgcatgtgcagctgccgatgcatttgctatgactgacccaggaagtcagttctcttctcttgttcaaggctaccgcatgtactatggtggtgggaatcttcccacaataagaccaaataaacggcggttagctagcatacttgtgaagaatgccacaatcgagtggcaagagtttgaaacaagagtaagaaaactcatacagcaaactaagcaagttcatgagagacctgttgcaagaagcatatttagacatccacgatgtctagagtgcatgtgcagaacagagcattgagactttttgatactttcttgtgcctatacccatacttttttcagagaaagacgatgccaatgaggtcgccaaagctagttcttttgtgcttcggctgacatctgggcatatctcttgctcctgaactactgttggaatcaaattgaaacaagaacatacagttattgagctcttacagttaagcagagaagcagtatatctaacttcatccattctcctactgatatgattggtggtcatctactactgaacgttatgttggatttggattatttggcagtctcctgtgtgatggaagtggatcagggactcaattttgcatatgcatcagtgccaccatatttcttatggggcgtagttaaactattctgtgaatggagacgcaccatctcattgaccaaaggaatattatgttgagcaagctgagcaacggatttctggtcttaacagtgcctcaattataatcagattatcattcgataagtcagcttgctagaatttcgtgaacaggatatgctatctccattgtgattgttatcatttgataggggcaggtggcac

SEQ ID NO: 36809 - DNA, 533 bp, Setaria italica
  Peptide Sequence Number=SeqID_102783
ttttatttgtttctttctttttttcttgctgcaacacttttaacatgttggctatcaggagctgtgccgtgtttcatatttttcttgtaattggggttggtattttcaataacgcctgtggtagtggcaaggtatcttgctagtgatccttatatcgtggcaatttgcattgttgtggatgtgggtagctaggtcacatacttaagagcaaaaagcacacgtttgaaggagccaaggaggaaagtacttagtatgagtaaatctcttaggtatagacaatttagtgtagtaatgggaatcatatcttagtattgttagctatgcaaggcgttagccctattaaagggctaaattggcaagcaatggaaataaactgttctaattttacctacattgttgctcctcctagacagactcttctaattctcttcctggtctccgccccttcgctttgtgcctgattatttaagtagtaggcacccgtcttcttttttaacagtgttttcccttcacgtgctaagccatacaacttg

SEQ ID NO: 36810 - DNA, 1097 bp, Setaria italica
  misc_feature (1095)..(1095): n is a, c, g, or t
  Peptide Sequence Number=SeqID_102784
ggcgaggaccgcctccacgtgatcgacctcgacatcatgcagggcctgcagtggcccgggctcttccacatcctcgcctcccgcccgcgcaagccgcgctcgatccggatcaccgggctcggcgcctcgctcgacgtgctcgaggccaccggccgccgcctcgccgacttcgccacctccctcggcctgcccttcgagttccaccccatcgaggggaagatcgggcacgtcgcggacgccgcggccctcctcggcccgcgccaccaccaccagcagcaggacgaggccaccgtcgtgcactggatgcaccactgcctttacgacgtgacggggtcggacgtgggcacggtgcggctgctcaggaccctgcgcccgaagctgatcaccatcgtggagcaggacctgggccacagcggcgacttcctgggccggttcgtggaggcgctgcactactattcggcgctgttcgacgcgctgggcgacggcgccggcgcagccgaggaggaggccgccgagcgccacgccgtggagcggcagctcctgggcgcggagatacggaacatcgtggccgtggggggacccaagcggacaggggaggtgcgcgtggagcggtggagcgacgagctgcggcgcgccgggttccggccggtgtccctggccgggagccccgccacgcaggccaggctgctcctcggcatgtacccgtggaaggggtacacgctggtggaggaggacgcatgcctcaagctcggctggaaggacctctccctgctcaccgcgtcggcatgggagccggcggacgacgacacagtcgccgccgcccccacgccccgccacggaagccaggagacgtgatcgcaggacaagattttgcagcaccagctagattggattggatcgcctctgctgctaatctcgcagctccctcgtggccacttttgttctctgtcttttctcttcttgtgagtaactatgtctgtgatataaatcgtataggattcggcattcgttcccacaccatgctcagatcaacattccatttcagatttttgtaatgctgcagcttcagtttcagtacaaaaaaaaaaaaacaanga

SEQ ID NO: 36811 - DNA, 326 bp, Setaria italica
  misc_feature (292)..(326): n is a, c, g, or t
  Peptide Sequence Number=SeqID_102785
gaatggagaaagggaaaacagagcgctggtgtctttgccttgagctgagtgtgtgggtaccggatgtctgtttcatcccttttactctctggtcatcaggttatttctcgattgattccatgtttgttttacacggtgaaaatcttcttcacttgagctgtggattctttggtctgtaaaggcatggtgtttctgtccgtacgtactgtgagtgtacatgaagaagcatgtactggaacgaatgctggagtggcagaagtcttacttgtaacttgtaagtaaaatttgtttnnnnnnnnnnnnnnnnnnnnnnnnnnnnnnnnnnn

SEQ ID NO: 36812 - DNA, 625 bp, Setaria italica
  misc_feature (618)..(618): n is a, c, g, or t
  Peptide Sequence Number=SeqID_102786
tcatccgagccagtgagactgctggaagatatgtcacctaccgctacgttgtctgaactgagcttcgctacattctcatggcttgaaacatttgctgccgctgagaatcagaagtaccttcggagtgccgtggtgcttttcctgagtcattacgcctttttagcactagaaatagaaatagttttcctgtagctgtagctgtgttccatctcattttagtgaatcattgtgctgatttgaagaggacaagctttgacctgtctcgacctccacctccagttgccaggatgctatgttaattcatgccttctggaggcaattgtttgtctgacggggaggggtagtctggtttctgagattcaagcacgaggcttttgtctgatgcacgcatgacctgcaaatctctttatatatactaacacctcagtaggccacctcagtaggctatcacaaaaacaaaaacaacataaaacacctgatctacctgtccatggctctcctgtcaatggagcaagcaacgtgcctcctctaccgtacctgtccatgactctcgtcttcccattcctacttctcaagcagctcaggcgtcgtggtcgcggtggcgttaggctgccaccnggcccgt

SEQ ID NO: 36813 - DNA, 456 bp, Setaria italica
  Peptide Sequence Number=SeqID_102787
aagctgagcttcttgtgaacattaaggagcatgtcctagtgccggagcacgagctcctgacactggatcagaagaagaagctgctagaacaatacactgtgaaggaaacccagctccctaggattcagattacagacccaatagcaagatactacggcatgaagcgtgggcaggttgtgaagatcatccgagccagtgagactgctggaagatatgtcacctaccgctacgttgtctgaactgagcttcgctacattctcatggcttgaaacatttgctgccgctgagaatcagaagtaccttcggagtgccgtggtgcttttcctgagtcattacgcctttttagcactagaaatagaaatagttttcctgtagctgtagctgtgttccagcagcttcttcttctgatccagtgtcatttgaagaggacaaggctttgacctgtctcgacctcca

SEQ ID NO: 36814 - DNA, 1054 bp, Setaria italica
  Peptide Sequence Number=SeqID_102788
ccgctgcgtctccttccccaaacggccaaacccccgccccaaaccctacccgccggcacccgtgcgccgctcccgccttccgtcccgcgccggcgtctccccggacccgcaagacccctctcagaacccaccggagggaagcggaaaagcgggcgggaaacggagggcgatggcgtcgtcggagggggagacgaaccggctgtggcgcatccgtcgcacgttgatgcagatgctgctcgaccgcgggtacatgatccttgagaaggacgacatcggcctcaaaagggaggccttcatcgaccgctacggcgaccccgttcgccgcgacgacctcgtcatcaaccgctacaagaaggacgaccccgccgaccagatctacgtgttcttcccgaacgagcccaagcccggtgtgaagacgatcaggaactacgtcgagaagatgaagcaggagaacgtcttcgccggcatactcgtcgtgcagcaggcgctcagcgcgttcgcacgcagcgccgtgcaggaggtctcccagaagtaccatctcgaggtcttccaggaagctgagcttcttgtgaacattaaggagcatgtcctagtgccggagcacgagctcctgacactggagctgaagaagatgctgctacaacgatacaccgtgaaggaaacccagcttccccggattcagattacagacccaatagcaagatactacggcatgaagcgtgggcaggttgtgaagatcatccgtgccagtgagaccgctggaagatacgtcacctaccgctatgttgtctgagcttcgctacattctcatggcttgaggcttctgtcgtgaacatcagcaagtgaaaattctccccaagtagttgctaatctcgttgtgtactttgaaacattgttgcctctgaaaatcagaagcaccttcgaagggccctccctgagaactgattggcattatgcagctgtgttccatctcatttttagtgaattgttgtgtcgatttgaagaggacaagtttgacctgcaccgacttccagttgctaggctgctttgtgtc

SEQ ID NO: 36815 - DNA, 381 bp, Setaria italica
  Peptide Sequence Number=SeqID_102789
agttttaataattagttgcatattgccttatccaagaaaggccacatgtcaaaaatgaacttgttcatccagtcaatccgctcatagtctgggctcttcacccataatggaatatctggtattgttgtctgcagggtctcagaatctaaatcccgtaaaggtctaatgacaggatcctggaggcggcgagcggcgaagtagcggaggtagaggaagtaggcggcggcgaggccgatggggaggccgacgcagaagccgaggacgccgccgacgaggcccatcgccgccgtcctccctgcgatgatcgcgaatgccgctgcgccgccgtcgccgcccacggcggcaaccgcatggggagtcgggaaccgcccgtacgcgcgg

SEQ ID NO: 36816 - DNA, 675 bp, Setaria italica
  Peptide Sequence Number=SeqID_102790
cttccgctgcagggcctcatccaccatggacgcggcttcggcgagcttgccggacgccgagaagaagactacaaccgtctttgtcgccggctcgacggggcgcaccggcaagcgcatcgtggagaagctgctggcgaggggcttcggcgttgtcgccggcacaacggacgtgggcagggccggcggcagcctgccccaggaccccaaccttcagctcgtcagggctgacgttacggagtctgctgacaagctggtggaagtggtgcgaggcgtggacgccgtcgtctgtgcaacgggattccggcggtcctttgacccttttgctccgtggaaggttgacaactttggcacagtgaacctggtcgaagcatgccgaaaggcaggcatcacaagatttgtacttgtcagttccattttagttaatggggccgccatgggtcaacttctgaatccggcctacattgtgctcaatctacttggcttaacactggttgcaaagctacaagcagagaaacacatcaggaaatcaggaataaattacaccattgtaaggcctggcgggctgacagatcaaccatcaactgggaatatagttatggagcctgaggtaaaagccttaacctatttgtctgatgctattactaatcctagcttttctaagtttaaagttgggct

SEQ ID NO: 36817 - DNA, 1241 bp, Setaria italica
  Peptide Sequence Number=SeqID_102791
gagcaaactggcacagtggcacggcatggcctactggtaacatctcaaaccaagcagcagccacgcggccacgccacacaggaaactcatggccagggctgtctgcgtcgtcaccgctcgcccccacctccccctgcctccggctctcgccctccctgccgccgcaaaaaagcctctcttccgctgcagggcctcatccaccatggacgcggcttcggcgagcttgccggacgccgagaagaagactacaaccgtctttgtcgccggctcgacggggcgcaccggcaagcgcatcgtggagaagctgctggcgaggggcttcggcgttgtcgccggcacaacggacgtgggcagggccggcggcagcctgccccaggaccccaaccttcagctcgtcagggctgacgttacggagtctgctgacaagctggtggaagtggtgcgaggcgtggacgccgtcgtctgtgcaacgggattagtctatggactatatattaagaattactgaatgcagatgatatgccttttgtttcaccggcggtcctttggtcattttgctccgtggaaggttgacaactttggcacagtgaacctggtcgaagcatgccgaaaggcaggcatcacaagatttgtacttgtcagttccattttagttaatggggccgccatgggtcaacttctgaatccggcctacattgtgctcaatctacttggcttaacactggttgcaaagctacaagcagagaaacacatcaggaaatcaggaataaattacaccattgtaaggcctggcgggctgacagatcaaccatcaactgggaatatagttatggagcctgaggacactctttattccggatccatatcaagggatcaggttgctgaagtagctgtgggagcattattgtgtacagagtcttcctacaaagttgtcgagattgttgcccgggctgatgctccaaatcgccctctggaggacatgtttgctgcaattaagcaaaattgacagttccatcacattggttacataggcagacgcgcccgaattatgaggattgtatcagctatgcagaaagcgaatgtgtccttagaatgaaggatactgccaagtgttttagtttgctttacaacaaatgagcattgtagaccagattataatccatatgtatttgacatgcggtaaaatgaggtgtttataaaatatatgctgatgttagttataaacaaaaaaaaaaaaaaaa

SEQ ID NO: 36818 - DNA, 333 bp, Setaria italica
  Peptide Sequence Number=SeqID_102792
aagaattgagtatcatagtgtattttggttctggacagcagtacatatatccgtacatgctccaggtaaaaaatggcttgatccctctcaaaacgttcatctgcttaacacggcgaacttcacttccttcgcgcacacaatatggcaacaacaatggatatcccaactgcggctactgggatcacccagtactgcaccgcactgtccatacagcttgctggcaaatcccgtgtcttgctccttcctgacaacctccatctcaggaatctcaggagtcgggtccaactccccaatgaagtagtcttgcattagctccttggcacttttgctgtg

SEQ ID NO: 36819 - DNA, 267 bp, Setaria italica
  Peptide Sequence Number=SeqID_102793
ctccattttaaattacatgctaattagcttgtcctaaacatcaaatattttaaaacaaagggagttagatgctaagagcttaaaacagcaaaacaagatacaataagagaaactacaggaaacaaaggcactgcatttcgaaggaatgggtatcaaagccatcgagacaatcaatcacatacaaacagactcccactatcgattccattaaaatagcatgccaaggtcaactcaaaactaaaaggagagcaactctgaaattgaaaa

SEQ ID NO: 36820 - DNA, 608 bp, Setaria italica
  Peptide Sequence Number=SeqID_102794
tcactgtggctttgtttgtcattggcactaaggctagtagcatgtaaaaatcatattatcaaagatcagtcagatcagaaagtgcttagttgatccgatgttacggcaagaaaaactactggacagcttcagatccaccaacaattcctccatgaaacatgaaaaactactggacagcttccgacaacactgagcaaagtcagcaatgcagactcccaacagcaattcctctccctcctactgtgctattgacagtgcaatacctcgcatgccaatgttctgtttaatgatccagaccacctccatgaaatccaagcttatttgtctaaaaaatgttcgccaatttcttcttttcaaatattccaaaacatatattgtctggatttctcctcatgggcctggatgtacttccttcgacatgcctgtgccaccagtttcttatatttaccaaggaattacaggcagaaaccatccctgaataagctgccaatatgttttgaagagttagagttgatgattaactgtgataacaaagttggcaagttgagttagcagtttgtgcactgtgaaaacgttgtaccaaaggagcaaccaagtgaagaatttgc

SEQ ID NO: 36821 - DNA, 190 bp, Setaria italica
  Peptide Sequence Number=SeqID_102795
caccacgctgtcgaagaggtaggcgcggccgtggcggccgcggaattccttggacacaatggcgtccggcgacgccgagtccaccccgcagtgcttgcacttgaacaccttggtgaatgtgagctcttctccagtatgtacttgccttctttgtatttctggtcttcgttataagctttctcatatctcc

SEQ ID NO: 36822 - DNA, 1229 bp, Setaria italica
  Peptide Sequence Number=SeqID_102796
taagttaagttagaatttagaattttacttcagctaccatcattctttgaccatcatgctcttctccagtatgtacttgccttctttgtatttctggtcttcgttataagctttctcctgcactcaatgggtaggtaactcatcatgaaaaaaaaaacagcaacaacatgcaccaaggaaaatgtggaaaaaagcatctgaatatgaacatatttgcttgtttcctcaggtctggaagtggcaactcaaccaaacatctcaaatgcatagtagcacccaggtttggactgatttgaatgggcagtggcatctagcaagtacaaaagaacaggcaaaatcgtgctcctagaggaaagaaaggaggacaagaaagagctcatgaaaaaggtggaagaataggtagacgcatgttcctcagttggctaacaagtatctacttactatgaacttgcaattgctgatcaattgatttgtatttttccaagttccttttttgaccacacaggacaaattataataatcacatgatggtggaggataacctgttgttagacatctaatgtactttaactattgagctcaggactggagcacgtgccatattaatctcattacatgtaataatctgattatccaaagtttaagctacagcttggacactgaatactgctgtgcaccacatgattcttgtgttcataaataatatggagatcacaacccaatagacattattacaatttcaagaaaaacctaaacaatcatgagaccataggttaattgacagaggcaccttcacatattggccttctacagaagatgagaagatgcagcaattattcatcattcaccctagctgatgccatcaagttatgagcttccaatatgagaagaacggaaaagagcattcataaaaaagttcagtcaattttcccttgatgatttatcagcaaaggcgtttataactgtgtttgtattttgtaaagtaaaaaataattttaacacaagaataaggtctaggaaatagaaatacctataatcatgcctcagagcctaatacgtcttatgcaaggggaaaatacttcacatgtatcttgtttaagaagcttttgggacattcaagcaattgttcaattggaacatgaagtcacatatgattttccaggacattattagaattcctatctctgtcaatgtaacgaaatctaacatacatcgttccaatataatag

SEQ ID NO: 36823 - DNA, 858 bp, Setaria italica
  misc_feature (1)..(38): n is a, c, g, or t
  Peptide Sequence Number=SeqID_102797
nnnnnnnnnnnnnnnnnnnnnnnnnnnnnnnnnnnnnntttttttttgtacaccaaaataatttcatacacttcatattttcatcgcacttagtcttctccggcacaataatgtttcggaaaccactaacgacaaatcttcatgaataatttacacagttggaaatgtctgcttttgcaggcacagtagttgattgatttcttcagctaccatcattctttgaccatcatgctcttctccagtatgtacttgccttctttgtatttctggtcttcgttataagctttctcatatctccagccaaggagtcgttggcagcagctacagtagatatcattcactatatgcattccagtcatgagaatacgatcctcgttgggaccaaagctcacattcaccacgctgtcgaagaggtaggcgcggccgtggcggccgcggaattccttggacacaatggcgtccggcgacgccgagtccaccccgcagtgcttgcacttgaacaccttgggccccgggagcgactccacgaacagcagccccatcggcccctctcagaccccgcccggcgagctcaatccaccagcgcccgacaccagattccccggatcaacccgacaatccaggaaccgaggcctaaatcttcaacaaatcccgaaccgccggaacgccagagggaggcagcgattgggcccgatcgccatcggcccgggggagaggatcgttcgggcgaatccggcggagaccgcgatgagattcggtcggaggtcggggagggtggggggagacgtggggtcgggaaagcggaggcgacgaggaaatggatggagaaatggaattgctggccgatgcttggtcttt

SEQ ID NO: 36824 - DNA, 254 bp, Setaria italica
  misc_feature (241)..(241): n is a, c, g, or t
  Peptide Sequence Number=SeqID_102798
cgtacacaagcataacctcacgcaataaaaccaagcaagttttattgagctcaaccttgccagctccctgcactgatccaaatggcgaagcaattcagcgttgttgtcacgagcgcattgctgctggcggcggccgtcgtgtccctgtgctcaccgggcgccggcgcggcgcggcagctgctggggaccgggcgagagacggccgtggccgtggcggcatcattggcggcgacgggccctntgcaggttcaagg

SEQ ID NO: 36825 - DNA, 743 bp, Setaria italica
  Peptide Sequence Number=SeqID_102799
ctagaaacggcggccatggattcgggaggcggaggagggagcggcgcgcacaaggccgcctctgggtcggcgccctcaccggcgcagccggcacccaaccccacggcgatgctctcggtgctcatgagcaagcgcgccaagctccaggaggagctccgctccatcgagcgccaggtttatgatatggagaccacctacctgcaagagtctaatcaatttggaagtgtgctgaagggtttcgaatcatttttgtcatcctcaaaaaacacttccaacctcaagcgctcccggaaatttcaggctgacgagaggctattctctttgtcatcagttacttctccagcggttgatgaacatttgactggacgagatgatggaagagaatatggaccaggacgttctaagggtggaacccctgcaaatgggcaaggcaaaccgaagaagggagggcgcccaggtggacgagatggcaagagactacggccgtccaatgatccagacctggacgacgaagatgactactaactccatgttgtaggcctactgtagcgaattaacttcattttagcgtctagctgcacatgattctttatgtactgtactccctccctcctcttgcagccccagctcggttgttttgcttgtttgcgtctttgcctccccatcttccccgtttgtaacataggtcagcagaaagttaaccagattgtgaaaatattcaagcaaaaaaaaaaaaaaaacta

SEQ ID NO: 36826 - DNA, 375 bp, Setaria italica
  misc_feature (356)..(356): n is a, c, g, or t
  Peptide Sequence Number=SeqID_102800
tcaccacaaacgcagtagccaagtagaggaacaaggttaggatgtttcacctttccaattgtctccatttcagccaggaactcacgatcaccttggaactgatgaccaccatgaagcctcttgattgcgactctccggccttcaggaagtgctgccctgtagacagtgccaaacccaccatcccctatgatgtgcaccttactgaaattctctgtggctctcagaatgtcatctgcagtgaccctcaaaagtgcatgttcaaatgttgcaagattgatactcaggggttctcgaaacttcttccctaggagttcatcacttgagttggctcaacagtagccttggccttgctggcnggtacaagagccaatggtc

SEQ ID NO: 36827 - DNA, 568 bp, Setaria italica
  Peptide Sequence Number=SeqID_102801
ttcaagcccgattgcctgccggcaagcagcgccggcaactgggttaggacggcgagaaccccggcgcccgatgcgaagaacgtgtagacggggacgcccagcttggtggccacgtcgatggcttgggtgcagaacatgtcgatgacaagggagtgcaagcgctcccgggggatggagcggaggaagctctcgagcttctcgttgtaccggcgcatcagctccagtatgagtaagaaagggtgcttgggggagcttgtcaggtcagggggtgggatcgacgggagcacgtggaaggtgatggacgggttggaggcggcgacgcgctcgatgaagccggcgccggagtcggtcgacttgatcggcggctcgatgagcaccatggtgacatcgtggccgtggtcgaggaagaccttggcgagctccgtcatgggtccgacgtgcccgacgccgccgccggggtacagaacaacggtctgcttcgcgggtccgttgtccatgtgagcggtggctggtcaacttgggggtaatgaggaagataagaaaagaaaatacagtagctgtggctcta

SEQ ID NO: 36828 - DNA, 359 bp, Setaria italica
  Peptide Sequence Number=SeqID_102802
gggacatgtcgtggtgcacctgcgggcgtcggatgggcgggttgaggtcgtgggagaagaggtagcggtggaagtcgtcgagcgcgagcagcgggcgggagaggcgggggaggcgggcgcggccctgctgctgctggatacggatctggtcgagcaggcggtcgacctcgccgtcgtccagcgcgtcctccgtggcgtcgaggtagcggcgcaggccgtcggcgcccatgtgggtcccgccgccggagtggaggttgaagagggcgcggacatcatcgggcggggcggcgtcccgggactggaagcggcgcttgaagatgaggcagcacttgtaggtggtgcccatgattgcgtgcctg

SEQ ID NO: 36829 - DNA, 451 bp, Setaria italica
  Peptide Sequence Number=SeqID_102803
tagacgttagactacaatggattaaactatatttcgtttcaaataaataaattatgtaaatgaaactacattaccaaatacagcatcgaccctgttactcacctgcatcgatacatacagctggtggatctatgcaggggagttatagttattggttgctaaactccacgtgaaaacccagttacttagcctatgtcccttgtgcaatattgtggcaacaactttatacatcagacaatcattaagcaaaatccatgcaatgttacaatcaatcatcattgatctgcagctcatctctatagccatcagttcgataatgcacatgatttatgatttccatgatcatatgtttgttattatcaagagtatagtagttagctagctcgtgctgccattgcatgcatcctctctcctcgaagtcggtttgctagctggcctgcaagtgtcaaca

SEQ ID NO: 36830 - DNA, 343 bp, Setaria italica
  Peptide Sequence Number=SeqID_102804
gtggcggcggacgacggcggaggtggcgcggaacagtggcgcgaggcggccgcgcccgcgcggcatttcgtttcaaggctgacgctgaccaagaaaaacttaaccattgcgcggagatatttcaacttatgaattaaatggtatcttgattatgtgccttttttaaaacacaaatacaaaatgcctattagaaaagggaacatatccctcctgaagtacaccaattccaatgactcttccttgtactggttgccactctcacagcaagctcatgcccaacttctagagctcagagatctcctcctctcccagcccagggatgctgatgctgatgatgtatggc

SEQ ID NO: 36831 - DNA, 253 bp, Setaria italica
  Peptide Sequence Number=SeqID_102805
attaatgtcttatggactctaatgcataagcgcaaataattgtgtgctaatttatggaatcttatatgattagttctatacattctttcaaatctgaaatacggtggtgtgctaatttatggatggaatcttatatgattagttatatatatacattctttcaaatttgaaatacggtgtgctaatttatggaatttgatacagttatttatgtatattatttgaaaaatgaaatagtcaatcattttcccaa

SEQ ID NO: 36832 - DNA, 1941 bp, Setaria italica
  Peptide Sequence Number=SeqID_102806
gggaaaaaggggaaaacaaaacgggaaagaagaagagaaaggccaacgccgtcttctcttcctcgaggccaggggacgacgaggaggtggcccgcagctggctcgctagggtttcccccctcgttctcggtgtcggcgccgcgccgcgccgccgggaccccgactcggtcagggctttgtcagggaggtgcagctgtcggtgattaccctcgagctgcagccgcatccccatgccgaccatcacgcattacgtgctggaccccttccttgagacggggtcgccagcgcaggtccagaaggccgtgcccaagccgccgccacctcctccggagaaggccacgcctgtgccggtggctcctgttaggacgcagacatcgccggcatcgctctacgccacgccggagagcacgaccctgcctgactcgccttcctcgttcccaggaacctggtcaccgtacctcatcaaccataagaggcggggcgcctcccttgccaagaccctctctcagggcgatgctgtgggtgaggttagagagctgaagctccctgtgacactgcctggtttgtccaaaagttgtgaagccgttgaagtgcatgagcctgagtttgcgtttcagcaagcgaacaatggtcaagctgaaggtgactgtggtgtggaagagccttttaatgggcaggatggaatactccagaagggcaagggaactgtggcagctgaaaatgggcaggatcagcctgagtttgagtttcagcgtggaagtcttgaagcattagtgaggcctgtcaatgtcgcaaggccttcgaatggtgcggcaccaaataatgctgagagtgatgccttctttgaacttcaggattcgatgagtgtggctagcaatactgagactgatgaggctggtgtgcatgagcggtggtggaagcccagttctcctcttgggacgtctgttggcacacctggtgcagaattctatgatgcatttgaagaaatatccagtgatggtggaactcgatcatcgcgtgccatggatgatgacctccgtgagatgaggttaagtctgttaatggaaatagagaggagaaagcaagcagaagaagcacttgagaactggcaagcagaatggaagaagctgagtcaccacctatcacgtgttgccttatcacttccatctccaagtacagctgagaatactgatgattcaagtgtggatcctggagctgagttgtgccagcaaataactgtttcacaacttgtagctgctgctattgcacggggtttagctcgtgctgaagtggaatcagagatggaaactgtgattgcagcaaagaactttgacattgcaaggctgtcagatagggttcagtactatgaagctgcaaacagggagatgtctcaaagaaaccaagaagccattgagatgtcaaggcaacaacggaaggagcgtaagaagcgacagaagtggttctggggttccgttgggcttgcagtcacccttggcgccacagccattgcctggtcctacctaccttcatcacagccccaagccagtgcagattcaaatagcgcctccagcgaatagagctaggacgaagacgtatctcctcctttccgaagcctaacaaagctctaactatactcttagaggaaaaaaggttgtataagttttctctttttgcgatcggctgtgatcgctacgatcctcatttgtcgcatcctctgtaaaaatgttgggtgggtcatctccggtcaggattggctccattccaatcaccgtaaagctctttgcatagctggttgagcaaataatacgaggaatgtcaacatggttggtagtccatgcccaactcaagtggagttgattttgtcaaccgaagttttgttctaaaatccttttcctgttctcgaactaagagatggcacaaggaagttttgttttcctgttt

SEQ ID NO: 36833 - DNA, 199 bp, Setaria italica
  Peptide Sequence Number=SeqID_102807
acagtgccttgtgccacatagctcaaggctgtaagaacttaacagaactttctatccggcgtggttatgagataggagaccaagcattgatatctattgctgagaattgtaaatcgcttaaagagttaacactccagttttgtgagagaaaactgctctctgcataagttaaacttgtgcgggtgcaccctaattactg

SEQ ID NO: 36834 - DNA, 326 bp, Setaria italica
  Peptide Sequence Number=SeqID_102808
ccttagattctattggcttattttgttcgcttttagaaagcctgtctgtaaatcgttcaaagttgttgagtgacaggctttctaaaagcgaacaaataagccaatagaatctaaggcctcatccccagcactcaacaactttgaacgatttacagacaggagcctttcttccattgccaaagggtgcaagaacctcacagatcttgttctcaatgattgccagttactaactgatagcagccttgaatttgtagctcgtagctgcaaaagttagcacggttgaaggtcaatggttgtcagaacatggaaactgctgcactggagca

SEQ ID NO: 36835 - DNA, 1947 bp, Setaria italica
  misc_feature (1935)..(1947): n is a, c, g, or t
  Peptide Sequence Number=SeqID_102809
agaccgaagacggttacccggacgactcgccgacgtgtcggtggacgagcgcctcacctcggcgggagtcgtcggcgccgtgcccaggtcgcgccgcccgcgccaggcgcctactagtagcccatttcggcgccggaggaggctgccccttgcttcaaattccgttcatatagccccattcccattggaccaaccagctggtgatgatggatcagaacacagctgtttgactgatgttggcttgactcatctctcaaggggttgcagaggccttgagaaattaagtctaatatggtgttctgccatatcctcaacaggcttggtgaggatagcagagaactgcaagaatttgacttctttggatctccaggcttgctatattggagatccaggactcattgctgtcggggaaggatgcaagcaacttaagaatttaaatttgcgatttgttgaaggcaccacagatgaaggcttgattggattggtaaaaggctgtgggcaatcattggtctctcttgcagttgcaacttgtgtttggttgactgatgcatctttgcgtgctgttggatcccactgccctaacctagaaattctgtctgtggaatcagatcgtgttcaagatgagggagtaatatctatttctaaaggatgccgacagttaaaaactttaaagctacagtgtattagtgctggggatgaggccttagattctattggcttattttgttcgcttttagaaagcctgtcactcaacaactttgaacgatttacagacaggagcctttcttccattgccaaagggtgcaagaacctcacagatcttgttctcaatgattgccagttactaactgatagcagccttgaatttgtagctcgtagctgcaaaaagttagcacggttgaaggtcaatggttgtcagaacatggaaactgctgcactggagcacattgggcgatggtgtccgggccttttggagctctctctaattttttgcccaaggatccaaaatagtgcatttctggagattgggagaggctgctcccttctcaggactctttatttggttgactgttcaagcataagtgacagtgccttgtgccacatagctcaaggctgtaagaacttaacagaactttctatccggcgtggttatgagataggagaccaagcattgatatctattgctgagaattgtaaatcgcttaaagagttaacactccagttttgtgagagggtatctgatacagggatgtctgcaattgcagaaaactgctctctgcataagttaaacttgtgcgggtgcaccctaattactgatagtgggctgactgcaattgccagaggatgccctgaactagtctacctggatataagtgttctccggatcataggtgacatagcacttgctgagataggtgaaggctgcccaatgctcaaagaaatcgcgttctcccactgcccagaggtgactgacgtcggtctgaaccatctcgtcagagggtgcctgcagctggagtcatgccagatggtctactgccggcagatcaccagcgccggtgtggcgaccatcatctcgggctgctccaggctgaagaagctcctagtcgaggagtcgaaggtgagcgagaggacccggcgaagagcggggcccgtgttgtcattcctctgcacaggcctttaggttcagaagggaaataaatctgtgcgcagtatcaactcctttgttacccagaaagcttctgttgtgtgtgtgttgctgtgttgtataccatagcatctttacctcaaaagtcttaagtgttgtatggactatttacccccaaagtgttgcacagaacaaaaatgttgtaccaactatttaccaaaaaggcatgaataataaaatcagatgaaataaaaaaaaaaaaccttcctatttgttaaaaaaaaaaaaannnnnnnnnnnnn

SEQ ID NO: 36836 - DNA, 296 bp, Setaria italica
  Peptide Sequence Number=SeqID_102810
gccttctcctctccatcgattggatcaggccggctacatctcgtccctccggtgcctctctctcgctcctctcggtcaagaacgaaaaccagatggagttatctcctctccgccgccgccgtccacgagttgctccgccggcgaatctgcgctgtctgctaccggtccaggtaggtgccatacccggccggccctctgcggacgcggcatcctcgcgccgccaccagctgtgctcgcgccgccctcagtccatctcaccccttgcagcagcatggccctgctctctacatgcagcg

SEQ ID NO: 36837 - DNA, 1252 bp, Setaria italica
  Peptide Sequence Number=SeqID_102811
ggcgccctatcatgggtagccatccaaacaaccccttaaactgcctatttccagcaagcagaatgtggtacaagctacccatatatgttccaatgtagcatgcagcataaagctattatggctgtgaagccggagaacaattttgtgcaaattccacagatggagtgcaaagggcattgtcaaatctttaaagtaacacgtgcagttgatgtaacaaagtcaacaacaagacatgcaaatcccctgtgtgccaagtgaattataagaatcacatcttaagattaaaaaaagataaacttcctaatcagcgcatgttcttgggatattgtggtacacaagtatcctctatgattaacatgcaaaagtagttggtcagaaggttgtcagttaggagcgaaagacaattcagtgtaatcatagtcattacaaatgtaatcatttgaactatgcaactgatcatcatccaacctcgccacctgaagagtgcacaaccgaagatagcaaatgcaaggcaataacaaaggagcaaacagatggactgcacagttaaccttgcaattcaaagatgaaaacatgggggataatatacagatgcgaagggcctcatagagaagattaggcttcatccacatgaaagtttcagatatatgcttgtcttgtttttaagtaatcataggcccagtaataaaacatcagaaacaaaaagggtagcaaatgggttgaaactagaaaggcaattttagaacttaacaacagaacaggttaaagatcaaaatcaacaaagaatatctccaaacaccaaaacacccaagggatccaaaaaattgtgttccaacatttcacaataacaacttacaaaatcacttccatgccagttcataaccactattcctagctaacaagcaggtacactcggtaattatactagttgatgctatgaacccgataaacaggcatcccagccacttcataacatgaactaggtcagcaatatataaatcccagagcaagagaaaggagtgggcatcacaatcaaatataaattctaagaagtaattggcatcagattccagatagcaatatctctgccatcctgacttgttctatacaaattgcagacgatgctacaatcttcattcaatgatgacgaatgtgtgctctggcagtcatttagaacaagacaaacagcatatccaatatcataatctaccgacatccttcagcatgcaaacatgcaagtctcagatcaatt

SEQ ID NO: 36838 - DNA, 373 bp, Setaria italica
  misc_feature (286)..(373): n is a, c, g, or t
  Peptide Sequence Number=SeqID_102812
cgaccgaccaaatgtatgatatggcaggagaaaaaattagagcagcttataatcttatattttttctttcacttttcgattggatagctgatgaagtgatcaggtgagggtttaagggtggagatgatcatgagacatggcagccgacgaccgacgtgtacaaggttttagatgattgttggttttgagggctttgagcgagcaataagcttattcagtgattattagttagtacaaatgtacagtttgatatatacaaactatacgagaagcaaaaattcaaacnnnnnnnnnnnnnnnnnnnnnnnnnnnnnnnnnnnnnnnnnnnnnnnnnnnnnnnnnnnnnnnnnnnnnnnnnnnnnnnnnnnnnnnn

SEQ ID NO: 36839 - DNA, 788 bp, Setaria italica
  Peptide Sequence Number=SeqID_102813
agctgactgctcttgctctgagctctcgtcggccaagaaaaaaaaagaagcctcgcactcccctcccccctcctcgacccctccgcctcctcccccaccggtcactgccccgccccgccccaggcctcgccggaaccctaaccctagcgtcgggaggtggagccaggtccaaccccatgcggccgcccgcgccgtaccgacgggacggtctttggaattgaagtgactggaagggcagcgttatccaatctgaagggggctcatgtcctagaattcagagtggggttgttagggtagactgtgttatggattccggcagcagttcattttctagaacacgaagtgggcttgtaaggagaaaaggaatttttgctcccaataaagcctcatgttcgagaacacgaagtgggcttttaagggtgaagagctttatgcgctctagggatggttcgtgttctagaacacgtagcgggcttgtaaggataaagagttttaaggattccagtgacagttcatgttctaggacacaaagtgatcctgtaagaggaagcccccatgttgttgaggatctaattgaggatgaagcagtcttgaaggggtctcctgaagaatgggtgacagaagactcgcctgtgagaacacgaaatgggcttgtcagaggaagccctgcttacaaggctgtagccatggatgaaccagtcacgaagaggtttcctgatttggattgctttgtaattgtattgtaaattgtccttttcttagtaactacggttagtttgggttctttt

SEQ ID NO: 36840 - DNA, 351 bp, Setaria italica
  Peptide Sequence Number=SeqID_102814
ggaggttgctgctgcggcaaccgacagcggccacagccaccaactccttccatgtcaagggcggcgcccatgaaccagctgcgactgcggcggcaacgaagccgaacgtggagttcaacgccagcacgaggtcggcgccggggagcaagttcaaccccaggcagaattagttagcgccctttaatttgggacatcttgttcctcctctgatcctctcttgtagttgtaggcttggtaggcagcttgcaatctttttctccttttttcctaggtcagccgtgtatcattccgatcttgtagtagatacaactaatataacccgaggtctctttctttccactcagagttggc

SEQ ID NO: 36841 - DNA, 404 bp, Setaria italica
  Peptide Sequence Number=SeqID_102815
tacatcttcctgcatgaacatatagtcagtaaatatctatatccatatgttgaccagattcagtaaatataaacgttcatacaaattttgatcagtagccaaccattattcatttttggtgaactgtgtaacagaagtacaataaatagagaaatataaatggttcgaaaccacctgaaagtagagaagaaggtttgccgatggcattgttcctccagtgaaaaaatatcttgtgatccaatcatcatcattgttatcctcaaaatgatatgcaaatgtcttgtggcagaagaagtgaacaaataataagctgtcctctttcatccacttggatatcttcgtaagaagtgacttgtagtttttcatgtgctcaaacatctcaatggatacgatcctgtcaaaag

SEQ ID NO: 36842 - DNA, 628 bp, Setaria italica
  misc_feature (565)..(565): n is a, c, g, or t
  Peptide Sequence Number=SeqID_102816
caatactgaaaggagtaaccaataacaatataaaacaaggaactgatgacgtacaacatgaacttctaacaccatgatttgctatttaattggtgaaaccactgtgaagcaccttattaaatacaagtacaactgaatgcatgaaaatgggctgttcgtttaggcacacggcaagcttactgaatcactactggggctacaggggaaacgacttctgaacgggtgcttctcagtgattgtactttgcatgagaaaaagaagagctgcagctcctacttcctttggaacaggtaatgtgcaaccatccattcatcaccattattgtacccgaaaagttcagcgacagagatgaagaatgtccgccaataagctatccatttggtagttgattccttcccgtaagttttttcaaaaatgggcctaatggaaacgatgctccggtccatacgcttcagccactcctcactgcagaagtgcttaggtcaattaatacacactgtatgttgtattctctctttcagcgctaatttagatatgacttcattgcctgtcatttagtccttanatcgtataactcgacagtagcaaagtgacaaaatgaagaactcaacaagatcaagattgacat

SEQ ID NO: 36843 - DNA, 1719 bp, Setaria italica
  Peptide Sequence Number=SeqID_102817
tacatcttcctgcatgaacatatagtcagtaaatatctatatccatatgttgaccagattcagtaaatataaacgttcatacaaattttgatcagtagccaaccattattcatttttggtgaactgtgtaacagaagtacaataaatagagaaatataaatggttcgaatgcatggattattatggcatagatagtttggactttgggaggaatatacctagttccatacttccattcttatgaaggtgccattcttatgaaggtgccatccagaagacagggtatgctctttactctgaaggagtaaccaataacatataaggactgatgacgtacaacatgaacttctaacaccatgatttgctatttaattggtgaaaccactgtgaagcaccttattaaatacaagtacaactgaatgcatgaaaatgggctgttcgtttaggcacacggcaagcttactgaatcactactggggctacaggggaaacgacttctgaacgggtgcttctcagtgattgtactttgcatgagaaaaagaagagctgcagctcctacttcctttggaacaggtaatgtgcaaccatccattcatcaccattattgtacccgaaaagttcagcgacagagatgaagaatgtccgccaataagctatccatttggtagttgattccttcccgtaagttttttcaaaaatgggcctaatggaaacgatgctccggtccatacgcttcagccactcctcactagttctagcataatgcgtaccactgacaagccaatgattgaccacagatacatcttcctgaaagtagagaagaaggtttgccgatggcattgttcctccagtgaaaaaatatcttgtgatccaatcatcatcattgttatcctcaaaatgatatgcaaatgtcttgtggcagaagaagtgaacaaataataagctgtcctctttcatccacttggatatcttcgtaagaagtgacttgtagttttcatgtgctcaaacatctcaatggatacgatcctgtcaaaagaacgctccatctcaaacttgctgatatctgccacaattatctcaacatttgatagctcattttccctacattgctcgtctataaaagccttttgtgtggtagagttgcatatccctgttacaatgcagttcctatatttctttgcaatgtgcagtgaaagggatccccatccacatccaacatcaaggatgctctgtccatcctgtatttttgccctctcgcaatacagttccatcattgcaacctcagcatcttctagggtgcttgaatcgtcagggaagtagcaggaactgtatttgagattccttccgagcactaacttgaaaaatgttgttggcaactcataatgttgggctttagctttgtccgtttctatcgcaatgggcatctcttgaagagagtggacgaactggaggagctgttgcagctgcagcggcgcggaggggaggtagccctggcggaggcgctgcgcgagcaggagccgcgtgaggcgccgggtgaccgcgtccgggatgaggttgcgctcaagcgccgccagcgccgaccgcgtcgccgccgcgtaggcccgctcggccacggccgccgccaccattgttgttgccgcttgtcgtcgtgtacgtaacgtagactacctagtaaggggacgacggttaccgggtaagggaaagaaataaaggaaagaa

SEQ ID NO: 36844 - DNA, 291 bp, Setaria italica
  Peptide Sequence Number=SeqID_102818
cacctccgcgccccgcctgcggcggagggtgtgcgtgaggccgtggacgcggtcacgaccgggccggaggccgacgccatgctcgccaacgccaagtcgtggagcgcggcggcgcgggacgcagtggcgcccggtgggtcgtcggaccggcacgtgcaggcgtttgtcaacgaagtaacggggcgagcgtgcggagggcaagcaaaagcatctgccgtttattaaagtgtccaaccataccttaattacaagtggtgctattttcccgacccgaaaaaaaaaaaaaaaaaa

SEQ ID NO: 36845 - DNA, 570 bp, Setaria italica
  Peptide Sequence Number=SeqID_102819
cgcaaccaaaaactaaggaaagagaacacgaaacatggctatggaactgcaatacatcatgcatgttcttctcaggctaaatcggactaaataaaaagtgaaaatacatgaggacataaaagactttcaagaatgggactccgtaccaggaagtggctcaacaatgctctttgcctgatgaagggtatcgccaatgcgtgcttctttagttgaacgcattccactaataacatacccaacttgtccagtgtagagcactccagtaggtgtaagctcagggtgcataatgccaacatccagaacttcatatgcacggccagttgcagctgatgctatcttatcacctttacgcagagcaccatcaacaacagcaacatggcaaatcactcctttgtactcatcatagtaggaatccagaagcaacatccgtacaggtgaatcacatttcccaggtggggaaggtatgcgttcaattacagcaggtaatacatgttcaaggcctttcccagtcttggcagaagtgagcagggcttcacttggatcaatatcaaataacctcttcaattgatc

SEQ ID NO: 36846 - DNA, 450 bp, Setaria italica
  Peptide Sequence Number=SeqID_102820
caaaaatattacatatttaactgattctgtgaataagaattttcatcatttgagcataaaactaacaagaattagatcctagtccattttaaggctcaactttttagtggacacagttggccctccaagcttcatctccttcactttctgtgaggtctcttagagagagagagatagaagagtgattggttctgcatgcaagtcagtagcaggctaccggaaccaaaatatggagcagagcaatacctgcctactgcaagtctatggttctctttagggtacattttggatgttttcaaggtttaatgtattccttttagagaatttgatgcaaaggttaaaaaataagttcaccgcaactttgaatatctgatgtactatttccggtgtattcttttcatatacttatatgctcccaggatactgaatggatagctgatcaagctttca

SEQ ID NO: 36847 - DNA, 449 bp, Setaria italica
  misc_feature (449)..(449): n is a, c, g, or t
  Peptide Sequence Number=SeqID_102821
tcccgtccacgctccagatttccgagttcggaccccccaacgctagcacgcggcgcagccgaccaacaagcagcaggccccttccgcagcagcccgctcccccgtcctccgctcctcaatccactgccgcagcgtcgctcctccctcggtccagtggagcggagcggggatccaccaggacatggattgattcctcctcttgttgtttatgttgacctggatttgataaccgagtgctgatgcaatggatgcccttcatagcgacccttattccaggagcagcttgcaaccatacagggatgcgcctgtgtcctttgagaacaacaacacagttttggataagcatgggattgtcagccctcgagttggcatgacctttgagacggttgatttggcctatcaattctacctagaatatggctatcgtgctggctttggggtctcaaagn

SEQ ID NO: 36848 - DNA, 269 bp, Setaria italica
  Peptide Sequence Number=SeqID_102822
catggacccaaaggacggctcgatggcagggataacagtcctgcaacagatggctatggaacacgatataccaatcatttcaatcgctgatctcatccggttagtatatcttaaggtatagaagaaaacgggagaaactggtggagctgattgcggtgtctcgcttgccaacgaaatggggcctcttccgggcttactgctaccaatccaagctcgatggaactgagcacattgctgttgtgaagggtcgtactattcggtcgtattgt

SEQ ID NO: 36849 - DNA, 530 bp, Setaria italica
  Peptide Sequence Number=SeqID_102823
ctgatcgaaaaggccggccgtggcgtgctcgtgtacctccgcggccacgagggccgcggcatcggcctgggccagaagctccgcgcctacaacctgcaggacgagggccacgacaccgtcgaggccaacgtcgagctcggcctcgccgtcgacgcccgcgaatacggcatcggcgcccaggtacccagacccctctcaattaacacgcatcgatccacaagaattcatcttggctcattttgtcaggataacgggggaaattgggaaactgatgtgctaaaaattgaagcgttttcgatccaaatgtctgttccagatactccgtgacatcggcgtgcgcacgatgcggctgatgaccaacaacccggccaagttcatcgggctcaagggctacggcctcgccgtggtggggagggtgccggtgctctccccgatcaccaaggagaaccagaaatacctcgagacgaagcggacaaagatggggcacgtctacggctccgaccttccctggcaggctgtacggaagtttg

SEQ ID NO: 36850 - DNA, 1759 bp, Setaria italica
  Peptide Sequence Number=SeqID_102824
ggttaaacttgggttctgggatcaccaaatggactatgttcttctgagctctcatttgccatctcacaattttgttaacgcgaggtctcagcaaggctctagtagcctcagcagtataggatttgcagtcatcagaaacggatgcttaaaattaagatgctgtgctattggcgatgaactcggtggtcaagggagaataaatcatccttttaatgaaaacaataatggacctgttttccaaggaatcaatgcatcaggtgcttcttttcgaactgttggtgctgaaatcactcaggaaacaggagatttctttgtcagcgatgcagagagtgacccggacaaacctactgatggtttctcctcaatcgaccaagcgataaatgctttgcgtcaaggaaagtttgtcattgctatagatgatgaaaatggtgataatgagggggatcttgttatggcagccactctagtgaacccggagtcaattgcattcatgatcaggaacggttctgggattatctctgtaggcatgaaagaagaggatttaacaagactgatgattcctatgatgtccccaatcacagagatcgaagacatttcgactgctgcatccacagtaacagtggatgccagagtgggtatatctactggcgtctccgctgcagacagagcaaagaccatccttactctagcctcccctgattccaagcccagtgatctcagacgaccaggccatatattccccctcaagtaccgaaacggaggtgtgctgaaaagagttgggcatacagaagcatcagttgaccttgtcgtgttggcgggtttgcgtcctgtatctgtcctgtccacggtcatggacccaaaggacggctcgatggcagggataacagtcctgcaacagatggctatggaacacgatataccaatcatttcaatcgctgatctcatccggtatagaagaaaacgggagaaactggtggagctgattgcggtgtctcgcttgccaacgaaatggggcctcttccgggcttactgctaccaatccaagctcgatggaactgagcacattgctgttgtgaagggcgacatcggcgatggtgaagacgtcctcgtgagggtgcactcggagtgcctgacgggcgacatcctcggctctgcccgctgcgactgcggcgaccagctggagctggcgatgcagctgatcgaaaaggccggccgtggcgtgctcgtgtacctccgcggccacgagggccgcggcatcggcctgggccagaagctccgcgcctacaacctgcaggacgagggccacgacaccgtcgaggccaacgtcgagctcggcctcgccgtcgacgcccgcgaatacggcatcggcgcccagatactccgtgacatcggcgtgcgcacgatgcggctgatgaccaacaacccggccaagttcatcgggctcaagggctacggcctcgccgtggtggggagggtgccggtgctctccccgatcaccaaggagaaccagaaatacctcgagacgaagcggacaaagatggggcacgtctacggctccgacctccctggcaggctgtcggagtttgccaatccgcaagacactgccgctgacgaagacgatacgcaaaactgatagaatacgattacaaccacaaattctcatttcttttcagttgttcaatccaaataagattcagacggagaacgagaaattgaagagaattatcaattgcgagcttattacagtgacaagatattc

SEQ ID NO: 36851 - DNA, 443 bp, Setaria italica
  Peptide Sequence Number=SeqID_102825
gtgcgggcgctgtgggcccgcacggtgcgcgacccggccgccgcggtgcttgccggggagcgatacctcaggggcctgcacgagaagatgcgccgcgacgtgcgcgccggggcgcgggaggtgcacggcgtcatgatcgccgtgcggacgctctggttcgacgcacgcatcgaggccgccgtcgacgcgctcggcggcgaaccacaggtcgtgatcctcggtgcagggatggatgcgagagcctatcgactcaactgcctaaaagaatgcacggtatttgaactcgacttcccggagctcctagaaatgaaatctgatcttctgcacgaagcaatgagttccgcaaatcaccagaaactcaccttgatggcaaaatcattgattggggttccttccaacatacaagatggagactgggtaacaaagctgcagagctgtgggta

SEQ ID NO: 36852 - DNA, 782 bp, Setaria italica
  Peptide Sequence Number=SeqID_102826
gacccagaatcaatcccatatcttaatctccgaaacgaatccctgtaggatcgagtgacacaaccagatccactcattccccgcaaccggatccactcgttcccctccaggaacgaatgattcaatcatgaacgactgaacaaaacctaataatttctttgctggaattggtatggggtacggtatggagtaattacaatccggaagcaaacttgggtacatgaacatatgagagaatgccaaaactttgaatctgataatgccagagagataagttcacctgaagaaaaggctcattctaatcaccaaatgatgctctctttcttttttttcagggatggatgcgagagcctatcgactcaactgcctaaaagaatgcacggtatttgaactcgacttcccggagctcctagaaatgaaatctgatcttctgcacgaagcaatgagttccgcaaatcaccagaaactcaccttgatggcaaaatcattgattggggttccttccaacatacaagatggagactgggtaacaaagctgcagagctgtgggtatgtccctgaaaggaacaccatatgggtgctcgaaggcatcatctattaccttcaccatgcagatgcaatgcaagtcctcgaaaccattgcagccagccggtcctcagcctgcacagtgctcctggccgacttcatgaacaagaatgcgacatcactctctccagccatgtaccatttctaccatgacaaccctgagctcctgctgccttctattgggttctctaaggtaa

SEQ ID NO: 36853 - DNA, 937 bp, Setaria italica
  misc_feature (1)..(21): n is a, c, g, or t
  Peptide Sequence Number=SeqID_102827
nnnnnnnnnnnnnnnnnnnnnaaggtatccaaacacgtccttagtgaagataagaacaagatccggttctcaacattctactgatttttaatggaaaagagcgtgcaactcataatcggcaaagtatagccacaatcaaagagggtctctggaaacgatcaaacaacaatggatgtttaaccgtatgggaagcaaaaataaatttcaagctgagccatcgctctgaacagtatagttggcagatgcaaagtgttctttcaccaaagcaagagctttccctctgtgagatatttcattcttcactgacttgggcatctcagcataggtttgttcaaaaccatctggctggaatacagggtcccatccaaaatcattaggccctctagcgggtacaatttttcccgcagttctcccgacaaatgtgattggttcctctcctggtccaagagcaagagaaaagatgcacatggcaaatgctgatttatcttcataagcttttataaggttgttcaaaccttcatggccaatcttctcaagaaaccactttatgtaaggtcctggtaagcctttgagtgcattgaaacataggcatgtgtcctcaaccagtacaggcccgttcaccttagatgcagccatccgcgctttctctttagatatgtcctctggctccccttgcagttcaggcaggtcgagcttgagcgactggaaggggacggaggagcccaggatggcgcggacctcctccagcttcttggcgttgcccgtaacgaaggtcaccgccttcggcagcacccgtgccgccgccgacatggcttggtggtgggatgtgtccccgttaacccctgcttccgcgggagacgaccggggccaaggtgcggatgcgagggagctgcggcggcggcgaggggagggtgcgatgcgaaggagcacgaaaagt

SEQ ID NO: 36854 - DNA, 785 bp, Setaria italica
  Peptide Sequence Number=SeqID_102828
cggcggcagcaccgcggacctggaggagtggtgcgtgtcggcgatgtacgccatgagccgcggcagcctccggttccggggcctggcgcgcgccgcgggcgccgaccgagcgctccgtcgcgtggtggccgacgagggcggcggtgtccggcgcgagatggcgcggaagacgctccgcgccatgcggggcgacctagacgaggacggcgagtacaacgacctgacgggaagcagcctcgagtgcggcgacggcgaggactgcggcgggagcatcgtctccgacgggctcatgtcgttccggcgccggcagcgcgagctcggcgtgtcgtcctgcggcaacaccgccgagttctgacgaccaacaacattctccggcgatccttgtccatggcaatgaatgttttgtatgtaaattgcttcgcttaggttcgcattacagcgttaggcatctgtggtgtgctgtgtgagagatcagactcatcagagatgatgaaaacgtccatggtttttggaacggtggcaatggctactgctgtgtgatctgtgtgactgcgagtgaagcctgaagcctgctgcgtgttggtgctgatctgtcgtgcggaacgtcatgtgcaaagagagtgccacgggctcgtgtgccggacaaggcgcggggtggatgttgcttgcaagtcagagcatggctttgttctatccgtactcgcacacctgctgatgctgctggctggcagctcgtgtccttgacgggcaattgttttcagagcatgtgtctccgtctgtaaatc

SEQ ID NO: 36855 - DNA, 1335 bp, Setaria italica
  Peptide Sequence Number=SeqID_102829
ccacggccaggtccgggacggggacgaggccaagggtggtgcctctgacatcaagggcttcgaagtccgctacagcgatggtgttaactttgttgatgatggtatccggatagagccttttaatctggagcgagagagggaagaagggtactttgatgagaatgggaactttgtggagtatgcaagaggcaatgagatcaaggatgcctggttggatagtgtggaagttgatccaacctttgttgcgaaggttcagaacaaagggaaagagaaagtagaggagtttcaagatctctcttctgatgacattggaaggataaaaaggcagatagcaaacatgcttgaaccaggagaaacgataatgcaagctttgaaaaggttgaagggtacatccacggataaacgtggaaagatgagtgagggtactaagcgtatattcgatgagttgaccgaagctgccgtgaagctaatggagaacggtgactacaatgtttattcagatgatcgggagacctttgaacgtgaagccgcggggtatgaacgtttggcacgtgctcgacttggtttgccagaagttaaagatgcttctgcgggcacaaaagatatccaggcaccatcgtccatactggaaatggaccagccatcgtccgtactggaaatggaccttggtgcttcaactgccaatatatccgcagctactgctgcatttaatgatgatgacagtaatcttgacatgtttggtgatgatgacaataacgatgtcaaacgtagttcggatgccaatactgtaggttcaggttcgaatcctgggccagtccctcagggtactctgggaacctcaggtgtggagaaagctgaaaatggaagcgtggagtcggactatgtctatgatccttcttcaggttactactatagcagcagcacaggctattactatgatcctaattctggatattatggctctgcatctaccggaacctggtactcatacgacgaacacaccggaacatacaaagaagtacagaatgaacaaactggcgtgatcaaagaagagctgggagacgccatcaaggagtagcctagttgcctgctctgctctccctcatcacctatggagctaggttaggagatcacatgagccagtgttctttaaaggaaattgtagcttcaattttgctgttggcggctatggaggaagaaatgtaatcgtagtattttgggaactgcaggaaaccaatcagatgacactgtaggttgtaaactaaggcgaaccactggacagttgcaatttttttctgttgtaactgcggcttattttatgtttcccgttgtatt

SEQ ID NO: 36856 - DNA, 2759 bp, Setaria italica
  misc_feature (2756)..(2756): n is a, c, g, or t
  Peptide Sequence Number=SeqID_102830
tggtgctgatatcgtaatctgctacccccagatcagatgccacggtagcaagtatgtcttcccatgtaatgaccgactctcaacctgtgcattccccagcaaaaccaggggttcagtcttcagcatgagtctgttgctgcaatggagaacttgatgtcttctcatatgcatgacttatccagtcacacaacagttagcaatgttcaggcaaatagtcccttggaaataacagagaattggggcattagtggaagcagtcctgttcctaacgaagctcgcctgaatgattttgctagaattctctgttatttccaaggactatttcctgaacattgctaactgttgtgtgactggataagtcatgcatatgagaagacatcaagttctccattgcagcaacagactcatgctgaagactgaacccctggtttgctggggaatgcacaggttgagagtcggtcattacatgtggagactcagtggtgctgatatcgtaatctgctacccccagatcagatgccacggtagcaagtatgtcttcccagcttttagtgccaacatctgttactggttctggtaggcatggtgttctctcagttatcagcgaggtgcaccgcgaaagttgtggctctatgacatccatcccgtttgtggcaacctgataatatgccgctggctgaccttgctgcacctgatatgctgttggtgcactgaaagatctctggaaaggattgttctgagcagttccagtgaaagcattggttgtcggtgccacatgagctgcctgagatacatgcggcaatgcctggtccatcagggaattatctggacaagcagcaccaaattggctagcatttttggatgcaaagcctggagaaacagcccctgctcttttgaaaattgcacgtgaatgagtattttgagtaatatgagcattgcaagtacctcttccagcccttggtgaactgactgttccacctacgctcagtgagactcttactgagtgatgcctttgttggttttggctcccttcattaagaagagggctttggatggcaagaggagggtgacccgcatgcaatacagaagacggaggcaattgaggggctgcaaaatgccttgctgagtacaagtcattggggagtttttctggagcagatgctggcagctgggtgctcctgaatacttgcctcatcagtttccatttcggctccttatccgtagcatggcaatgatcattagatgatgtactgttaccccaatatttgcatggagctggagcgtcacatacaaaacagtggcacatgccacaatgctttgcatgagaagtagtgctgaatggcaagtttgaacataaatggcgtgaatgagggaagtccctgcatgctatcgggcctttctccgcaactatctgcaattcatccgagctgccatctcccgcgctaccctcctcatcggcaagggtaaccgccttatcagggtcaccatctaggacgacgcagtcatcatcatcctcatcacaaccaccatcagcattggccttcttctgcagcgcaggcttggacaactcactcataaacacaaggtcatcaggcttggctgtctgctgcagcaccggtggagcagatatctcactcataaccatgaggtcatcgaaatccccggttgcatcatcatccacatcgaaaaggtctgccgtccatccggcggggtcgatggacccgagggcgtcgctgatgaggaagtcctcctcatcggagctgatgtccacaacaccccccaccggcgccatccgaaccgcgaatcagaaatccttaagccgccccacagatttccccctaaatgaacaacttaacgaggtcccgagggaccaagaaacactcccccgacacaaagctagccggggaaaggtgagctcgacatgtcaccagccgccatggatcaagaaccggagagggttcccaagaaacttgaccaggggcatcccctatcccatcagaacgcaaatcttagttcatccggcagccgatttgctcgtcgacgcaaagggcgtcaccgcataacggcgaaatccggcggcgatggggtggggaaagtgccttaagcagtcctctctcccctcggtggagagggagaggggagaagagaaagatcacttctttctggcgtcccggggagatagcaggcgaagcagttcatcacctctgccgaaaatctccctagagatgctgctgttaattcattgcgccgctgatgtgttatcggtagaagctgctactcatcagcttgaggtgtcaaggctggaatctgcagacatactgtttgagtttgattggagttaagcagtgtctggctgcacttgcatttcatgggcaccatgaaacaattgattggagttaagcggtgtctggctgcacttgcatttcatgggcaccatgaaacaataaaatcgatggcaccaacgtgcctctctaggtttccttcataggagacagagtacatgttccttgtacagtatgtagaatctgtggtaggagtgtcttgctatctatgctgctgttaacatgtcgccatgtcacgtcgaacttgtggtcttagcctctttagggttagatgttacgcctagtacggctttagatgttaacagctatcccccctagaaaagttagtggggggccagaatttcaatcctcgtattgctcgtcatatatctatggttcatacttaacaaaaaaaaaaaaaaaacaaactaaagngaa

SEQ ID NO: 36857 - DNA, 314 bp, Setaria italica
  Peptide Sequence Number=SeqID_102831
atcagggttaccaagcaatgagattctacagactgggcaggttgtgttctgctcaagccacaaatctatacaggccatgtggaaatcatggccgcagtaaggaagggtgcgtagcacatctttctcttcgtattccgcaagacagatgatgcactgggaatcggcgtcggagtcggaggagtcggaggcgcccgagccgccaccaccaccgccgccgccggcgaaggcgcgggtggggaagttggcgacggcagcgggatcgagtcccccaccggcgccgccgcccgcggagtggcgtgggacggcgaaggaat

SEQ ID NO: 36858 - DNA, 790 bp, Setaria italica
  Peptide Sequence Number=SeqID_102832
gggaaatgtgctctctctctctcttttttctccaacaaagaaaaaaacctagaatgatttctcatatatacaacaaacccctcaaagctaacctacaacagccatccgccagtgcagatgcttcacattttacaggaccaccttcgccctgcagttctgcagaaaacgggagacgccaaagcagctgctatttgcagggccctagctgggtagatctgtccacctgctttcttactgtttggctgttattctcaggcgtggggttaacttcagacaacggcatgttgttagccccatccactgatgggtcagatgccacctgattctcctggtcgggctcatgtctaggagcctctgatgccctggatgaatgtccagcgctgacaaacaggcagcggcatggatctgatcttgacgattcaggagagcttggagggctaatcactatgctgtgtagaggaggtgtggtgtggtcgctatcggtatcagggttatcaagcaacgagattctacagactgggcaggttgagttctgctccagccacaaatctatacaggccatgtggaaatcatggccgcagtaaggaagggtgcgtagcacatctttctcttcatactccgcaagacagatgatgcactgggaatcggcttcggaggagtcgtcggaggcgcccgagccgcgcggggtggcggcgaaggcgcgggtggggaaggccgcgacggcggcgggatcgaggcccccaccggcgccgctccccacggagtggcgagcgacgtggacggggtagga

SEQ ID NO: 36859 - DNA, 1469 bp, Setaria italica
  Peptide Sequence Number=SeqID_102833
ttttttttttatttttctccacaggacaccgatatacccattccaaagaataagcacagttacagctattcttgcaacgaaaataagcatgttacatttaatgacatggtaatttgttaacgacagatgaaaatcacgagcacaacaggcaggtactagttacacactcacccccacactatcaggtacttaccacaactcaaattgctaatccttgcttgttgctaacaccgccactaccacctagttgagctcactatccctttcttggctcccgacccagatcagcctatctgggactgggagcaaattctaccagagcaatgtaacatttactaacaatgcaaattgttgttgaattaccgttgctagagaggaatagagaggagagccattactggctctcttcctcttcgtcttctgcatcctcctcggcttccttgttgtccgagtcactgccattgccagtggcattgttctggtaatgtggctgctgcgcagcgtgctggtggatactacctttgatgcggtaccggacgcgatgattgctgctggtggcgacctctgcggccatacccgttctccgcgtgccgttgccatcggcagggatggggacggccacaggtgcggcagcggcactggcgccgccgccggtggccttggtgagctccatctgcatcttgaggaagaactgcgcgcgctggtcctccagctcccgcgcggcgtccaggcgctcccgctccatccggaactcctgctccctcttggcgttctccacgcgctcgtacacctccccgagccgccggatcgcctgcgccaggtcgcgcaggccctgcgcgcggctgtcgctgctctccgcgccgttcgcggccgcggctggggtgtgctcctccacgcgctgcctcttcccgttcggcaacgcggaccgcgtctccggcgggaagccgtcggaggattcggacgacgcggacgcctggggcggcggcgacggcatcctccgcttggaccccgccgagggctggagcggcgtccgggtgcgctgcgggaagttgatgcgcggcggcaccatgggcggggcgctccgggcggccgcggccgccgaggaggaggaagaattgggcttatgcacgggggcgagcaggtcgtcgaggcggtcgaagtagggccaggaggagccgcgcttggacttctcgatcttgtacttcttcttgagcgtatcgatgcggttcttgcactggacgtcggacttgggcggcttggagtagccgtcgcgggaggagacgacctcggcgacctcctgccactgcgggtggcggaggctgccccggcccagcgccacgaagcgctccccccaggcgtcgatcagcgtggaggtggcgccgtcgctccacgcgtcctcccgcccgcccccgccgccgccgccggaggagggcgagggcttgcggagcgggatggcgacggcgacgtgg

SEQ ID NO: 36860 - DNA, 254 bp, Setaria italica
  Peptide Sequence Number=SeqID_102834
cagtcagctcccaaaatggtaatgtgtaccaaaggacctttaagagtgatcacaaaaggacacagtaccgtgcagctttcagcaaatgatcttctaaacattagctcttctttagtgcttaatcttatctctatgcaaattgacccacatcacatacaaggttatcaaattcttatcttcaattttacaccacctcctcatatgtcccaaaggaccacgattggcccatgaaattcaatgacaaaggctgatga

SEQ ID NO: 36861 - DNA, 395 bp, Setaria italica
  Peptide Sequence Number=SeqID_102835
ccaggaccggtcctcggcgtcggagaagcgctggctccgctcctcctcgttcgagctctcctccgcgagccgccgcccgctgccgctcgcgcggccccgctccacgccaggctcgacggtggtggtggcggcggcggcggcggcggcggtgatcgccgattgctcgctgtcgttcaccatggccaccaagaaaccactcccgcaggtcacccgaatcggcgtccaagaaaccaaacgggaatcctcagctcaatgcggccgatcacgggaagaagccaggcagcaaaaaagtccagagcgggtggaggctacacgcctacacgctacagagaattggaaaaacggaggtcgctgaaagattggtttttcaagtgacccctcgaagatccatagcc

SEQ ID NO: 36862 - DNA, 480 bp, Setaria italica
  Peptide Sequence Number=SeqID_102836
ttctctttacagttactagttaatcactcggctacttacatcaaacatgcttcagaatgtacacaccacaaccaacaaaaatccctagtcaaggtaagccccactccacccccagcagtcaagaattcactgcatatgttgggatcagtcaggccctggtttgcgttgcatccagagcatcagctcagctcgtcagtcatcactcatcaggaactgtatacaaccttggagatcaccgagaacgggatgatcgcccggtggcctttgtcaccgtagaacccaacgctcccgaagcttgcagtagagctgttcatggtggcgttcacgacgaaggtcagtagctgcttctgcccgctcggaatgacgaactgtgttggcgccacagagaccacggttccatagggagcgctgtagctaaccgtgtagctctcatcagccgccacattggtcaccgttctagttattggtttcttgtttctt

SEQ ID NO: 36863 - DNA, 160 bp, Setaria italica
  Peptide Sequence Number=SeqID_102837
tgatcatatgtcagctcacaacaggaatctttggtatcaacaacttgtaaattttgatcgaacttagctagatctagttgagcgcctttagattttcacggagcattcttatatcatctgaaaaaaagtatacatgtgactagatcgaacttagctagat

SEQ ID NO: 36864 - DNA, 822 bp, Setaria italica
  misc_feature (1)..(86): n is a, c, g, or t
  Peptide Sequence Number=SeqID_102838
nnnnnnnnnnnnnnnnnnnnnnnnnnnnnnnnnnnnnnnnnnnnnnnnnnnnnnnnnnnnnnnnnnnnnnnnnnnnnnnnnnnnnntttttttttttttttattcaatgcacatcctgttcgatatacttcctcacaatacgcaggaatttaaattgacaaaacgcacgcagcggttgtggtgaacacatcgtcccgttcgcaccaaccactcgaacttccgtatgcttccaagaggcggctcggcggaaccaacgacggcatcttgcgcttcccatctactctgccttggccttgccgtagctctgcatcgccaaggccagcgtcagcagcaggacgggcacggcgagccgcaggagcgtcgcccaggcgccggccgcgctcgtcgcggccttgtcggggctcgcgtcgctggcgtaggcgtaggtgagctttgccgggacggtggcggcgtcgacctcgccgatgcagtactgcggcatcatctccttggcggagtcgctgtggccgatgtccacgaagtcggccgtcgcgtccttgccggtgcacgcgagcaggacctcgtcgccgccggggtgctcctccatgaacgccgtgacgtcgtacaccttgccggcgatgatgagccagcaatccttccggacgttgtgcttcctcacctcctcgaacgagtacatcttccctcccgccatcgcgacgttccgggatcactcgatcgaggacctgatcgagaaagttttcgttcttgaggattgaacggaaccagttcaggaaactggagtgatatatgctgctccgttccggcgcgagggatgtctgctcg

SEQ ID NO: 36865 - DNA, 693 bp, Setaria italica
  misc_feature (630)..(630): n is a, c, g, or t
  Peptide Sequence Number=SeqID_102839
tcttaggacagtcagggataaaattgctggtgtaatggtcccgtggctctacatagggatgctattttcatcattttgttggcatgttgaggaccattgtttctattcaataaactatttacattggggtgagccaaaatgttggtatggggtacctggagcagaagcaaacacctttgagcaggttatgcgccaggccttacctgatctatttgatgcacagcctgaccttctttttcaccttgtcacaatgctgaatccatctattttacgagcaaatggtgttccagtttatagtgtaatgcaggaacctggcaatttcgtcattacttttcccaggtcattccatggtggcttcaatttaggtaattcaggacatcatctccccccaaatatcctgtaccaaatttttaaatgtatcattcaaaattcaggtttgaattgcgctgaagctgtaaattttgctcctgctgattggttacctcatggtggaattggggctgatctatatcgcttataccgtaaagcacctgttttgtcacatgaagagcttttgtatgtggttgcaaagaatggtgtggacgctgagtcgcttccccacttgaagggagaaatagaaaggctttttanaaacgagagaagacgtcgagaggagctatggattaatgggatcatcaaatctagtccaatgtt

SEQ ID NO: 36866 - DNA, 210 bp, Setaria italica
  Peptide Sequence Number=SeqID_102840
ctcgatggtctgcacaatcctgcgtagcttcttgcccatcctgtaacggaatacaatgggattacgagcggggactaggagtcttgctacctcatttccaagcttgctgtggtggcccttcttcttggcttgtcgccgaagcgcctcgtacttgaactcatcaaagacgtcgttggcctcataggccgctgtcttgaggtctttaagcca

SEQ ID NO: 36867 - DNA, 377 bp, Setaria italica
  Peptide Sequence Number=SeqID_102841
acatggacgacgaataattggagacggcgattgctctagggtaccagtggtggatgcagggtcgcggcaatgttccagcgatgtatatgtgtcaagatgctcctcctttccccatatgaactcaagcttagggcaatccataatatcaataattctgatagatggaggaagaatgaagagctgtgccatgctttcacaacagcgtatacttatcttgtttagatgtggcaggacttgatctgttgtttgtgtaggttcgccacctttcgcttgtgtgggccctattagcttgttgcaggactcaatccacaagttcttcaaagataccaagctttggaacacttcttctggccagtagatgagcacatcacaattta

SEQ ID NO: 36868 - DNA, 619 bp, Setaria italica
  misc_feature (439)..(439): n is a, c, g, or t
  Peptide Sequence Number=SeqID_102842
ttttgaaggaaccaagcaagaaagttaaagcagcagattaagcagctaatttagtgtcactacaatgcacaaactctcagcagaaagtttttggaaacagtaaatgaacgaaccagtactattcggtgctgcaggtaattagtgactttttacctccatccgaatttggtgaccaaattcttctagtctggaatgggctgttgttttgatgatccggattgaattggccacagcagtttcttcttcttcttccttctcgggtggaaaaaaggaaagaaatacgccttctatgcgcaacgagacagaaagaaatttggcagactaaattacttcatcaggccatactggatgcatgcctttgccgttagagatcgtcatgattgatgcacgaggttgcagtgggtcccggcagctatatcatccatcatcatcatcatcngtttctgcttcatcggctcacgtggatgacagaatggagtaacatcatagagcattctccacgactttcatggatgacagaatggagtactgtacattagtgacaagagcattaccagcagctggtagtgctcttgtcactaatgtacagtactccattctgtcatccacgactttcatt

SEQ ID NO: 36869 - DNA, 402 bp, Setaria italica
  Peptide Sequence Number=SeqID_102843
acggtggtagatttggaagtgttaccaggctatcacagcttcttattgttagatatacgaggcatggacgacgaataattggagacggcgattgctctagggtaccagtggtggatgcagggccgcggcaatgttccagcgatgtatatgtgtcaagatgctcctcgtttccccatatgaactcaagcttagggcatgccaaaatatcaataaatctgatagatgggggaagaatgaagagctgtgccatgcttttacaattccaaatatcaataaatctgatagatggggcaatcctgtttagatgtggcaggacttgatctgttgtttgtgtaggttcgccacctttcgcttgtgtgggccctattagcttgttgcaggaatgaatccacaactccttca

SEQ ID NO: 36870 - DNA, 1130 bp, Setaria italica
  Peptide Sequence Number=SeqID_102844
tggtcaggagaagaccttctttgaccaactgtcacatagtgtccacgaagacactgagccgtatcatcatcaggagaaaggatgaatccaaacttgcgcacagggtctactgcaatcctgagaactagccatcctctccaaagcaaccgtggtcatgaactagttgttattttcgtccgtaccagactaagctagaaccagacggtcgtgaacaccttcttgataccaccagataggtcatattgtccctacacggcggcaaactgaaggactcagagtgacatcatattctccacggctttcatggatgacaggatggagtactgtacattagtgacaagagcattaccaacagctggtagtgccgtgaaaacaaacttggtcgtttttgtcatccactgcaggcctgtcatcgttagcagagacttgcaatgaagctgagtatacagatggcagtcgttccagtacttaagaatatgtgtacaagtgagtgccctcctttatgctttaatttaagaacaaatggttgatgtctagtttaggccctggcagtggagaatggtacggtacgactccatgagttcttcaagccttgggactgcttccattcaccacaaattgctctccaaaactgagaccgatcaggatctcgtttcagtgattccgcatcagctgatctcaacaccaagggatagcacatatttctagaatttctctatgcacgtcaactgcatccaagactgaaaaccaatagccgtataaaccaacaatatgtggggttacatcagtgagaaaggaccgcggaatgaagatgaaaccccaaaatcccaccccacaatcccatctattaaccagttcatcaacaaaataggagggcatgcaaagcagggaaatctgaaggaaacaaattgaataagaggaaagtgaaaggtcgtaccttcatcatagctgcttgaatgaacgtgtgatacgtcttcctatacaaagctgtcaagcagctgtttgatggcgttagtaaaactgcttcatgtctatggctgagcagtattcgatcttacggctctgaagagcagagtaactcccacgaccaccatcacatcctaaagatgcaaggcatcggcagccagaaa

SEQ ID NO: 36871 - DNA, 758 bp, Setaria italica
  Peptide Sequence Number=SeqID_102845
acagcaaaaggcattaccttaacactgctgacaagatcaaagaaggtcttctcctgaccaactgtcacatagtgtccacgaagacactgagccgtatcatcatcaggagaaaggatgaatccaaacttgcgcacagggtctactgcaatcctgagaactagccatcctctccaaagcaaccgtggtcatgaactagttgttattttcgtccgtaccagactaagctagaaccagacggtcgtgaacaccttcttgataccaccagataggtcatattgtccctacacggcggcaaacaacagctggtagtgccgtgaaaacaaacttggtcgtttttatcatccactgcaggcctgtcatcgttagcagaggcttgcaataatgaagcttccatatggcagtcgtgtgtacatgtgagtgccctcctttatgcattttaaggataaatgggtcatgtctagtttaggccctggcagtggagaagcacgactccatgagttcttgaagccttgggactgcttccattcaccacaaattgctctccaaaaactgagaccgatcaggatctcgttttagtagtacttaagtgattccgcatcagcttcatcagagctgcttgaatgaacgtgtgatacgtcttcatattcaaagctgtcaagcagctgtttggtggcgttagtaaactgcttcatgtctatggctgggcagtattcgatcttacggctctgaagagcagagtaactcccacgaccaccatc

SEQ ID NO: 36872 - DNA, 564 bp, Setaria italica
  Peptide Sequence Number=SeqID_102846
gaggtgcggcttatgtgccacccaaagatagttccagtttctgtgatgaatcccaattataatctatctgaggcagtgcttctgtgtcacggacacgcagctctagctcagatattgaagacatgtgccttgatttaactattcctaaggagagcagcggcttgccttcatccagccttacaaccctgagccttggtgcttcaggtaggctagtcaactttggacagttttttatatcaatctcctcaagtacaggaaaggttaattcatcttcttttccttctgttgcgacccatatctccaagctctccaaatcatgtaaccggagttgcttcagtgctggaaatggcgtagacaccatatggctgcacaggctttgcaatttgtccaacttttccaaatacagaacttcaagggctttgaaatggcagaattgaggaaattcctcacacagcgtgcaaccaaccagttggagctcagtcaagtgctgcaacagactaagatctgttatccatgatggtaaattggtgcctttgtaggactttatgcttagcatctccagcc

SEQ ID NO: 36873 - DNA, 485 bp, Setaria italica
  Peptide Sequence Number=SeqID_102847
gggcatcatcattccacttgagagataagtgtgtgagtttaatctttattttcaagactggctgcttttgcaagcacttctgttacattttgcagaccacttaactctaactctccaccaaggtttaagttttgaagttctctgatagtactacatcccaagccatcaccaataataaaatatgttagagtctgcagagaagtgatctgtccaagtcctggaggcatgcacgtcaatgatttgcatccatgggtatagaggtgtcggaggtttgccaaatacttcatatcctttggaagttgacaaaggtttgtgcaatgagagaggtccaacgtttgtagattatacataatgcttataccttcaggaagtttctcgaactcatgtgacgacagattaagataccttaggtgttgtatgtgtcttgtaagctgttcctgtcctgaacagtctatatatgctggaagtgtaatgctcgcagtgaa

SEQ ID NO: 36874 - DNA, 573 bp, Setaria italica
  Peptide Sequence Number=SeqID_102848
gctgtgcttgctgcaagtttctgaaaccaaatgtattcatctcggtgactaggtcctcgatggtctgcacaatcttgcgtagcttcttgcccatcctgtaacggaatacaatgggattacgagcgcctcgccgaagcgcctcgctgaagcgcctcgatggtcttgctacctctgctccaagcttgctgtggtggcccttcttcttggcttctcgccgaagcgcctcatacttgaactcatcaaagacgtcgttggcctcataggctgctgtcttgaggtgtttgagccaagctgctactcctcgtcgggaggctcctttctcctccgcatcctggatgatttccaggattgctggcagcatgcgctccagggtcttgcgctgctcctccatgccttccatcaccttgtattggtccagcaggtagctggatgccttctccttcaccatggagatcagtggcccgatcactaactcggccatggttgcttctccgccggcaggaaacacaagtacacaaccaacaggaacccagctcgttcgtccgatccggccgtacggccgcacgctcgatc

SEQ ID NO: 36875 - DNA, 418 bp, Setaria italica
  Peptide Sequence Number=SeqID_102849
tcttaatgatgcaaactgagctggaacataacagccaatttgtgcaagaatgacatgaatatgcgatcaaccactcttaatgatgcagcctgagatatttggccccatgacaagaaccatattggatgcttcagagagaaatgtattgttaggaacaaaatcagtatgcaaagtctccagaataggatgtcgtccagcattgattgccattgggccatcatctgtgaactccggtcttgtgtaacgatcaacaggctttgtagatattgtatgagcaaaagagtttacaatcatgtccaatagacacaatacttcagcgagcaatgtaaggataccaatgtcttctctgatcttgtcaataagaccttccaaacaaagttccgtgcggaagaagcactcagcagcagctgacttgttc

SEQ ID NO: 36876 - DNA, 433 bp, Setaria italica
  misc_feature (413)..(433): n is a, c, g, or t
  Peptide Sequence Number=SeqID_102850
gggatagtggacatgatgtttaattcctcatctcttatatgcaagtatttgccagtgattttggtatggagtcactgtgccagtcttgcactgggtggagcatttggttggtggagcatttggtcagggctcaggggtgggctgcccttgctgccgtggacatcctggaaacaatcgattgagacatcctgaaaaagaacatggcttggagattgtcatcgtcatttgcgtgctccctagctatgcattctcatcagccaagctaaaatttcgatagtactgatacagcacgcgctgtgtatgtatagactcctctaatcgcaaacataaaagtcgacatgatcatcaatgaatcagttgactgtaagtatctattgtaacttattatgttaataaaaatagttacataactnnnnnnnnnnnnnnnnnnnnn

SEQ ID NO: 36877 - DNA, 485 bp, Setaria italica
  Peptide Sequence Number=SeqID_102851
agactaaagtaaagttaggagtaataccttgggaagagaagttgttacagaacagaatcacataacgaaaattcgccatcttctttgcaaatattattccgctacattttgcttccatgagctttattgaccatggaggaatatgcaagtatcatagtttcactccgttgaggttttggtatttggctggagcttctgttcttcaggagttcctcctgaagtcgcttgccccaggctgttagtggtctagcgtggtaagcaggttgtagtcgtgttttgtttgcagtggcgcaacctttctcttttgtttcgagcctctccaatgggagtcctaagctggatccatatgtttctctctcttataggaccagctcctatacattgtgaggttgattccatatggaaccagctcccatgcggccatgcatagaatcaggtcctgtgtaatataatatagggagagtgggagagagaatagagggagg

SEQ ID NO: 36878 - DNA, 340 bp, Setaria italica
  Peptide Sequence Number=SeqID_102852
ccataagacagctgattgtcacagcaccagcaatcgctttaaattcacggtgaacaagcatcccaagggaactacttgcctgaaatttgttggacagagatttgaccaatatctctggaacaaaaataagcaagttaaccatgcccatgaaacaagtttccattccagatcatgccacactgctacaaacgtgaatatcacccagatgctcagtagctttcttcgagaaccaccaagaggaatgtataagtacctgaccaaccatctgttaaaagaagcatgccagcttttccagaaactctccagatcgtgacaattatttatacacctaggcatgttt

SEQ ID NO: 36879 - DNA, 342 bp, Setaria italica
  Peptide Sequence Number=SeqID_102853
ctgggcttccagcatttcatcctttgccttgggacggcagtgatgatccccaccatgctggttcccctcatgggaggaaatgcccatgacaaggcattggtggtacagacagtgctgtttgtgactgggataaatacaatgctccaaactctgtttggaactcgtctacctaccatcatcggtgggtcatatgcattcataatcccggtcatatcaataatcagtgacccctcactgatgcaaattgctgatgaccatacaaggttcaaaatgacaatgagagccatacagggggccctgataatatcctcctgcattcaaataatacttggctacagccta

SEQ ID NO: 36880 - DNA, 459 bp, Setaria italica
  Peptide Sequence Number=SeqID_102854
gttctagggaaagtgaaggatttcttgggggagattgcaaaggcaaaccagaagttgcagctcgacacacaagtatgattccaagattctaaccaatcttgtgttaatcatgttcttggtgacatggtttgactcgtatattcattcaattgcagaacaagcctcttgaggagtatgatatcgaaacccttacagggaacgaagaggagtacattgagatggtgagcgatcttggcaagtctaccacaggcatcatggaggaaaccttgaggagggcgtaactgcttgaactgagatgcccgtgatttattctctgtatttatttcctacaggatttgcttcttggtgttgctgatcttcattcggagcaagctgtggaggctgctgaagcaacaatgaatggcttccggccttcaggaatgccagttgcttgcagctcatctgacccggaagatgata

SEQ ID NO: 36881 - DNA, 841 bp, Setaria italica
  Peptide Sequence Number=SeqID_102855
aaaggaaacggtaaagaaacaaacgttaaataacaaacccgaaacctaacaagactcagctccgttgccatccctagcggcctcctcactgcgccggctagctaacgctttaccggagggacatgggagagccaagcaaggagctcctggacctgccctccgaacccaggccgcccgcctccttcattgagtcgcttctcgctagcagagatcaccagcagcaggacaaggaggggaagcgcaagccggggccgcccactgacccccttcccaaaagccaagttctagggaaagtgaaggatttcttgggggagattgcaaaggcaaaccagaagttgcagctcgacacacaaaacaagcctcttgaggagtatgatatcgaaacccttacagggaacgaagaggagtacattgagatggatttgcttcttggtgttgctgatcttcattcggagcaagctgtggaggctgctgaagcaacaatgaatggcttccggccttcaggaatgccagttgcttgcagctcatctgacccggaagatgatagtgatgacagcgatgaagatggtggtgacagacctatcgtgtctgacatagctaaatgtaaaggtccagatgaagcggagacagatccagcagaaggaaagaagcccaataaaagacagaaaattgttgttctcaactagtatccttgtctttgtaaaacaagagtagtagctgtgctctttcgaaggttctttgtatgttcttgtggtagccttgactcttgatcttggcaagtcttttatgcatttcccgagatgaaatttacagcagttaattgtctagaagattgacaggg

SEQ ID NO: 36882 - DNA, 391 bp, Setaria italica
  misc_feature (18)..(18): n is a, c, g, or t
  Peptide Sequence Number=SeqID_102856
caagctgccggcactccnccttgttctgttgaacggtttgcgcagcgtggatgatcatcgagatgagccaccagcatcaactccagccagctgagcgagggtggcagcctgccccagaccattccatagcgccatctttgtcacagtccctgcgtgcttgtctccacgtgtctttctcagtaccacctgacctatgtagaactcaggctatccagacaggcaccacgagacagagttgatactggcagtgtttgagactttgatttcttggtgttgctaggaatgaagctctggtggtttaagttattgcgcaaattccactacgcccccaacactgtaccatcttgcattattgcaagctgcctagccgcgtaggggtgtttggttccca

SEQ ID NO: 36883 - DNA, 514 bp, Setaria italica
  Peptide Sequence Number=SeqID_102857
atctcggttcctgaggctctcgagatgtggatggcccggttgtgtattgtatgagatgccgagtccatggatctgtagaggttttgatgctatgtgatggttccggtgtttaggaccggatgttcttgatgcgtctggtgtttacaaatggtctgcgttgatctgttcctttgtctcggcgttctggttgcttcttgggcagctggtgtagccgtcgtagctattagaatgatgatggtgcaaatttctaggattaccgtactttccaactgagataagattgcaactgtcatataaaactctagttcatctatccttgttaaaaaactgttttttgagggatttttgagtctcagttccatgtagtcattatagtatcaactagtgcaggtgatgcttcgatctgtgttttggtggacctacccaagttgataccaacctcttttgtctagccgttttatagcctgattagctctttgtttaattatgccataacttgttgtattaataagtt

SEQ ID NO: 36884 - DNA, 514 bp, Setaria italica
  Peptide Sequence Number=SeqID_102858
ccaacttgccctgtcaagcggcttccttgatgtgttctcgtatgagtagattccaccatacggctggtgatggtgtgacacgctccaacactgagagagcatcgcttgtagcaccaaaagcaagataagaagctacaacaccagtacccaaagattttggtaatatatatgaatgtgatggaagtggtggaagtgacactgacagcaatgacgctggacaagaaagaagatccaaagcaattatcttctggtgaatttgacgaactatattcacagacctgcattcctttaacagggatgcaaaatgcatcggggagatatctcgaccaaagcattctgcacttgcaactgataggaactttactccaattcgttttgcggcttccggtaagttgaagagcataacgctagcagaatatcactgtgcttattaaatcctcaaaagagaagtcgtggcatcatatccagtgaagagatgcacaaggagtggatcttgaagctgtggagctgaaag

SEQ ID NO: 36885 - DNA, 419 bp, Setaria italica
  Peptide Sequence Number=SeqID_102859
gctgcttccgcggcgctctgccaaaccgcccctgatttttccgcaaaccctcttcgctaataacggcgccggtgggcggagcaggtaattaccgcccgcctttctcctcggggttgccggaaccctagccctccccgcccgggggtcgccggcggcgtggggatgtacccgtcgggggccgtcgtgggggcggcgcccgcggcggcgccgagcgcggcgtcaagggtggagaaggccacgagccacctgctcatggggcccgactgggccgtcaacctcgaaatctgcgacatcctcaacgccgacgtctggcaaacgaaggatgtggtgaaggcagtgaaaaagagattgcagaacaaggacccaaaggttcagttctttgctttgacgtttttggagacaatgatgaagaattgtgg

SEQ ID NO: 36886 - DNA, 430 bp, Setaria italica
  Peptide Sequence Number=SeqID_102860
tctttgcgcttggtcccggcggcggcggtcttcttgggcttggtggcggccgcggcggttttggcggcggcgggcttggccttgggggaggtccttcttggcagcgtcagagagcttgtaggaggccttgaccttgacgagcttgcccttggcggcgaatccgcggagctggatggagagcatcttcttgtagttggccggcagcgacgcgccgtgcttgtcctccatgtacttggcgatggcgtgggagctcgagccggtcctctccttgagcgccgtgatcgcctccttgatcatctcaaagtagggcgggtgggaggcgccggctgcggcggccttgggcttggcggcgtagccgccgcctccacggccaccgtagccgccgccgccgccgccgtagccgccgccgccatagccgccaccaccgccg

SEQ ID NO: 36887 - DNA, 886 bp, Setaria italica
  Peptide Sequence Number=SeqID_102861
tttgagggaacggcaagttcatttcatatattaagagagcgagatacatctccatcacaagaaacctaaccatcagctacactaacaccgacccggatagataacaccttgcctaacaccacacacgattagacatttctggcacgcacttcgtttgtacaactcctaggcacaaccaccacaatcagagctacgacctatggaacagactcatgcggcgaccttccgggccttcttggaggcgggggacttgacggtcttgggcttggccttggccttcgccgcgggggacttcttcggcttcgcaacaatcttcttcttctccggcgtcttgcgcttggtcccggcggcggcggtcttcttgggcttggtggcggctgcggcggtcttcttgggcttggcggtggccttgaccggcttggccgcggcggttttggcggcggcgggcttggccttgggggagtccttcttggcagcgtcagagagcttgtaggaggccttgaccttgacgagcttgcccttggcggcgaatccgcggagctggatggagagcatcttcttgtagttggccggcagcgacgcgccgtgcttgtcctccatgtacttggcgatggcgtgggagctcgagccggtcctctccttgagcgccgtgatcgcctccttgatcatctgcacggaacaaacaaagaatctcgatcagcccccaagttcgaacgcaatccaaatcagagacgaaaccagacgcgaatcgacaagggcacaaagctcacctcaaagtagggcgggtgggaggcgccggctgcggcggccttgggcttggcggcggcgggcttcggcttcggcgcggcggccgtcttggcggggcgggaggcgggcttggcgaggg

SEQ ID NO: 36888 - DNA, 941 bp, Setaria italica
  misc_feature (1)..(40): n is a, c, g, or t
  Peptide Sequence Number=SeqID_102862
nnnnnnnnnnnnnnnnnnnnnnnnnnnnnnnnnnnnnnnntttttttttttttttttttttgtagggaacggcaagttcatttcatatattaagagagcgagatacatctccatcacaagaaacctaaccatcagctacactaacaccgacccggatagataacaccttgcctaacaccacacacgattagacatttctggcacgcacttcgtttgtacaactcctaggcacaaccaccacaatcagagctacgacctatggaacagactcatgcggcgaccttccgggccttcttggaggcgggggacttgacggtcttgggcttggccttggccttcgccgcgggggacttcttcggcttcgcaacaatcttcttcttctccggcgtcttgcgcttggtcccggcggcggcggtggcggctgcgggcttggccttgggggagtccttcttggcagcgtcagagagcttgtaggaggccttgaccttgacgagcttgcccttggcggcgaatccgcggagctggatggagagcatcttcttgtagttggccggcagcgacgcgccgtgcttgtcctccatgtacttggcgatggcgtgggagctcgagccggtcctctccttgagcgccgtgatcgcctccttgatcatctcaaagtagggcgggtgggaggcgccggctgcggcggccttgggcttggcggcggcgggcttcggcttcggcgcggcggccgtcttggcggggcgggaggcgggcttggcgagggcaggcatggtggcgagctcgaaaggcagggagggctctagaaactgcagctgtgtaagcgctactacgatttcggaagcttgagttgggaaggggaaaccctatctgaggtgccgccgccgccttgccgcgcctcgcggataaaacccccccaagccaaaagttggaaaccgtct

SEQ ID NO: 36889 - DNA, 614 bp, Setaria italica
  Peptide Sequence Number=SeqID_102863
ctcagcgactggagttttttaacggattctacaagcaattattttacgattacacctggcttaatacatcttaagatatacagggagtaacaggagcaagatccaccggatcagtgcatgtccagcacacttatttgttctgactactatcattcatagaatcatagacgtgttgttcttgcagtgactgagcttgtaaacagcagcgttcaacgggctgactgccgctacatgtctacatgttctccttcacaaccgtcacggggcaggccgcgtggttgacgatataggtgctcacgctgcccatcagagccctcttgagcgtgctcaaccctctactcccgataaccatgcagctgaggggaaccaggtcgactgcttcatacagcttctttgcagggtcgccgtagaatactttcgcaaaaacttcaatccctctctgatgtgccacttgagtgaggatctcaattgtctccttgtctggagacacaccgtaagtcttggtgacatctgagaactcagccagagggatgagtggcgaaccactctgttcccagagatgaactgcgccttgttcattctgataggagctgttcacatggataagtatgtag

SEQ ID NO: 36890 - DNA, 805 bp, Setaria italica
  Peptide Sequence Number=SeqID_102864
gtgccacgactttttcaagatgcccgcggaggaaaggcggagttctactcggaggacaaatccaagcctaacaggctcttctccggctccgtctacgagaccctcggcgagaggtactggcgcgactgcctctgcctcgtctaccccttgcccgccggcgacacctcggactggccccacaagccacagaggctcagagagttcgttgagaattacaccgtgctgacaagaggcctggccatggagacccttcgcctgctgtgcgagggcatgggcctccggccagactacttcgtcggcgacatcagcggcggcgtggccgtcgacatcaaccactacccgccgtgcccggacccgggcaggacgctgggcctgccgccacactgcgaccgggagctcatcacggtcctcctccccggcgccgtcccaggcctcgaggtcgcctacaagggcgactggatcaaggtccagccagtccccaactccttcgtcgtcaacttcggcctgcagctcgaggtcgtgaccaacgggacgctcaagagcgtggagcaccgcgtggtcaccaactcggcggcgccgcggatgtcggtggccacgttcgtcgcgccggcggacgactgcgtcgtcggccccgccgaggagttcgtcggcgagggcaacccgccgcgctaccgcaccgtcaggttcagggacttcaagcgcatgtataacgttgtgaatctggggtcctcgctcaaccagattactagcgtcaagaacaaccggaaggagatgtgaagcagaagagccaggacaagcccacaag

SEQ ID NO: 36891 - DNA, 511 bp, Setaria italica
  misc_feature (182)..(182): n is a, c, g, or t
  Peptide Sequence Number=SeqID_102865
aaagggttgatcaacctgaaaacatacaaaaaattactgaagcaataataaagaaaataaacttttggaatttgagaaagtaaagttaggtcaagaggagttgttaccgttgtccatagggcaactttttgaaggcaaccgaatgctctggaagatttaaagtgatttgtgacaaagtattntccccaaacatgagaaagccaatgatagcaaaagagccgtatattgctgtgcaaattgcaaaacatataaacagtgccttagggaacttagagcgatcagacatcgattggtagatatttggaaacaccgagtgcccagcataacaaaaaccataaatcccaatagcaaagggtataccatcccacttcactgctttccccgtcatatggaatcctgcgctgctggtagcaccaactaaaccaacggataggaaaaccagaagagttgcaaacacaccaccagagaaatgagaagacgaccgatcctcccaaaggctgcctctccaatg

SEQ ID NO: 36892 - DNA, 1921 bp, Setaria italica
  Peptide Sequence Number=SeqID_102866
aattttttaattacaggcacactgaagtcttcataaaacacggtcagacagacagacagacacaggatcccccctcttattacaggcctacagggcacgatggtgccctgtacaggcgttgggtcactgacgacagaccgaaaacacagtttgcactatgcacgatcaaagacgtacggggttacagggcacgatggcgccctgcgccggcgcgacgtacgggtcatggaagacttggacgcgtcctgtgcctcaaacttggatgcttcttctcagtagttctcagcaatcttgacgatcgagttgtacgtcccgagaacggcacagacggtgcccagcaccacggtgacgacgcttgcgatgacctgcgagcgtgtcgctttattccgagcgatcttcaggaagcacagggcgggcatgatgagcgccacaagtatactaaggagagatccaatgagagccatcacaagaccaaagaatggcaggagaaaggcaatgcatacagttgatgcaacaagggcagtcctcagagtaacagagaagactctatcagtaagaaaccctgctggacgcaactcttctatactccgagccaatgggtttatcactatagaatatttcgtgaaaggaataatcaccgtggtccacagtgcaacttttgaagcaaatgaatcttttggaagattcaatgttatttgtgatagagtcttgtctccaaacatgagatagccgataacagcaatagcaccatatatggtcgtgcaaattgcaaaacatatgtacagtgccttgttgaattgtgagcgatcggacattgattggtagatatttggaaataccgagtgcccagcataacaaaaaccataaatcccaatagcaaagggtataccatcccacttcactgctttccccgtcatatggaatcctgcgctgctggtagcaccaactaaaccaacggataggaaaaccagaagagttgcaaacacaccaccagctgaaacataagatatcactcgaagatcacgcaaccatacacttggcaagacaacgagagcaaataacactccaaagaagtgcttcccgtcagcatgaattccatgccaatcaaaagtggtgcttgtgaatattgatgctaaattatcaccttccaaattaatgaactccacacaaaaggaatatagctctgtatacagaacaatagaaatgagaagacgaccgatactcccaaaggctgcctctccaatgtctggaaaggttttaacaccatctttgctctcaaagcaatacttgagaagaaccccagtgtagcagcaaacaatagcgaaaaaagccagaaccacaaggctggcccatccggcctcactaatcgtgtatggagcagagaaaatgccaataccagcaagcacgttgaccccattgaatacagtttgtgttaggctgcatccctgggtgattggggctgttgcagcttgtttcaaattatctgtgagcttcccatcacttagcaccgaaaccaaaggttctgctagcaagttcttgactgaatcttgcttcccctctggcttgtccgacaaaaggggcagcttcaggtcagagcccaggccactgccgtcaccgccgcccaggtgaccgaagcccggaggcgcagcaattgtgaaggagtcagtagcttcccggaagctccgcggccaccgctgggagttcaacgaccccgcttccgcctccacctcgtcgtcgctgccgccgcggactccgccgagcaggcagtcctcgatgtctccgtcctccaccaccgactgctcctccttccagtccgccgccgccgccatcacgcccgcctctcacgcgtgttaattggccggggttttggggagtgcaatccgcttgtacgtagacgagagggaatgttttcaatggcggg

SEQ ID NO: 36893 - DNA, 1765 bp, Setaria italica
  misc_feature (50)..(50): n is a, c, g, or t
  Peptide Sequence Number=SeqID_102867
tccctgttgtgtccttggtctagttctcttttttttagtttttttttttntttttttttttttttgtttaaaaggcacatggttacattattgcaagtgacgacacagttttttagtcgaatatatattgtggtccgaataataatctacagaaacctcagaaattctagcaaaaattttgatcgtacgcaacatatctgaccattttcaggtcccacaagcggagtcaggtaatgatctgcacgtattgggttgccgctgctcaagattagtagtagagcttagtagttttctgcaatcctttctatggaggagtacgtccccacgatagcactgataatgcccaatattatgatgccaacgcttgcgattacctgtgaacgagtcgctttgttctgtacgatcttcaggaagcacagggccggcattatgactgccacaagtatactgagaagtgatccaatgagagccatcacaagaccaaagaatggcataagaaaggcaatgcatacagttgatgcaacaagtgcagtcctcagtataatagaacaggacgtttcattcataaaaccttcaggacgcaactcttctaaacctcgagctattgggtttaacaacaaggcatatttggtgaaagggttgatcaccgttgtccatagggcaacttttgaggcaaccgaatgctctggaagatttaaagtgatttgtgacaaagtattctccccaaacatgagaaagccaatgatagcaaaagagccgtatattgctgtgcaaattgcaaaacatataaacagtgccttagggaacttagagcgatcagacatcgattggtagatatttggaaacactgaatgcccagagtagcaaaatccataaacaccaatagcaaagggcatgccggtccagtttactaccttccccgtcgaatggaatcctatattatcagttacaccgactaaaccaacagacacgaataccaaaagagttgcaatcacaccacccgctgaaaggtacgatagcactcgaagatctcgcagccatactgttggtaagaccaaaatagcagttaacactccgaaaaaatgcttcccgtcgacatgaaacccaagccaatcaaaactagctttaggaaaaattgatgtgaggttatcaccctccagaataatgaattccacacaatatgagtatagctcggtatacaaaataatagatatgaacaggcgaccaattcttccaaatgcagcctctccgatgtctggataacttgaaataccatctttgctctcaaaacaatgtttcagaagaattccagtataacagcaaacagttgcaaaacatactagaactgcaaggcctgtccatccagcttcgtgaattgtaaacggagtggaaagaaggccaacaccagcaagtacattaatcccattgaagactgtttgtgtcacattgcacccttgactaatgtagacttctccagtgtgttgcaaatgaaatgagactctctcatctcttattgaaccaagtgttttaggcaaggtcttgacaaagtcttgctttccatcagcattgtcggatactaaaggcaacttcaggtcagagcccagaccgctacgaccaagatcgaggagggagtatttgcttgtagacgggcccaagtaaccgaagctcggggatgcagcaatcgtgtaggtatcagttgtttccctgtagctctgcggccacgggcgggactggaaggagcgcggcgaaccgaccccgtcgccgt

SEQ ID NO: 36894 - DNA, 366 bp, Setaria italica
  misc_feature (15)..(15): n is a, c, g, or t
  Peptide Sequence Number=SeqID_102868
caacaacgaccatancgtgcacggtggaagcatcggaagagccaggttccgactggccatcatccaaagagtcgaccccgcctgcccggttccggcggtttcactttcatcttcagccgtgggcggcgatcggcgaagcgtcccgaccggcgaccgcaagcacgcgaagtgtgcactgtgccgttgtccgttacggcgcggcggagccggagacgccgagttgcctctcttgccagaaagagtaaacgaagccaccgacgcgaggtttccagtccaagcaagcaaagggggcagaccggtggagtcaccaccagagagcggccggcagtggggatcggtggaggcggtgggtgcgggagaacgccc

SEQ ID NO: 36895 - DNA, 666 bp, Setaria italica
  misc_feature (382)..(382): n is a, c, g, or t
  Peptide Sequence Number=SeqID_102869
gacattctacaccctcgtacgtctttgaagtcgtcgtcgtcgtcgcagcatacacataaccattattaaccattaattacttctatgtatatcttattatcagtgattaatttcgtacgtgcctagctgaatgaaaaagaacaaaatgacttcgtatatgacttaattaatttttgtgttgctccttgattcataggtgatgattgatccggatgctcctagcccaaatgaccccaacctgagggagtatttgcactggctggtcactgatattccaggaactaccggggcaacgtttggtgagccatcagctccctgtcttaatctgtctctgctaccctctgtccaccagacaagcttagctttttacacggggaaaaanaaaatcaaacccacacgacacaatcacacaacacgtatctgcacaggcattatttaaacttgtcgatcggctacatagaaggagataaattacacacacataattaaggttaattaattagttcaaaacattattacacatgtacaagtagtactgataacgattgtgtatgtgatcgatatgcatgcatggctctggtgatgatgagcgcagggcaagaggtgatgtgctacgagaaccctcggccgaccatggggatgcaccgcttcgtgttcgtgctgttc

SEQ ID NO: 36896 - DNA, 612 bp, Setaria italica
  Peptide Sequence Number=SeqID_102870
tagaaatgaaacctcggacacaaagaaacatgacgctggcagtctatctgcagagactatattaaccatgactgctactagtgttcaacagagcaatcaagggaatgaagaaagtactagcatagatgaaggaacttaccgtaacccagagggaggtatatatttgacacactcatggtttttcttgctactagaaaaaggaaaacacattcacaattcattgactataagatgtactggatcaatgattagaactactgttgtcggttaatttttctattgcatactcacttcgagtttcgtgcaacgtatgtcttctatctgctgtaactggaccttgatagcactcgtgccatccatgtagtattttctagccttatggtaatacatatattggttgcatagtgttttagtttaaattcatcatggtctataaaaaatatcctaattcctaagtcaatggattttgaacttgtggtcatttctttgttggctttcctgtttgtctgcttctttactatgtcaaccctgtaaattttcaggccagagctctgatgtccctgctgaatgaagacaacactcatcaaatattcttgcatcaatgagtccagc

SEQ ID NO: 36897 - DNA, 864 bp, Setaria italica
  Peptide Sequence Number=SeqID_102871
ccaagcaaggctacaggtagaagaagctctgctgctgctgctgctgctgcaggtctcagccaagtacaaaaacacccctgttcgtgcgagcaagttgcgacgagatggccggcggcagggacagggacccgttggtcgttggtagggttgtgggcgacgtgctggaccccttcacccagaccaccaagctcaaggtcagcttcggcgccaggaccatcgccaacggctgcgagctcaagccgtccatggtctcgcaccagcccagggtcgaggtcggcgggcccgacatgaggacattctacaccctcgtgatgattgatccggatgctcctagcccaaatgaccccaacctgagggagtatttgcactggctggtcactgatattccaggaactaccggggcaacgtttgggcaagaggtgatgtgctacgagaaccctcggccgaccatggggatgcaccgcttcgtgttcgtgctgttccagcagctgggccggcaggtggtgtacgcccccgggtggcgccacaacttcaacaccagggacttcgccgagctctacaacctcggcccgcccgtcgccgccgtctacttcaactgccagcgcgaggccggctccgacgactccacaccccattagctgcaagctgctttgttatggccctgataaggttaaagaggttgaagccgagtgattagtgttttggaccgattgttaggttgttgtgtgcgtgcgggccatgtgcgagctgtgtggttgtgccagtgaacattgggctaaagaccttgtaactgaatataagtcgggtcattctattaagaccggcaacaagaaataatcgctcattctcgttcaaaaaaaaaaa

SEQ ID NO: 36898 - DNA, 455 bp, Setaria italica
  Peptide Sequence Number=SeqID_102872
caatcatcaccatcttccttgcattcttcctcaactctctctccctccctccctccctgttcttgaaccgcgcgtgccgcgtgcgtctggtgtccgcgtcggccgccgggtcccgtcatcggaggaaggagtcgaaggcaaaacaatggcgaagggcgggttgggcaagctgcggtgcatgatcaggaggtggcactcctccagccgcatcgcccgcgcgccgtcgccgcccggcgaggacggcgtggacgcgcgcggcgcgtcgttccacggcgcggacgaggtgcccaagggcctgcacccggtctacgtcggcaagtcgcgccgccggtacctcatcgccgaggagctcgtcggccacccgctgttccagaccctcgtcgaccgcaccggcggcggcggcgccgctgaggcgggctgcaccgtcgtacggactagaacgaaaggtaacgtaa

SEQ ID NO: 36899 - DNA, 268 bp, Setaria italica
  Peptide Sequence Number=SeqID_102873
gtgaaatctgtctgtatgctagcatatttcctcgtcaaaatggattctctttacaacgtttcctgaagaaaagaacatctacattatctattgtcagtcgttagagtctgaattatcagaatggtcatctataacagcagggaactgttgctcctgtagggttggctgggatgtagggttgccattgtttcgtaatttatttgtacccttcttctgtgatgctccaacttccttgcatgccttatctagcatcaccaagaaatctctt

SEQ ID NO: 36900 - DNA, 303 bp, Setaria italica
  Peptide Sequence Number=SeqID_102874
aacgcgcagaggcagagcacatcgccacacgccacgcttgcccgtagaaacgaccatggctgtggctacggccatggcggtgctcatgctcgcgctggccacggcgccggactcggccaccggagtgtccccgaggagcccgcggccggaggcggacctcgtgaccgggctgcccggacagccggccgtcgggttcaggcattacgccggctacgtcgacgtcggctcgggcggcggcggcagcggcaaggcgctcttctactggttcttcgaggctgagcgcgagccggagaagaagccgct

SEQ ID NO: 36901 - DNA, 442 bp, Setaria italica
  Peptide Sequence Number=SeqID_102875
ccatgggcataggtggtgtattgaggaattattatgggcaaccgaaacaagggttatatttgcaagcctaagagatgtgtgcctgtaggttttctcatgtaaagttgagtattctaagcaccttaataattttctgaggtggtttgtggatgaactggttcagttctagtcatttactactgtttagtaaaaacctaacatgttattaaaaaggaataccaaactgatgccagttgcagatttagtgaaatgactcaagcatgctatatttaatgcctctgtacgcctttgtgttgttttagggaaatatatgatgttttcgtatgaggtttgctactggaatcagctaacaccatgctgttcatttatgttctagttttgaactaatttgtatggtcgagattccagttatttgaattgtaacacaattgtgtgatgtgta

SEQ ID NO: 36902 - DNA, 173 bp, Setaria italica
  Peptide Sequence Number=SeqID_102876
agttccagtggttcttgacggcgttgtcggtgcctccggagcggtcgcaggcgcgggcgcggacgagttcgaggcgcggccgtgcaagcgcgtcagcctctcgccggacagcccctcgtcgggaaccggcacggtctccgaccgcagcgacctcagccacggcgccggcgccg

SEQ ID NO: 36903 - DNA, 239 bp, Setaria italica
  Peptide Sequence Number=SeqID_102877
cgacaaagcagacggacttgtacgcgatgctgaacaagcagagttctagagggcagaatggcagtagcatcacaggtagttctgtgcattcctgtcaatttgatattgctactcgatttagattcagttcatatgtaaaacaatctttaaacctgtttgttaatcatcttagcgatcttgggcattaatgtaactgtggaagtttaattcgtgctccagatagcaaatctcatggccgc

SEQ ID NO: 36904 - DNA, 542 bp, Setaria italica
  Peptide Sequence Number=SeqID_102878
ggaaggcgagtcgacatggaggccaacgaagaacgtcggccgcttccgccgccgccggctgccggagccggagccgcgccgccgtcggctaacgggtacttcagcgccgtcttctcctcgtctcctgcggggaacgcaaaagacgcaaagcagacggacttgtacgcgatgctgaacaagcagagttctagagggcagaatggcagtagcatcacaggtaatagcaaatctcatggccgcactacatacaaggatggaaaacatgcctatccaaatgagtcatcagaatccccttattttggctcatccgtgcattacggtggtcgggagttctacagtagctctcaacagaagcaacctgccaatgaaccaccaagaaattataaagaggacaatccagatggctctgctactagaggcgattggtggcaaggttcactttattactgaataacctcctgtgggctctccttttgtgaacaaaggaataaaaggagtagcgcttgttgtagtgttggaactgttgatactgagccgtcagg

SEQ ID NO: 36905 - DNA, 855 bp, Setaria italica
  Peptide Sequence Number=SeqID_102879
ccaccaactgcttcccccgcgccgccgcctgtaacgaccacttcacgtgccctatctttctcctcctgctgtgttcacggctcccatcccctctccagagtctaggcccatctcccgaagccgctgacgcaggaaggcgagtcgacatggaggccaagaagaagtcggccgcttccgccgccgccgctgccggagccggagccgcgccgccgccggctaacgggggaacgcaaaagacgcaaagcagacggacttgtacgcgatgctgaacaagcagagttctagagggcagaatggcagtagcatcacagatagcaaatctcatggccgcactacatacaaggatggaaaacatgcctatccaaatgagtcatcagaatccccttattttggctcatccgtgcattacggtggtcgggagttctacagtagctctcaacagaagcaacctgccaatgaaccaccaagaaattataaagaggacaatccagatggctctgctactagaggcgattggtggcaaggttcactttattactgaataacctcctgtgggctctccttttgtgacaaaggataaaaggagtagcgcttgttgtagtgttggaactgttgatactgagccgtcaggcatcaaaaatacatagttgggagttggcgtcgggactacatccgtcttgtcggtggaggcagtatttagatgcatcatctcacctggacagatgtgggtgtaggccgtgtccttctcagttcccttttgcctttgtgttcttgtggtttaggtgcagtactgaaactactaatggactgttaggtcagcagggagtagtttcataagcagttgccaaagagtcg

SEQ ID NO: 36906 - DNA, 984 bp, Setaria italica
  Peptide Sequence Number=SeqID_102880
ctcgtcttctcttctccactacaccaccgcctccaccaccactcccgacgagacaggaaccgcaaggaaccaaacgcctttccgctccgccgctaactgcccacccaccacgaccggtcgtgttgaatcgacgaacgtgtttgtcgtcttcgccgggcctgtgagattttctgctccgggatcggagatgggagccgaggcggagtgcgaccggatcaggggaccctggagccctgaggaggatgacgcgctgcggcggctcgtggagcggcacggcgcgcgcaactggacggcgatcgggcgcgagatccccggccggtcggggaagtcgtgccgcctgcggtggtgcaaccaactgtcgccgcaggtggagcgccggcccttcacggccgaggaggacgccgccatcgtccgcgcccacgcgaggctcggcaaccgctgggccgccatcgcgcggctcctccctgggcgcaccgacaacgccgtcaagaaccactggaactgctccctcaagcgcaagctcgccgccgccaccgccgcctccggagcggtcgcaggcgcgggcgcggacgagttcgaggcgcggccgtgcaagcgcgtcagcctctcgccggacagcccctcgtcgggaaccggcacggtctccgaccgcagcgacctcagccacggcgccggcgccggctccggctccgggtccgggcagatttaccgccccgtgccgcggtccggcgggttcgagccggcggactgcgcgatgagccggcctgtcgaggacgacgacccgctcacctccctctccctctcgctcccaggcacggaccagcggttccaccacgaccgcgcccatagccagttccaggagctcccgccgtcgccgtcgccgccctcgccttccccaccaccaccaccggcccccgtcgccgccgcagcgacctcgccgtacccgttcaaccccgacttcatggcggtgatgcaggagctgat

SEQ ID NO: 36907 - DNA, 1983 bp, Setaria italica
  Peptide Sequence Number=SeqID_102881
gatttaccgccccgtgccgcggtccggcgggttcgagccggcggactgcgcgatgagccggcctgtcgaggacgacgacccgctcacctccctctccctttcgccggacagcccctcgtcgggaaccggcacggtctccgaccgcagcgacctcagccgcgccgccgccggctaacgggtacttcagcgccgtcttctcctcgtctcctgcggggaacgcaaaagacgcaaagcagacggacttgtacgcgatgctgaacaagcagagttctagagggcagaatggcagtagcatcacagatagcaaatctcatggccgcactacatacaaggatggaaaacatgcctatccaaatgagtcatcagaatccccttattttggctcatccgtgcattacggtggtcgggagttctacagtagctctcaacagaagcaacctgccaatgaaccaccaagaaatgtatgcagttatttttatataattgtacagatagcttagatcacttatgtttaatatctattttgcatgttgaatccagtataaagaggacaatccagatggctctgctactggcggcgattggtggcaaggttcactttattactgaataacctcctgtgggctctccttttgtgaacaaaggtataccacgggtagcacactccatatttttcccaatttgcgatttccatcacttagtgttagcttagactatatgcttcgaactcaacaactgtttgaaaacgatagattgttggtctttaacatcttgctgaacctaatcatgggacaagcaagatgtgatatggtaactaagtttcattcaatctttttttttgtctctagggatacttcccttgttcatctattcagtgtcggtgtcctatacaagtctcaataacttcaaagcatatctttattttatgtttgtgtcattattctagttccattctaaaataatcactagtctgtataagaattacttgttagttgtcgaacctacacatgattgcataatagtgggggctgacaatgatggctgtaagacaactgttagctgtcatgaagtgtaataaacttcaattaactagaacagatcacatcaccaccagtcttttctccaagcctagcacaccatcatgataggtcacaattattcaggagtgttgcacctgtagaaagcgttttatcatataattaagatgccgggaagtgttacctttcaaggaaacactagcagaggagtgttttgatctatccaaaattaggaaatactgttcctaagaagtccaggcaatcggcataatgtaatgttttggcatttttgcttcgttcttaccatgatatgaggttgtgacaaaggttactccccaagaataaaatgttttatgaacttgcatagtttgtcagataagtcatttctaaaatatagaaaaacactatgaattcatgataaaaggtatctaaaaagtacatataccggtgataatgtataaggctgacaatgatacatgggagcttaagctatccagaacagcgaactacggagtatttggtaaccagtactagctatgatcagtagaaacctgctagacttgttacgtatgatgccttgtcattggcttcatcctcttattcacatcattttcccttcttctttttcaggaataaaaggagtagcgcttgttgtagtgttggaactgttgatactgagccgtcaggcatcaaaaatcatagttgggagttggcgtcgggactacatccgtcttgtcggtggaggcagtatttagatgcatcatctcacctggacagatgtgggtgtaggccgtgtccttctcagttcccttttgcctttgtgttcttgtggtttaggtgcagtactgaaactactaatggactgttaggtcagcagggagtagtttcataagcagttgccaaagagtcgcagctcgcaggatcacctgctacatgtaaatagtaa

SEQ ID NO: 36908 - DNA, 424 bp, Setaria italica
  Peptide Sequence Number=SeqID_102882
aaaaaatgcagaaaaatgggatacctccaagagcaataacttacaaagtgcttgtaagagcattctgggaacagggtaaaatcaatgaagcagttgaagcagtcaatgaaatggaacaaagaggagttgttggagctgcaagtgtttactatgaactagcttgctgtctctgcaataatggaagatggagagatgctatgttacaggttggcaagctgaaacagcttcccctcaccaaaccactggagtacacatttactggaatgatcttggcctcatttaatggtggatatatctatgaatgtatttcgatatttgagtcaatgaaggactactgcacaccaaatattgggactgtaaatgtcatgttaaaagtttatggacgttgtgatatgtttggaaaggcaaaggacttgtttgaaac

SEQ ID NO: 36909 - DNA, 477 bp, Setaria italica
  Peptide Sequence Number=SeqID_102883
ttttccctgacactatgttttccttagtaataagtttaacataattctgcaacatttatgcacacttttgactttctgaaataaacttttgcgttgggggttaacatgatgcataacaaacagctttttctttgactgctattaaagaaagtagtgaacatttcttgaattcaattctttctgcatggtataaactggtattgctccccgttatacagttttctttgtattgttattctttgaagaaaagtgggcaagttcaaacttttcctgttctgatgtatccaagataaattgtttgaagtttttgtacttaatttcagtggatggcattacctattgtcttccttgccatgctatatttctatacctactactatcatgatctacttgtgaccaaagttagtgaattggttgctaacattgctatatcgtattggcagcttgtttgctttagcaacattgctcaaagtacct

SEQ ID NO: 36910 - DNA, 683 bp, Setaria italica
  Peptide Sequence Number=SeqID_102884
agtagaactagacttagacaagttagaagctttgtacggagttgttcattccactgaagatttacatatggatttggtcgattatatatgtcaatgttattttatgtgttttttgccatctgtcacaggaatgccaagacaacctcaatgacgatccaaggcagtttcatggaaactgaatgcaactgaaaagtgatgaatgcctgctttaataacagactgtatcaagaccgtgtgagtggtgaggaaattggaaagagtgctccctgttttgcagggaacatataaaccccattctgtttttttttgtgtctgcataatagttctgatgactgtccaggttgatataatcatataagtttgctgtagttcattcatgaagttacctaattttgaggtatggtgcttgttttctgaacatgtttaggttgctgcaatgagatatacttcctgaatctttgtcaaaatgctttatttgtttgcctctacatccatatctatactaggttaacccagacctatttttcactataaagtatgctgaaactgaaagtacattgctttagacatactactactactataagaaaaaaaagaataatatgctacattgtgagaagtatattctacaactatagaaaaaagaagtatatgcttctttgtgtgatgaatactactgtgat

SEQ ID NO: 36911 - DNA, 352 bp, Setaria italica
  Peptide Sequence Number=SeqID_102885
cttactattgccactttccagtttcggcgctcctctcatttgctgataaattccttttgctggcttcctactgtctgatattttaacattgctactttctttacttgtttcagtaaagcaaaattcatgctttttgccggagactgctcctggatctgcagtgccaaatggtataatgcacaatggaagttcaagtggtataataaatggcacgccatctggtgatcaattactcaatgctggtaaagacttgcatggtcttcacagtggaattgatgcttcaactagtctgcagtcggaccagaatgcaactgctgtcctgtttggtgacaatggggcaaagtgcgaacaa

SEQ ID NO: 36912 - DNA, 1478 bp, Setaria italica
  Peptide Sequence Number=SeqID_102886
ctcaggcttggcttggcttggctagctagtggattgattgattgatcacgaggcgcaggtgaaccgggttgctgctggtggcctggccgccgctcttctcctccgccttcccttccctcaccgcccaccacccgctgctctccttctctcttcgcggagcaggctgggattcccttccccggcggtggcggcagggggaggagcttcgcctgggagaggagctagggcaggaggaggaagaggggcgcagcatccggcatggcgagcgaggagctagtccacaaggtccaggctcttatagagcgctgccttcagttgtatatgaaccagaaagaagtaatcgataccctctctcaacacgcaaagatagagccttgtattactgaacttgtttggcgacaacttgagcaacagaatcctctatttttcaaggcatactatatgaggctaatgcttaagaatcagataatggtcttcaacaagcttcttgaggatcagcttcagatcatgaataaagaatttcctccagggatcccttctatgtctcttcctaatggctctaactccaaccaattaaagcaaaattcatgctttttgccggagactgctcctggatctgcagtgccaaatggtataatgcacaatggaagttcaagtggtataataaatggcacgccatctggtgatcaattactcaatgctggtaaagacttgcatggtcttcacagtggaattgatgcttcaactagtctgcagtcggaccagaatgcaactgctgtcctgtttggtgacaatggggcaagtgcgacaataaagacagagtctggctattcaagtaatgctgattttgctttctgcgggaatactttcctggaatcatgccagtcaataggtgatgcatctggtggtggatccttcagtagctcagagttgaatgggcaaccactgaatgattcgattttggatatggaatcatcatcatttagcttcttgaaccagattccgcaaagtttcatcttttcagacttggcagaggatttcagccaaagtgcagaaatgacgccattcctcacttctgaaacaaataacttctctgattcaactggaggagatcatacaggttgagcagccatgcacagtgcaccaaccatctgtacatactcttatgcgcaggcaaacctgcattgatggagaacttgaggaccttttgagttagctgtctcttttctagtttctcgtcttatattgtgatgatagggttgactgctgctacctcatcacagggtatcctgagtcggtcttccagtatgctttctgatggtattgtcgcggtgctgtactgctgtgtacattgtcgtgcttctgtaatataatggttaggcgcagcggtgtatgcatctgcgttttattgggtaatgtttcttgtttggcttgcacataaaaaaattaattgataaagcagttctcaaaactaaaaa

SEQ ID NO: 36913 - DNA, 410 bp, Setaria italica
  Peptide Sequence Number=SeqID_102887
caagaaaacaaaatcaaatagcaataaattcaattgcaggctagggcaattaaaccgattggaatacctgtggagtcctggagggaggtcgtcgggttgccagggacctcagtgagctcccaccccatgatgaccaattctccaacgaaaatggatgggaattaggaaattaaacccctttggatgggcagggaatgcgcttctgttgggggaattgaatctgaactgatattcccaccaaaacctaagggactggtctaatccattcctattgaaagcaaagggctagaaaagcaatcggttgcccgacattcaatcagcaaagttgacccacagttacacaagtctctactacatcagcaggaaacaaatctgaccacgaacatttagaatttctactattctaatta

SEQ ID NO: 36914 - DNA, 895 bp, Setaria italica
  Peptide Sequence Number=SeqID_102888
ctatccctctcagcggcattctcaatggcaaccatggcagcatgtctcaagggatgccatgcaaaacagccttcacagggcaatggcttctgctcagtagtcctttgtttcgtccatcccaaaggatttatacatgagacttccatgttcaaactgttgcatttagaaagacgggagcttggccataacaaattgccattattctcagttgattcatccaaagagaaggtatcatttgctttcacttcagcaagtttgtttccttctgcagatgtatcatgctggtgtgtttggtctgtagccttcgcaattatttgcatacttgatggatcaacaataatggcagcattacctgcctttgataattgaatagcagtcttcatgcaattaaatattgatggtaattcgtcatctcgaaatccacgaataatatcaaggttgtgcgcaggatggtaagaagttggccaaagtttacattgttcttcccactcctcttttgatgtagcggaacacttggcaacttttgcaatgaaaggactcaactgataagtatccactatcttttgtacatctccaggaagctgttttatacaagtttgagacccagtagaaaggcataagattattgataagtcagattttccgcattcagtacatcgacgaacccgccctaattagtaccttactaagtaatttacatgcctcagattctccaaggacatatcatgctcaactccctaatgagagcgttggctagctttggttcaatgttggcagccaccacatcaactgtggagtcctggagggagggcgtcgggatgccagggacctcagtgagctcccaccccatgatgaccaattctcaaaagaaactgcagtgggcaaagcttccggt

SEQ ID NO: 36915 - DNA, 1090 bp, Setaria italica
  Peptide Sequence Number=SeqID_102889
aaccaattttgtgtgttaaattcaaagtaacaacatctagagcaaaatgccactggttcttcgcttcaatctgctgaggaacaacatatggggcagccgttcagttaggtttcttaagcaacatgctgggttttcatctgggaaattgcttcaacctggaacctatgagaagcgtcatttcacaacgaaacttacagacacagctagttggcacaaaactgactcaggttcatgtagtccttcaattccgccactgtggcttcaacaaacttctgaacatgacaatcctggaactgttctcgtcttcgatattgagactactggttttctccatgcggatcatagaatcattgagtttgcactccgcgacctttccggaggaaagaattgcacatttgagactctcattaatcctgaacggaatgttcccatatatgctgcaaaagccaataagattaccactgaattggtctgcaggcctgatgtcccaaggttcagtgatgtacttccactactactagcatatgttcaaagacgccaagctcctggcaagccagttctttgggttgcccataacgcaaaacagtttgatatccctttccttatgcaagagttcgaacgatgttcagcccaggtccctgcagattggctgtttgttgacagtctttgtttagcaaggaaattgaagaaattggatggaaatataggtcatgtaaacttggaggcactgggtaaacactatggcatcattttcaaaggcccttctcatagagcaatgccagatgtgcaagcattatccaaaattttccaaaaaatcactttgggcttaaaattgacacgcgacggtctcatgagtgaggccagcatcttttacgatttcaggaaggtttctcgaatatgaattttcgatctcatcattctgtcttagttataaactatttgacattttcctataggataacaaaatcatttacattccgagtgttgttgctgtggtttagcgtatcaaattttcaatgatcatagctttcttgtattgaaagatctatgctgtgaatgagaccatcaatatattccctgcaataagcat

SEQ ID NO: 36916 - DNA, 351 bp, Setaria italica
  misc_feature (295)..(295): n is a, c, g, or t
  Peptide Sequence Number=SeqID_102890
gcgcggggacacctccgtcgaggtgcgcgtgcggggaggcagggagttgcaggcctgcatcgtgccgcaccatgccagccccggcgggggcggaggaggaggaggggggaggaagcagtacgtgctgcggtcgatgcacgaccccaactacgtgctcggattcgtcgaccgcctcgagagcgagtgcctcgtcttgcaaggcacgaggagcacaagagttgcatcagcattgagcaaggcacaactcggaagaacgggatacgtggcatatccatgggagaagaagatgcgcganactctgcgcatggcccaactctagctgctacctctcgatgctcgtccttccaaggc

SEQ ID NO: 36917 - DNA, 503 bp, Setaria italica
  Peptide Sequence Number=SeqID_102891
tatgtgcgaagttgcttgcacacaggaatacatatacgcatccatcatcacctaacaagtgagggccagaaaagtatgcacatgattctgacagagaagaaagacggtaactttcaggtgtaaaagaagcatgcttttaagcctgcattgcaggcacacacttggttagttagagagatcgacacattaggtgctcaacagtatcagataatacaacagattggcagtgccctggaaaggcaagactccgagtagtttccacgtacattgtactgcaattccaccaagcaaagatggttaaatacacagcatccactgtcatttactgattaggcagaaaggtgaacgcaagaaaactctgcaggcatgatacacagttactcatagatgagaagattttagtgcaaagggagtttcttatggcacaagaactcctgcagattaaaggtccttgcatttgtgagcttgttactcacagatacagatgaaactatctaaacata

SEQ ID NO: 36918 - DNA, 541 bp, Setaria italica
  Peptide Sequence Number=SeqID_102892
cccggactgcggcttccagctccccgacagcggcgtcgtgctcacctgcctcgactgcttcctccgcggcggcgcgctgcaccggttcgagtacggcgctccgcccgccgtgttcctcgccatcgagaacggctgcgaggaggtgcatggcgcggcgcacggcgggcccgacgccgccgtgcgccgcgccatgcacctcctccagaacggcttcggcgactacgacgtgttcgagaacaactgcgaggacttcgcgctctactgcaagacgggcctcctccccgccgccggaggcgacgacatcggccggagcggccaggcggcgtccgccgtcggcgtgccgctggcggcactcctctccaccccgttcaagctgttcgccaccggcccgctcggcatggccgcggtcaccgccggcgtgtactgcgccggcaggtacatcaccgacatcggggtgaggaaggacgtggtgaaggtggaggtcgagaacctcgcggcgcacctcggctggcgccgcgccaaggccgaggaggcggtcaag

SEQ ID NO: 36919 - DNA, 308 bp, Setaria italica
  Peptide Sequence Number=SeqID_102893
taatcggatagataaacccttgtagggtggcggcgccgcagaggatcccgcggcaggttgttgcgctggtgcctggtggtcgaggatttctgcgccctcacccattcctcctccacttcaaaacccgctcctctctctctcctccgccctcctcgcgattgcggcgaagaggcggcgagagagagcctccccctaccggaaaaaaactggataagagagggagaagttgacaggggaggggagacggaggaccaggagcggcgtcgagctagaagcgctgccgccggccagtggccgaccggcgggaa

SEQ ID NO: 36920 - DNA, 875 bp, Setaria italica
  Peptide Sequence Number=SeqID_102894
ctggatctctgatctctaggcttgcagatgcttcaactcctccaagctttttattgacagaaagcagtcctataggcagataactgcatcttcatgtgattctgaacatagagcagatggcatcaagctccaacctcctccagatcaatgaataaataaacaaattactgatgaacaacaaaaaatattgaagctagatgttgtttaaaacattattgagcattactgaacattattattactgcataaattactgaacctgaaattaccaaaaggccaaaaattactaaacactatattattggcctacttgattacaaaagcttaaattacagaatccaaaattaccaaagacctaaaattactgaatgctgtactgctggcttacttgattacccaagcttaaattactctgaaattatctaggaccaaaatattgtcgaacattataatactgacctattttgcttgggtacacgtgaagcctaaaaatgaatgctaaaattactgaagcctgaaaatgacattcggtaatgaacagtgaaattaaaatgaggctcagtaatgaatggtgaaactacagaagcctcaaaatgatgttcagtaatttatgttttttcaggaccatcgatatctcaatttttttcagtagcctagatgataatggatcttagcttcaatggagacgctagtagtctggtaacaacagagcaagcaaaggaagagaatttccctgtattgtgtgattgctaatcactaagatgaagtagcaagactgaagatgcccctcactgtcataaaaatcctgtaataaaacgagtcaaagaatgcaatcaattatcaaacaaaatatttacttacaaaaaaaatgcaca

SEQ ID NO: 36921 - DNA, 526 bp, Setaria italica
  Peptide Sequence Number=SeqID_102895
tcctccagcggcgacgacgtagaagacgttcagcagttcgagggatttggagatcaagctttcgaggagtacgaacagcaagagcaaggccaagaagaccaagctaatttggaggagtatctcacgactttgaggagttctaggcgtacagttcttcagtcagctgcctgtggtgtcgtcgtcgtctttggagttccaccgcgtaataattagacttatgttttattgagactttcggtcatgtaataatgtttaatactctctttattcgctttagcactgtctttgttattcactattgtcgtacatgtgtgtaacttgatcctggcgcacatgtatttaatgcactcaattttgtccttaaaatcgggtgtgacaaaagtggtaccagagccgtgttgactgtaggacgttagcctagttagaaaatggtcgtatttaaggattataataatctagtagccattcctaccttttcttaatttaaatctacttaattattcctaaacttgatttgtctcatcct

SEQ ID NO: 36922 - DNA, 304 bp, Setaria italica
  Peptide Sequence Number=SeqID_102896
cgagaagacgcgcggcggcggggtgaagggcgccgcggggaagggaggagacgcgtgcgccggctgcggccgctgccccggcggcgtctcctccatgccgggccgccgctggggagtcggtggagggcgccggcggtggtggcgcgcggatctggagggggcgcgagggaggagaggagaccgtggggaggcgcccgggctcggagaattggggatccgggcggggaatgcgacgaggaagacgagggtggaggtgggagatgggctgcgatgggatcggatttgctcccggctcgggttgttg

SEQ ID NO: 36923 - DNA, 496 bp, Setaria italica
  Peptide Sequence Number=SeqID_102897
cacctccagctgatatctatgtgttaggatttcaagaaattgttcctttgaatgctggaaatgttcttggcactgaagataaccttccagcaaaaaagtgggtatcccttgttaggaggacattgaataagaatcctgggtgctgttatggtggctatcgcacgccctctcctgtccctgatccagttgtggaactagatgctgattttgagggatcatcgagaaagcaggataatttctcaattttgcatcgtcgatcattcaaccttagccggagtttaagagttgaagggaaccatatgtcatcacacccaagattggatcgcaggttcagtgtatgtgatccagttagcttgggaggcaggccaagtgattttgatggaaatttcccattcatgggatcaccagatgatcattgtattgaggaggattcaagtaatggagcattatttttcacccttcacatatggctatggtgcctcagcgcctacggaag

SEQ ID NO: 36924 - DNA, 421 bp, Setaria italica
  Peptide Sequence Number=SeqID_102898
cgccatggccagcgtacgtggccgctacccgacaaggagctactgccagtgcgtggagctgaactgttccatggaaagagagttattcccagccccagttattgaaccgatctttgacaaaaaagaggtgacgctgcaatgagcaacgaaacttcacccgtttctctttagtatactgcttgttttcttccccattatttccttcgaaaaagaagaaaagtgtgtttccggttcctccaactactactgccaccaaaccaacaactccaattatcctttctcgtcttgatcctcttcacactggagatcgcatagagggttgtctgatcaccacctgatgtgattttgggcacgccgacgatggatgcatcgacttctttcgtgcttgccgtgttgaccctccactctgtctctgccatgg

SEQ ID NO: 36925 - DNA, 228 bp, Setaria italica
  Peptide Sequence Number=SeqID_102899
ttgaggatacatctggggcaccggttgttgagctgctccagatgcaggtaactgatgggcatttgcaggatgtaagcccatggcctgtcaacaaaatctcacataagcctgggacaatgaatatgcactaacagaaaaacctagatactatcatgatagttgcatgagaatgttaagccaacagccatgatgaatccaacctctgaaaagacatactggcctggagtt

SEQ ID NO: 36926 - DNA, 993 bp, Setaria italica
  Peptide Sequence Number=SeqID_102900
ccgagatggccaagctggttctgctgaaatgctccaacttgactgccaggccccatggccgccatgtcaaggcccagatttcctggggctcctggctgatgtaccatggcctgtgggttctgcaccatggtcaccgatgttgggtgcagtgcatgcggaaagcccgggtactgcaactgagcaggatggggaggagctggactgaaagaagggtgaccattgtggggtggcaggtatgctgcatgggggaaactggctgtcccactatattgtagaactgtgccggtggcatattgggaatctctctctgaccctgaacccatagatctgctgcttcagcctgtggattgggtgcatagagactgttatccttgtatttattcatattggcatcctcaatagcacctgtgctgctaattacaccgttactgacagggtaaccgttatgacttgcatagccaccatatccagcaggggttccttgaaacactggcttatactgatgggacgacccatatttcatgccattcgctgctagttgtggggctccatttggcatcaccagatagctactggcgtgtggcaactgaggaaatgcaggattgcttgaatagttcgggacaaccattggagacccatactgtgctgagtaaacattgcgatatggcaagaagtttggatactgtggcactggaaattgttgaggatacatctggggcaccggttgttgagctgctccagatgcaggtaactgatgggcatttgcaggatgtaagcccatggcctcagatgtataagctgtactttgtgctgtttgaccatcaacaaattttgtgataaatggcatcacatatctagaatctggctcgtatgacttaaagttctgtatagctggattgtcctgatgttggaattgaggctgagaatatgtgaccttgcttgtaatcatctcatttgtcccgtactcaccaacaaccccaggactgggagcct

SEQ ID NO: 36927 - DNA, 340 bp, Setaria italica
  Peptide Sequence Number=SeqID_102901
tgaagatcactttcagataccctgcccgacaggttagtgacttgtactgtgtaccctgtttcactcatgattctggaagccatcaaacattaaagaacattagtatttcctgttatacacatgtgaaatggacaggcgtggtagtttctgacaaaagtcagtagagtatgtaacatcaatagaagcactaagtagtttcagcttgtgtatctcatgggaaagaaccttttgtttaaccttattgtatcttatctgtttgccctaaagaataattaagtgctaggtctccatcaaaactaaaatctaattgaatatatgttgctttcaagtagaagtagaa

SEQ ID NO: 36928 - DNA, 1202 bp, Setaria italica
  Peptide Sequence Number=SeqID_102902
ctgcacgatcatttttctctatctgcaacacataaactgttgagcacaagtgtttgttctaaacgaagtgttcatctccttttacagcactgttgtctgttatgatatacatcaaacaacatttgaagcatcgtatttcggtgcttgtcctcatgtttcatgtctgaaaggatgcattgggtgtttatttttcaattaactctgcctaccatgagcagccaaatctgctgccgccttggcagccctattaagagcgtcagataccatcatggctcctgcagagaagtagctgctggtaacgatgctgttcgccaccttagctgccgttcttccagtggcagtcgcaacagtcttggtcgtctctgatatgccgtacgtttcgtccactgatcgcattgcaccaacaccagcactgagtgcaccaacaccagcattgaccctgtcagttaaaccaaatctcttgctcagctctgcagccttggctgcggctgctgctgtatacccacgggactcatcgaaggctctagccttagccaaagcatccttgctgagcacgtatccccttgctagcatcgtcttcacgacatcttgagccactgtcaaagcttcctgtggagtagtattgaactggcatgattggtagttcctgtattcaatttcctcctcgacctcccaagttggcctgtcccagaaactaaaagtctcttcaggttgtccccaataagttatgcataccggctgatccacaatagtagccccactgagcaatactgcagtttccaaagcatagcgttccttgaatgtcacataagcagtagcaccatattctcccgatctgataagttctatatgctcaataggaccagagaacgaaaagaactcatgaagatcactttcagataccctgcccgacaggttagtgacttgtactgtgtaccctgtttcactcatgattcctgatcggacacacccaccgcttcccctcaattcggctaggtttgacgatccttctcgcaccagcagccgcactccacccaccgcacaagcgcagagagggcggcggtagacggtagtggccaagccgagccagtccaaagcgccggagcccgtcggggcggcctttagtagcgtgtggggcaagggggcgacctcgatctcctacctaacagtccgcccacgcgcgcgcacaccgggtatttcta

SEQ ID NO: 36929 - DNA, 440 bp, Setaria italica
  Peptide Sequence Number=SeqID_102903
tgcccaatcaaatattcatgaaggtcctcgccctaagcatgacacggcctccaccataccctccgaattgctgatcagcagacatgctgccacccatgctgccatagctccagggccacgccaacgtcgaccatgcatacacatcgcctccccagttggtgtcattggacaccttacatgacgcgcccctcccaccatgtcctccaccagccgcctccaggctgtgcggagtcccactcgtctggggagggggctccccggcgagcgcggtggtgttgatggtcgagtggtggtccaaggacacattggccgcgtcaaggctaactgagcccccaatcacctcgacatgctcgccgatcctgatgcttccggagacattgacggtgatgtagcatcccctgacggggcagatgatcttcacgttgggccgaatctccacg

SEQ ID NO: 36930 - DNA, 349 bp, Setaria italica
  Peptide Sequence Number=SeqID_102904
accttggccttgaccgccctggcccccgccacccgggcgccgctgtccggcgggctgggctcgaaggacggcggcacgggggtgatcggcggcagcggcggggcctggtccgggatggacggggtgaacggcgtggaggtgaacggcggcgccatcgtggacgccggcggcgcgtccggcgggttgacgcagaacggcgcgttggtgtcgccggcggcgaggctctcggcgtccgcgccggcggccggaggtggcagtagggggcgcgccggctccaccgtccggatgaagttgagcttgtacagcgcgttcagcagcgggttgctgctccggctctgcagccgcctgc

SEQ ID NO: 36931 - DNA, 245 bp, Setaria italica
  Peptide Sequence Number=SeqID_102905
cggctgaacaaggtgttcatcgcggaggggagtgggactcggagtggtgatgaaggttagaccaggccatggtgaaggcggaggaggtggaggccaaggtcagactggtcatggagtcgcagcagggggaggagctcagggagaggacggcgatggcgaaggatagggccgccgccgcgctggagatcggcgggtcgtcaacgacggcgctcgttgacttcctgaacagtttggagatctcgacg

SEQ ID NO: 36932 - DNA, 406 bp, Setaria italica
  Peptide Sequence Number=SeqID_102906
tctaagccaattgtgtctttgtctgaaaccttagtttctagaatgagagagagaagtgttgaaagcgatggaaaatatatttcagtgcatcttcgttttgaggaggatatggttgctttctcatgttgtgtttatgatggtggtgatgaggagaagaaggaaatggatgcagccagagaaataggttggagggggaagtttactaagagaggacgggtaataaggcctggagtgatcagaatgaatggaaaatgtcctctaacacctttggaggttgggttaatgcttcgtggaatgggtttcagcaataagactgcaatctttttggcatctggaaagatttacaaagcagagaagaacatggctcctcttcttgaaatgtttcctctcctacagacaaaaagag

SEQ ID NO: 36933 - DNA, 896 bp, Setaria italica
  Peptide Sequence Number=SeqID_102907
gtgcaggtgtttcatcatttccttgtcatcgctgccaagatcctccattgcggggcaatgagtctgtgtagatgaagtgaagcaatgccttgaaaacaggagccagcatgtcttcaattgttatgcactccctgtttccctcccctacaggcccgtagagctccgccttgaagactggtgatcgtgtcgcgacaataaccttgtgtgcagggaaaatctccccttgaacaatgaatttcacatctgctccctcctctgactccaacaattttccaaagttgaccgacaagtctgaaggaggcaccaccaaatcctcagagatcgccgccacctcggatacctgtggttccttgataacagtgacgtcgcactcgatcacgaggcggtcattgtgtatgtgcccagaggcttccctatcgctcgtgccaatgaacttgaatatgtccaagccacggttcttactcgcctccatggtggtaaacagcgtcggtttgttccgccagaaggctggccacggtgctccgttgtggtgcaccaatctgaggtgatagagcaccctcacctcggctttctcgctcagaagctccagacagacacagaacgagtctccggtatccgctctgtggagtccatcggggtagaagcggacgcaccagtcgaagccgccgacggtgaaggcggcggaccggatgaagcggccggcgccgagacccatgtgcagactgaacccgtcgacctcgaacctgtgcgtggcgtgcgccgtctccgccgtgcaccgcgacgccgtcctgatccttggacgccgaagtgccgccgccatttttgcggtttgctcgcggagaaaccgaggtcgatcgaggaggtgatgagagggaaggcggcgcggcgtggagagt

SEQ ID NO: 36934 - DNA, 437 bp, Setaria italica
  Peptide Sequence Number=SeqID_102908
gcgccactcaacctcgaccagagcgacctcccctccaatagggaggccttcgccggcgtcgtctcccgcatcctctccgtccactggggcccgtgccgccgcttctgcgttcctgcgggctacctcgaggaccgccccgccgctatggacgcctggctctggtcacccgccctcgacaatcttgaggagattgatttcatcctgcctccggcgtctacgctccgcttcttggccaccctccgcgtcgcagccttgagaaaatgccacatccccgacggtctcgcccaatcgctccagcttccccagctcaaggagctcgcacttgaagaggtaaccatttcagaggggctcactgcacggcttgatctccagctgccccgtctcgcccaatcttgaggagtgcttgctgcttagcaatttgcactggctttggttgt

SEQ ID NO: 36935 - DNA, 465 bp, Setaria italica
  Peptide Sequence Number=SeqID_102909
atcagctattggaaatgatgggcctctttatggcacattaaataacccagctgatcaaagcgatgtcattggtgttggcggtattgattacaataaccatatagcttcattttcctctcggggcatgactacctgggagcttcctcatggttatggtcgtgtgaaacctgatgttgttgcatatagccgagatataattggttcgaagatcagcacagggtgtaagaccctttcaggcaccagtgtagcaagcccggtggttgctggtgtagtatgcttgcttgttagtgttatacctgaagacaagcggaaatcaatccttaaccctgctgctatgaaacaggcccttgttgagggtgcttctaagctttcagggccaaacatgtacgagcaaggtgctggcaagcttgatctttggcagtcatatgaaatcttagaaaaacttccaaccacgtgcaagcatta

SEQ ID NO: 36936 - DNA, 321 bp, Setaria italica
  Peptide Sequence Number=SeqID_102910
ccgtacatgatagtaaatagcttttagcctatcatgacaagaagccccgttactcaatcattttaatctggttctggaaggattggttacctcaaactaaagaaatttatctttctgtcaacctatttgcgcttacttccgaacacaaagagagacataaaagctaaaaaaatacaaccatacttcatacgcaaagcacattcccgttcgaccacacacaaaagcaatccacagatccacctttccaccctgcaccaccacacccaccggcccttcgaagcaccaaaccgtccgaaatcgcaacgcgaacaacaccaaacg

SEQ ID NO: 36937 - DNA, 246 bp, Setaria italica
  Peptide Sequence Number=SeqID_102911
ctccgttaatcgaggcaagatcaccatttggtggtgccaatctcctcccaggtcatccaggcattccatggcagacagccatggatgccggagcccgctcgcgctaggctccagctcgacccgcagccaccagccgcctcctctcctcctcctcatccaccgcccatgcggcagcaaacccgatccccgttccaaggcacccaaagaagagggatgattacgccgccgtccctcaagagcaaaata

SEQ ID NO: 36938 - DNA, 1687 bp, Setaria italica
  Peptide Sequence Number=SeqID_102912
agtaacttcgtgaaggggcttcaggattgctgctgggcaacttctgtctgttagtgcttgacacacctgctgcatcgttggccgagctttaggacagatttgcaaacacccaaaggccacaagcacgagcagaatgacatccttttcttcgttgctcgttggctctacaacgcgctggtccaggatatccttcagcttcgtatgctgctgtgtttggcaaaagaatggaagcagcagatctcctgggtgctttcccatcaccacttccatgacaaccacaccaaagctatatacatcacacttctctgtcaataccatcgtagatgataattctggtgccatatagccgcatgtccctgcaaagatagtactcgaacttgagtaaatatgcttcaacttccttgccatgccaaaatctgagacataacctctaaaatcacggtctaataagatattgttacttttgatgtcacggtgtatgatgggttcatcacaatcatggtgcaagtaagagagagcatgagctacatccctcacaatggcaattcttttgggccagtcaagctctcttgcaagttgttcctcgtgaagaatggatgctaagcttcccctttccatgagatcgtacacaagaaacctgcactgagagtgagaacaatacccatacagcttgactatgcatcgatgccttatttttgtgagcacatcgatctcagcattaaacgttccttcatcagtgtagtcttccattgagtggagcagcttgactgcaaagacacttcctcgaacctcagctctgaagacagacccgtgtcctccagaaccaatgcaatattttcatcaaaattttctgttgcgtcgagtatgtcttggaatgcaatcttcccgttgaaattccatatggagaacatatctccaggcttgcttttggtcctgcattttgcaagttttcttctccaacaaaaaagtgccaggtttcctattgccaggcaaatgaaacaaaagagaccgaaagcaagaagtagcgccaaaataagacgcttattatgtcttttcccctcatttttgccaccaagccctgatgattcacatggtgttaaaccataccgttggtcgccacagatatcaatattatggtcaagagaaactaaggctgaaggtagtgatgtgcccccaaatctgccacccaaactgttgtatgacaaattgaggttatgcagttggtaaagctgtgcaaaagtgattgggatggtgccacttagattatttctgctgaaatccagatcatataggccagtacattccccaagatcttgtggtattggtcctgttaataaattgtctgatatgcgcaactgcaacaaatggcggcactgtcctatttgcggtggaatgcttcccgtgaactgattggtgcttagatctagatgagtgagattaactagaaatcctatttctgatggaagcagtccattaatctgattggaagcaagtacaagctttttagagatttcagattccagaaggtcgaagggatggagccgcgtatttgaccttctgataggtccaataattctagccttgtcagattcccaaagcttccaggaatggagccaatgatgctatttccaagaagatgcaggaacgacaacctatggagcattcccaactcatgtggtatgtaacc

SEQ ID NO: 36939 - DNA, 1240 bp, Setaria italica
  Peptide Sequence Number=SeqID_102913
gaaatcttctcttccccgtcagacatcagttcagttcgtaacagggtgaagaatgttggaattgtgcggtggcaggagtctgatccaaaaagattcatgcaactattcagtccatgggaggtgcccggagaaaggcaccgggccgcaataggagaacagacccttcaactccgggcagccatcagggtatgggatggtccggtgaaatgggtccctcttgagcctcttcacgtggagagagcctaggcatccatagggatcttccaggaactgagccctcacagcggcttcacctttcagagcagcctcccttgcagcaggcgttgctggggtacctgtgaagaaaaatcttccttctgggaatccaagcgctgttctgtgcaattgcgcaaaccgttcctccttgaaatcatagcttacgacagttatgttttgtgggtatcttccagtgagttctctgaaacggcagacactaaacaggaggttttcaaaactatctcgggcatgctcctcagtgagtgcccggctccttacactctcatcattcccaaaccagcctttggactccgcaatcgcccaatagctctgcgcctcactcctcggcccggcatccttcctcgtctcgccaccgctgaacaacagcagcgcgccctcgtccctcgcagcaatgtccacgccctccttgatatgcgccaagaacgtggccgcctgaccagggtgcttctggtacggctccaataaccaggaatcctcacggtcagtcttcccgcagctggcgctcgtgtaaatcgaatgcccggccaccatgacgaggttccggaggttcgggaacggatactccccaacctcactcgaccacgcgccgccgctcctcatcgtcctgaaccgggtctcgtacacggagaggaggatcaggacgctgaggccgaaggacagcaagatgagggcgacggccacggggtgcgcctcgtagaagtagcggatcctcatcacgatcgaggcctcgaggtgcgggttcttgggcttgcggcccttgcgggagaccccggactcgaggtcgaagtcgacgcctctggggtagcggaaggacttggggctccccggaccgaatccctggctgctgctcatcgcgctcaagaactcggcctctcggtatcacgcgggcagcgcatcaagctgtccttcggtgaactgagaagaagcccagatccaaagcttgggctcgagaagatgcaggtaa

SEQ ID NO: 36940 - DNA, 627 bp, Setaria italica
  Peptide Sequence Number=SeqID_102914
catgaagagggaccacggggtcgagccaacgccggaccttcacgcctgcgccgtcgacattctcggtcgggcgggaaggctggacgaggcctacagcatcatcagctcaatggagccaggagagcagcaggtgtccgcgtggagcagcttcctcggagcgtgccgactccaccggaacgtccagctcggcgagatcgctgccgagcggctgttcgagctcgagcccgacgaggcgagccactacgtgctcctgtgcaacatctactccgcggccggcctatgggagaagtcatcggaggtgaggagccggatgcggcagaggggcgtcagcaaggaacccgggtgcagctggatcgagctcgacggcgcgatccacaggttcatggccggcgagtccgcgcacccggagagcgcggtggtgcacgcgcacatggacgcgctctgggagcggatgcggggccaggggtacgcgccggacacgtcgtgcgtgctccacgacattgaggaaggcgagaaggcggcgatcctccggtaccacagcgagaagctcgccatcgcctttgggctgctgcggacgccgccgggcgcccaccatccagggtggccaagaacctgagggtgtgcaac

SEQ ID NO: 36941 - DNA, 297 bp, Setaria italica
  Peptide Sequence Number=SeqID_102915
ggagtgcgaggaggcgctccggattgatccgtcgtacggccgcgcgcaccaccgcctcgcctccctgcacataaggctaggacacattgaagacgctctgaagcacctatcccttgcagccccacagcctgacctcctagagttgcacaaattgcaaacagtggagaagcacttggggagatgtctggatgcacgtaaggctggggactggaaaagtgccctaagagaaagtgatgccgctattgcggctggagctgattcctctgctctgctcttggctactagagcagaagccct

SEQ ID NO: 36942 - DNA, 813 bp, Setaria italica
  Peptide Sequence Number=SeqID_102916
aggattatgaggttctcagaaaggaacttccaaatgatacggaggtcgctgaggcctatttccacgcccaggttgctctcaagtcatctcgtggtgaggaggtatccaacatgaagtttggaggagaggttgaagcaattacaggaatggaacagttccaaatggctacatctttgccaggtgtttcagtcgtccatttcatgacaccttcaaatcagcagtgctgcaagatttccccatttgtgaacacactgtgcaccagatacccatctgttaatttcctcaaggtcgatgtgaacgagagccctgctgttgcacgtgccgaaaacgtgaggacaattccaacattcaaaatctacaaaaatggtatgagagtgaaagagatgatctgccccagccaacagctgctggaatactcagtgaggcattatgggatttaggccatgaagccgatgatttgatgtttccttctgcctccagcttacctggagcaagcgcaggcttagctggagcagagccagtgaatactgaagttcatcttgatgagcgcaagcatgaaaaagcaaagagcaactttccccgacattttccaccccacaccccttacatttccacccttttctccatttgttgattacctactcaatttattcatttaatctgtctcgtccgtacatcattgttgcaaaattccttagaacaaaaacaccatctcctgattcatgtgaagaacgactgtaaatttttacttccatgtttaccagacaaccaaggaaagaaaggtatagattgcattttgtactctctaaaaaa

SEQ ID NO: 36943 - DNA, 1161 bp, Setaria italica
  Peptide Sequence Number=SeqID_102917
ttaaggtaaagtaaaaagtaactaaactttaagggggtaagtaattagttactacggatgcacgtaaggctggggactggaaaagtgccctaagagaaagtgatgccgctattgcggctggagctgattcctctgctctgctcttggctactagagcagaagcccttctgcggctcaacctactcgatgaggctgatctggctatcgctagtgcctccaaactggattattcatcttcatcctcctcagacactaaattttgtgggttcctcgccaacgcttacctcttctatgtacatgcccaagttgacatggcattgggaaggtttgaccatgctgtctcctccatagataaggcaaggataatagatccaggaaacagtgaagtggtagctatgcataacaaagtgaaatctgtggctagagcacgatctctagggaacgagctcttcaattctggaaaattttcagaagcttgccttgcttatggtgaagggctcaaacaacaccctgtgaataaagtcctgtactgtaatagagcagcttgtaggtttaagcttgggcagtgggagaagtcaattgaggactgcaatgaagctctcaagattcatcccaattataccaaggctttgctcaggcgggcagcatcgtacggcaagatggagcaatgggcagaatctgtgaaggattatgaggttctcagaaaggaacttccaaatgatacggaggttgctgaggcctatttccacgcccaggttgctctcaagtcatctcgtggtgaggaggtatccaacatgaagtttggaggagaggttgaagcaattacaggaatggaacagttccaaatggctacatctttgccaggttagtcttataaccagccacatttattatttcttaattttggttcatgacttcttttttgttgttactgcacaaacttcttggaaatcttatattgcctataatagcagtaaatattaaaagaccatttttcatgtatccatgcatagctacaattcactaaaacatgtatccattcctttagttccgatagcgaataagaacatcaacttatcaagtaatagccttccatagagagaacagtatctgatggagagcttagccttacattggatgctcaacttcagaacagctcac

SEQ ID NO: 36944 - DNA, 242 bp, Setaria italica
  Peptide Sequence Number=SeqID_102918
cctctcctccatcacctccgacctcttcccgtccccgtcccccgcctcccctgcctccgacccggaggcctcggccgagcaggaacccgccgaccccgccgcctcgctcgcggccttcgacgccgccgagcagctcatccacctctgggacaccaccccggaggcgctcgtcttcgaggcccccgaggacgacgccgcgcactacctcgccgccgtcgacgtcgccgtcgaccaccttcact

SEQ ID NO: 36945 - DNA, 1221 bp, Setaria italica
  misc_feature (1183)..(1221): n is a, c, g, or t
  Peptide Sequence Number=SeqID_102919
caaaaggcagagcaaattcttgatgcggtcagagatcttgtccacaaaaagagcaaattccagtacaaggccaactggatcaatgttcttgagggaactcaagaaggatcctacctctgggttgcattgaattatttgttggataaattgggaggggactactcccagacggtaggcgtgatcgacatgggtggtggatctgtgcaaatggcgtatgctatctccgcaaatgctgctgcgagagcccctgcggcggccaatggagaggatccctatattacaaaagagtactacaaaggaaaggattacaatgtctatgttcacagttacttgcgctatggtgcttttgcagcacgagcagagatcctgaagtcaaagaatgggccattcagctcctgcatgctgcgtggattcagtggtaattacacctatcatgggaaggaatatgatgcgactgctagaccagaaggagcagtatatgagaactgcagggaagagataaccaaggcactgaagttgaatgcaccatgccacacaaaaaactgcacatttaacggcgtgtggaacgggggaggtggtgctggccaaaacaacatctatgcctcaacgggtttctactaccttgcctcacatgttgggttcatagacagcaaagctccgagcgcaaaggctgctcctgccgcgttcatggctgctgcaaagaaggcttgccaattggacgtcaagaaagcaaaagttgcctacccaaacgttgatgacatggatgtgccgtacttgtgcatggatcttgcttacacgtacacattgctcgttgacggtttcggtttgcagccaatgaagaacatcacatttgttgacaaagtgaagcatggagaatactacattgaagctgcatggcctctgggcactgctattgaggccgtgacacacaaagagaaacccggaaactaatttccggctcagtaagggtattttgcacttaatattggcgcgcgtgtgatcatgatatgtatcgctctttggagttagcgctcctatttgaaatgtctggttctcaataattgtgtgtacaactttatgctctcagcggtgtgtaacaaattgcgcatcagcatggagttttgtcctaaatttcaaatagtaataaattaattcttacaaacaaacaaaaaaaaaaaaaaannnnnnnnnnnnnnnnnnnnnnnnnnnnnnnnnnnnnnn

SEQ ID NO: 36946 - DNA, 275 bp, Setaria italica
  Peptide Sequence Number=SeqID_102920
ttgtagtttggtagtaagtcttcctaggtcgtattggttctcgtcgcacctgtcgttctaaacatacccgtccagatgtccaatcaaagttatacaagccgtccaaatgggatggctcgctcagcagtgaagagagctcagggggtgtgacataataagaggggatagatgctagaaccaaaaggggatatagtttcgtgagttgcctgttattatgtcacaccccctgagctctcttcactgctgagcgagccatcccactttggacgggcttg

SEQ ID NO: 36947 - DNA, 500 bp, Setaria italica
  Peptide Sequence Number=SeqID_102921
ggcggccggctcctccgacccgtcgcacggctggcagacggtgtcctaccctaagcgcaaccgcaagcaggcgcaggcgccccgcgccgcggcgcccgatctggcgctgcaggccaacggcggcaaggccggggtcttcgacgccgtcgagaagcgctcccaggagcgccaccgcgcgctgcagcagcagctggcgtccagggccgccgacctcgacggcgcgcggatcgccgcggccacggggttcgccgccgactccgacgacgaggacgactcggacgaggccgcggcgccgcgacaggagggggagccgaagaagcccaagaagccgaaggtgaagaagcccaaggtgacggtcgccgaggccgccgcgctgatcgacgccgagagcctcgccgcgcacctcatcgagatctcgggatcgtacgagaatcaacaggacattcaactcatgaggtttgctgactactttggccgggcatttgtaactgtaagcgcag

SEQ ID NO: 36948 - DNA, 793 bp, Setaria italica
  misc_feature (591)..(591): n is a, c, g, or t
  Peptide Sequence Number=SeqID_102922
gcctgaggtactaacaaacattatgccaaagataatgggaaacaataaatatcttggacaggaaaagcttcccatcattgtctgggttattgctcaggcatctcaaggtgacctagtaactggcatgttttgctgggctcattccctatttcccacattatgtgcgaagtcaagtggtaatccccaggcaagagatttggttttgcagttgcttgaaaggtattgcttaatgtaaaatctgattaattgcattgtgctgttgctatattctctgctatattgcacattcttgttatatcttaatacacttcaaaaatatttgtgtgtagaattttgtctgtccccaaagctcgatcaatcttattgaatggagctgttagaaagggggagcgcctggttccccctgtttcatttgatttgttcatgagagccacatttcctgtttctaacgctcggatcaaggctacagaaaggtttgaagcggcctacccaacagtcaaggagttggctcttgctggtcctcctggctctaagactgtgaaacaagcatcgcaacagcttttgcctttgtgtacaaaaggcaatgcaagntaaaaatgcagagctcaccagggaggctgttgatgtattgttggtgcttgactcaaaatacagagtcctacaagcagtgggaaagaatttatgctgaaaatattgaagccagtgttgctgtctctagcgctgcatcattcttagcctttaagttcttcacagttgtcctttaagtagtcttctacctatttgtagtcttagg

SEQ ID NO: 36949 - DNA, 469 bp, Setaria italica
  Peptide Sequence Number=SeqID_102923
gaagaacttaaaggctaaggtaagacaaataagttgctttgttcgactattaaccttgtacagttttagatgtttgcgtcatccaagttttgctttgtgtgcaactttatgttgcccactgaaatctgaaacttcaggagtagttcgatgaatgttaagtttaagtcacttcgaagtacctaaaggctttatgatgtcaaaatgagatgcatatctgtgactgtcaggaactttccactttgaaccttatgcaaagccaggtttagtttgattgatgcaaacgatattattaatttgaactctcagtatatttatatctccagatattcatgtgttctactttgttcatcgttgctattgcagaatgatgcagcgctagagacagcaacagatgctggaaaacaggcatctatcaaagaagcagacaagcactgcaaggtggtccttggaaggctgacgcgtggtgcca

SEQ ID NO: 36950 - DNA, 243 bp, Setaria italica
  misc_feature (236)..(236): n is a, c, g, or t
  Peptide Sequence Number=SeqID_102924
ctgcagtcctgcctgccttcccgttcactttctcctcctcgtgaagcgagcgccgcgattccatttccatcccagaacggcttcaaaacggccgcggcgcagatccacacacagtcacacagacacgggcagacaaaaccgccgctggggttttcaaatcccggggcggatttccccgcagagagaagagagagagagagaggaaggaacgcccggccaccactcctcgacaaagntctcgtc

SEQ ID NO: 36951 - DNA, 756 bp, Setaria italica
  Peptide Sequence Number=SeqID_102925
gaaggtaggtattgtcgtactagtgatgacggcaacgagcagttgacatgaagtttggagtctgtatttcctccaatccacatggccaaatggtcagggaaacaaattccatggcaccgatatcttggcaacagctccctctatggctatgcacagcatatacggtcagtggagagattccggcaccgggtccgtctctgaaactgacagtaaccccgtagtcctctaggttccatccacagaccacggtcgttggtgctcatcatggccaggcgagctgccacgtttccttcagccaaacagaggctgccacggtgtgcactgggcctgggagcgaatattcctccgatccacgggtaacatctgacacgcgagcaggcccaattgtttgccctgatctgtctcagcaagttgccacaaccggtagaccttcacgcaccatgttgtgccagattcttcgttctgtcctggcctcctgggtggaagccacgtcatgcgttttgctgtcactgcctcctcctgacttgtgtctctatccattccttgaggttcattacctgttggacctcaatgcaaacctgatcatgcactcaggttggattcatctccaaacggagagaggaatctcgatccccaagaaaactcacaggccccattttcatcaaacagcttcgtagcgttcccacgggagcacgggtgaaagctggtaactgacataacaacacatcatactctccaggcctttgcaggattcag

SEQ ID NO: 36952 - DNA, 454 bp, Setaria italica
  Peptide Sequence Number=SeqID_102926
tgcttatgagatcacgagcaagaagcgataccgatccccactgatcactgtgaaaatcaagctcgactgtctttattgctttaaagatagcttcaacacagttgccttgaaatggaagtgtgcccatcagtagcacatgcagaaccactccagcagcccatatatctactttctgcgagtaatctccgagtagaatctcaggtgccatgtaggcagggctcccggcaacaccagtcaatttctggccatcagccactcgcacggccagtccaaaatctgcgagtttcaaccttccggccttggtgagcagaacattatccggtttaatatccctgtgcacgacgcccatctcgtggcagtactcaagcacggtcatgagctccctgatcacataggcggcgcggcgctccgaagaagaccttacccccttaccccttaggacctaaccttacta

SEQ ID NO: 36953 - DNA, 681 bp, Setaria italica
  Peptide Sequence Number=SeqID_102927
gacggctacctgagagcctccttgagtatggaagtgagccaagcagtagtacatgcagtagcacaccagcaccccatatatcaactttctcagaatagcttccagaaagaacttcaggtgccacatatgctgggctcccagctatgccagacaatttctgaccattagtgacacgcgcagcaagtccgaaatcagcgagcttcatcttccctgccttggtgagcaaaatattctccggcttaatgtccctgtgcacgacacccatctcgtggcagtacttgagcaccgccatgagatctttgatcacaatggcagcccgctgctcagagaacttcccctccctggcgatctcgtcgagcagcctcccgccgccgcatagctccatgacgaggtagaactggtcggcgtcctcgaagacggccttgagcgtgacgacgcccgggtggcccgagaggtgctgcatgatctccacctcgcggtgcgccgtctccccggcgttcttgggcagcgccttgcacgcgaactcctcctcgcccccggccttggcgcggcagacgcggacggacccgaacttgccgtgcccgatctcctccccgaggtcgtactcgctctccagccgcttccgccgcccgatccgcgtggcggagtcgatgcagcccaccttccgcttcagcccgcggc

SEQ ID NO: 36954 - DNA, 1308 bp, Setaria italica
  Peptide Sequence Number=SeqID_102928
ggaaaacagcacgcttatgaattatgaacattgcttgaaacagttctgacaacataaattagcaaccaaggcacagccgcacagctaggtggagggatcatgctatttacaaaatttacagcaatggctaccatcgggttcaacagtatttactgaagaaaacctacataccaaccgcttgttgctttgccgaaaaacccgagttattatcctcagctctacaccagccagtggagccattgtaaaacaatctcagcgagaaaatggacacaccgttgcgatctggagctatacactgggtcaggtcagaaagccgtgcacagattgctcttcaagtttgaagagcattcctgctgaagagcagggctacagagccgacttctcttcggctctgatattctaacacgggttattgctgctgtcagtgcgtcaactatgccacattcatcctgctcctctgaactctggcttaagtctgacaatgactcacattctgacctaagtctgccccgtggaattatgggtgctataatcttgttagtgacacacaaattagcagttaccaccttcagggggcattccgtgtaaaacaggacccatgggtgactaaggacttcatcagcagtcaatctagaagagacatctcgattcaacattcgaccaataagatcctttccgagacctgatattgattcccatggactactgctgaaatcaagttcaaccatctttatagactcaaagacggcgtccagagagcctccttgaaatggaagtgagccaagcagtagtacatgcagtagcacaccagcaccccatatatcaactttctcagaatagcttccagaaagaacttcaggtgccacatatgctgggctcccagctatgccagacaatttctgacctagatagaggagatgacacgtgaatgaacacttgttgtgaactcatgactccaaaaacacagcttgcgctcatttctctgagcacgtattgagaacatttcttcttatggagtaatgtacacgacgcaaaacatcacatcaattgtcagttagaactcagatgggaaataaaacagaccactgagaccagatatcgactgccgccaacttaaggagactccagagatgtgacctcatcacaaccaagccaggaagaccagagctacatggctcacttaggttcctaggccataaacgtataaattagttgactcccaacttatccacatcacactagctggtactcaaggccacatatatgggcaacctccacatatatgggcaacctgcaaaagtgctagca

SEQ ID NO: 36955 - DNA, 1147 bp, Setaria italica
  Peptide Sequence Number=SeqID_102929
tgtggttgaagagaagaaagttgtggaccatgataatacgggtagaagcttgaaaccatcttcaacattggataaggagtgtagtctagcaaaggcaaatgaaagtggcaggcttatcaaaagatctgagacaggagaaagagaaatcagtagcagatacagaccaagcaatagcagtgatatcagtgatgagagcttgtgtagcagcatcagtagcatcaccaagcctcataaggcaaatgattcgcgctgggaggcaatccagatgatcaggaccagagatggtatccttgggctgagccattttaagttgttgaggaagctaggctgcggtgacattggcagtgtgtatctttcagaattgagtggaacaaagagctattttgcaatgaaggtcatggacaaggcatcgcttgcaagtcgaaaaaagttgcttcgatcccagactgagaaggatatcttgcagtgcctggaccacccctttcttcctacattgtatacccactttgagactgataaattctcatgtctggttatggagttttgccctgggggagacatgcatacacttcggcaaaggcagcgtggcaagtattttccagaacaagctgtcaaattctatgtagctgaaattctccttgcgttggagtacttgcacatgctcggtatcatatatcgtgatctcaagccggaaaatatccttatccgagaggatggacacatcatgcttaccgacttcgacctctcccttcgctgtgcagtgagcccaacgctgatcaggtcgtctaaccctgatgcagaatcacttagaaagaaccaagcacacagtgctcaacaagcttgtgtcaaaccatcctgcatgatgcagccatcatgtacagctcccacgacatgctttggcccacgtctcttctctaagtcgaagaaagatcgaaaaccaaagcctgaagttgtcaaccaggtcagcccatggcctgagcttatagcagaacctagtgatgcaagatcaatgtcatttgtcggtacacatgagtacttggcacccgaaattatcaaaggtgatggtcatggtagtgctgttgactggtggacctttggcatattcttatatgagcttctgtttggaaaaacaccattcaaaggctca

SEQ ID NO: 36956 - DNA, 268 bp, Setaria italica
  Peptide Sequence Number=SeqID_102930
gaaggagtgacatcttttcgcgttgccatttctgatacatgtaatcgtcctaaagccaaaggaatggatgcattccattccaggttcaattgtaaagctgtgctctttgtcgagcttggctcttgaatctcttaaacttgagtcaaaggactgtacattgtatgtttaattcaacagacatgtacttagacatacaatgtacagtcctttgactcaagtttaagagattgtaaagctgtgctctttgtcgagcttggctcttgaataa

SEQ ID NO: 36957 - DNA, 485 bp, Setaria italica
  Peptide Sequence Number=SeqID_102931
cccctgctaatgtcagtaaactctttgaacaaattaatgttggttgtccaggcatcatcatgttcatatccaaaccctgtgacgagaagagattgctccaccttgtctgtttgactaacatgaattttttgcccattacaataagctcccccaccagcagatgcagaaattgtacgggtgctccagcaaaaaggcccaccacaaaattccaccactgtggaagcagcaggctttccacgaaagagaaccccaatggacacagaaaagcttggataaccatgtgcaaagtttgttgttccatctaaagggtcaatgcaccagagatactctgacaaggaatctccaataaggccaccccagttttctaattatattcagttaaaataacccttatatgcacctaagctatactagtgtgctgtcagatttatgaattgtctctgttattctattattcaatttgcttgtcaataataacagagaac

SEQ ID NO: 36958 - DNA, 926 bp, Setaria italica
  Peptide Sequence Number=SeqID_102932
acgcgaaagatgtcactccttcaagatctctatttctgatacatgtaatcgtcctaaagccaaaggaatggatgcattccattccaggttcaattgtaaagctgtgctctttgtcgagcttggctcttgaatctcttaaacttgagtcaaaggactgtacattgtatgtctaagtacatgtctgttgaattaaacgtcactatttcttcttgaagtaaaacaacagatgatggctgatttattatgtttgtccacggccggcgctcttgtgatactcaaaagtcagttgggtacttgtcgggcttgaaccacaacgagaaatcaattcctttcttcttaagatcttcagtaggagggccaatccgatccaaaagctgtccatgaacaacaccattggagaccagaacagaacggtcgaagactgtaaatgctccaccatccatgcgtgttaccaccccaccagcttcttcaactatcaggacaccagcagccatatcccatggcttaagccggtattcccagtaggcttctgtaatgcccagtccaacatgagacatgtccgcagcagcagaccctagccttcgaactcccctgctaatgtcagtaaactctttgaacaaattaatgttggttgtccaggcatcatcatgttcatatccaaaccctgtgacgagaagagattgctccaccttgtctgtttgactaacatgaattttttgcccattacaataagctcccccaccagcagatgcagaaattgtacgggtgctccagcaaaaaggcccaccacaaaattccaccactgtaagatagtggtaaaaacgtgaaaaatacatagagaaactgtttcctatagtgtgatgccatagtagtctgtggctctgctattaggaagatcatatggttcaagaacaatatgtccaaac

SEQ ID NO: 36959 - DNA, 287 bp, Setaria italica
  Peptide Sequence Number=SeqID_102933
cccgtggcggacgccatcaccaccgcgccggcgaagaagagggagtccgccaccaggattgacgtccgccgcccgaaccggtccgtcgcccagccgccgatcgccgcgccgatgatcgcgcccgccaccgccatgctcacgatcagttcctgaagccatgtattcctgtcgactgatcggaagtcgtcacggatgtaaagcagagcaacccgaaataacaccggtgtcgtagccgaagaggagcctccgatgccggcggagaaggcgaggcggaggacgtaggggtt

SEQ ID NO: 36960 - DNA, 634 bp, Setaria italica
  Peptide Sequence Number=SeqID_102934
ctccggcacagcacgttccagcacgcgctcgcccgcgccttcccgtcctactcgctcgtcgtcgacaagaacccggcgttcggcgacttcacgaccatccaggccgccatcgactcgctcccggccatcaatctcgtccgcgtcgtcatcagggtcaacgccggcacctacacggagaaggtgaccatctcggcgatgcgcgcgttcatcacgctggagggcgccggcgcagacagcacgatcgtgcagtggggcgacaccgcggactcgccgacggggcccaaggggcggcccctcggcacgttcaactcggcgacgttcgccgtgaacgcgcagtacttcctcgccaggaacatcactttcaagaacacgtcgccggtgccgaagccgggcgcgacggggaagcaggcggtggcgctgcgggtgtcggcggacaacgcggcgttcgtggggtgcaagttcctgggcgcgcaggacacgctgtatgaccactccggccggcactactacaaggagtgctacatcgaagggtccgtggacttcatcttcggcaacgcgctctcgctgtacgaggtacgccgccgttctcttcctcaacggtggtctctgtgcaaaacgttgctacatttacgcg

SEQ ID NO: 36961 - DNA, 242 bp, Setaria italica
  Peptide Sequence Number=SeqID_102935
aggccgtgcgaggtcgccgagtgcacgaacatcctgttcggctgcgtcgaacgtgggcacggacgcgaaccaccggtcgcacacggcgaactccctgacgagctcgcggtacaccggcacggcgtcgggccggaacccgttcatgacggtggcggacatgccgggcctctccttctccgcctgctgcgcgaagccgctcatcggcggcgccgccacgccggccttggtcgccggggcgccgc

SEQ ID NO: 36962 - DNA, 399 bp, Setaria italica
  Peptide Sequence Number=SeqID_102936
cctcctctctcttgctcagctccgttcttggatcgtctcgtttcacaagggaggactgaggaggaggaggagagatcgaggccacgatgatgcagcagatgcagcaggagccgtggaacgccgccgccgtggggctcctccggccgaccaagtcggcgccctgctcgcccatcaagccggcggcagcggcgggcatggtccggacccactccgactccttccacgtcgcgcacaaggtgcccgtcggcgacacgccctacgtgcgcgccaagcgcgtccagctagtggataaggatccggagaaggcgatcgcgctgttctggtcggcaatcaacgccggcgaccgcgtggacagcgcgctcaaggacatggccatcgtgatgaagcagcagaaccgcg

SEQ ID NO: 36963 - DNA, 1187 bp, Setaria italica
  Peptide Sequence Number=SeqID_102937
atgtcaacagagtgatctttcaagtattgttgctgtacatttgagccaggcccaattaaaatccagtcgaacatgggccttgcgaattcttgagcagtcttgccacacaatgtacgtcaggcgatactgtatgcatcatgtatcaggtatccagactaaagcaatactgttggctagaactctgttttgaggctgatgtaacggaaccacggcagtaaaatcgacaacatctatttgcgggcaatgggagtcagcggcccaccaattaacttctatacgtacagttcatcgcgatgcagcaggaagtggttcctggcctggagaagctcgtaccgttgatcgtcatgcagcaggaagtggctcactggcctggagaagctcgtcaagcagaccggtgaacatgacggaatcagtctccttgggcttgaacttgaggagcgcagaagggaccaggtcctcctcttgcagcgtgcgtgaccgttcccctggtttcgggaaatgaggtaccacgcgcggcttaggaacagctggaaagatgagttcgaattccaaacctggctgcttcagagcagatgcaacgaactcatagagtgaaccagtggcctctcctggaaggaatacaccctgaagaatcactctatctggaaactgaactcggatgactgcttgcttatacttctgtcgagcagccagtgcctgcttctccttgtaagattttggaattagcagtcgagattgctctaacctttccctcctcatccttgcttcattccttatctcctctccgctaagattgtaaaaagaatctggtacatcattatctgcaacagaactcccaggaacagagaagaatacccgaatctgacgatcgatggtcttcttgacctcctcctgtccataaaccccattgctgcagctctccttttcgtcagcatccacctgagctggtgacgccgaggggtgcgccctctccagcaagagcacggcccttctgatcccgccaagcctgacgtcgctgggcacctcgtccatcaacgcgaagagctccccgccctcgtccccaaccaggaacccgacggcctcgaggagctccaccccgccctccctgtccgcgacggcctccttgatccgcgggttgcccagcctcacccgcctgaacttgtcgctccggggctcccggagcaggt

SEQ ID NO: 36964 - DNA, 238 bp, Setaria italica
  Peptide Sequence Number=SeqID_102938
tctggatggtgcccgcggggctcgtcctcctcggcacctcgctcctcgcgtggctctccgtcctcgcctctggcccagagcccacggctaccgccttcatcagcccctgctgatttaggcgcttaggtagttcagagcatttccaactgatcttatgtaaaatggattgctatctctaaaaactctccctctatttcaaattgtatgtgtcattttaacgttaatagatttatgtata

SEQ ID NO: 36965 - DNA, 356 bp, Setaria italica
  Peptide Sequence Number=SeqID_102939
ctgatattcatcaaggctccatgtcacaaaagagcggtaggtcctctggcattgaaagccctgcaagtctgcagatggaggacaccagatctatgaattcacatgattctttgaaatctgatgagaaaacaagtaagaaaacctcttctaagagaaaaaggatggattcaaaaggagctggagatttgcattctgaagacaactcaaagtcagatgctatctccactggacacaataccagaaaggggaacaagttggcaaagctggtagacaaggtcagccttccatgggaatggagcatgagcaaccacattcactgcaagtacaaggtggtactgctcaggtgccaccgtcac

SEQ ID NO: 36966 - DNA, 868 bp, Setaria italica
  Peptide Sequence Number=SeqID_102940
cgatttgcaccagcaaatcgcccaagtgcgtgcctccttatcttgctcaatagtgattgcacattttcttcatatctaggctcatttggctcagcatattaaggcagtatatttgaatcatcacatcaaattgtttacatatcgccttcaaatgcatacactgcacaaagtgaacataagaatattatgcaacagcaatcaaatgcacatatcgcaccgtgtggggagacgaatagacaccacaattgtccagcgatgcatcaaaaaattactagagtatgtatttcgaaacagacttgtactcaattactgaaaacgtttttaatcacaatgcatgcacttctcagtttgaagttgcttatgacaatgctgaggaacataacgataagctggacagtttcttgctgtctgagtacaaaataaagcaccaaatgaacatgactccagaagctcatcagtagaagaaaatataagccattatccagaatggaccccagaaaagccaccagtcctcggtgtggccggcgacggacgggggcggtggatctagtggtgcttcccgccggtcctctccatctcctcgaggtgggcgaggtgggcccgctcccagggcagcgcgacgaggtaggagaaggccatcccgccgaagcagacgtggaagagcgggtccggcttgctcgtctcgatgtacttctcgatgtagcggtcgacggcctggtcggcgctcttcttgacgttctcccaggtgagccgcggcttcaggtacgccggcacctcccggaccttcatgccccggatctcgttgtacagggctcgcagcgccatggccgatctctccctctcgctagggtttgctcgtcggcgtgtg

SEQ ID NO: 36967 - DNA, 626 bp, Setaria italica
  misc_feature (569)..(626): n is a, c, g, or t
  Peptide Sequence Number=SeqID_102941
gcaaaatctaccttagcaatacagcatcctctcttccaacaaaacccagttgacgatgtttcgacgtgccaagaccaccatggctcctcccttggaaggtgaggttaggattcaaaaggttgaaaaaattgacctcgtctacaacctcctcaccaagccatcaatctatgctaataagccgatggtggcaactggaaagtatcctacttctggtcatgatgtcacaggctggaagaagactgggaacacaagcaagggtatagtctctgtagaagacatcaacaagaggtctgaaaggtacatcacagagatgaagaaacgatttcttggctagcactacttattgcttactttgaggtttgagtccgtgtgacaaggtgaaggtctgataatatactgttgcatccatggaattggtttggttatatgtatatttgatattacgctgggatggaatatataagatgttgctttagttataaatgctgttatggatgtatgcatgttggatatgtatatggtatagagaaaattaccttgattattaatataatgttaatttttaaacnnnnnnnnnnnnnnnnnnnnnnnnnnnnnnnnnnnnnnnnnnnnnnnnnnnnnnnnnn

SEQ ID NO: 36968 - DNA, 259 bp, Setaria italica
  Peptide Sequence Number=SeqID_102942
gatgagcaactggctgcagaaaaaagttttagccttgtattgcaagccagttgagttgtacaatatcatccagcggcgagctgtaaaaaatcccctttttattcaaagatcccttctatacaagatacaggcaaggagaaaaaagaggattcagctaaccatatcactttctggaagtacaaatacccaagcacagaatatctttcctctttatgtacttttagctagacctactagtaatattactagtaggtctagc

SEQ ID NO: 36969 - DNA, 1426 bp, Setaria italica
  Peptide Sequence Number=SeqID_102943
ggaaaacagagcaggagaaccccacaggatccacaccgccttctcctcctccctctctcgccgccggagccagatcaaaatacacgctgccgcctcatccgatggctcctctcctctccccgccgctgctcgcggactccgtcaccaagttccatgcggcctcaacggcagtcccctgctccggcagcccacagcgatatgccatcacgggattggccggggccggaagacgagaccggcgccggtgtcgtaggacgcggggaaggacgggcttgagggtggaagcggtggcggcggagtcccgcagctcggaggggggcgtcgctgaggattattacgctgttcttggtgtgatgccagatgccacaccgaagcaaatcaagaaagcttactataattgtatgaagtcatgccatcctgatctcagtgggaatgaccctgatgtcacgaatttctgcatgtttatcaacgaggtctacacggtgcttaccgatcccatccaacgagcagtatatgatgagatccacggatacgctgcgactgcaaccaaccctttcttggatgacaatgcacccagggatcatgtttttgtcgatgagtttagctgcataggatgcaaaaactgtgctaatgtgtgctctaaggtctttcaaattgaggaagattttggaagggcaagagtttacgaccaatcaggcgacataaaactgattgaagaagctattgagagctgtccagttgactgcattcattggacttcagctgcacaactttcactacttgaggatgaaatgcgcagagtagagagagtaaacgttggattgatgcttgctggaatgggaggttcaattgatgtgttccgtatggcaagttcacgctgggagaagagacaagccaaagtgctggaaaaggtgagaaggcgggtgagccaggatgattccagtaagggcggctcatggagtgatatctggggagcaccaacaagataccagaaaaacgaagaggaggcaaaggagagagcaaagcgagcagcggctgcagcgaggaggtggcgcgagtactcaaggaaaggagccgacaagccccccacgtacaaacttccagaggcagtgcccaacaaggagtgagaacaaggcaatgagagatcttatgcagtactccagcatcagcgatacttaacccacatttactcaatgtatagtctaatcatttacagagagctctagcctgtatagcattcgctctctcgcactcgattccacatcctgtacctgtaaatcctctgttagtgatagctcaggtcgattacccatagagttcagatcccagatgcaaaacaactgtacacaaaaatgtggcaccttgctactctacaatcaatcatgatctatgaagcacggaatcaacaaaaatccgcaagcacagc

SEQ ID NO: 36970 - DNA, 545 bp, Setaria italica
  Peptide Sequence Number=SeqID_102944
tttatgagtgacttttgtatttatagacaatacttcaatccatctaatttcatccagttctactatctttgttggctgtcaaaattagtggattctacaactttataggttttaccatcttgacaatattgatacagtacattaaaaacaaattattatgaattcaagcatgtctgttgcagatgtttgacataccatccaagtgttgacggagtgttccattattgacatactcaaccagaattaggcgttcatcctcgtattccacgtacccaagaaacttcaccaagttcaaatgctcgacctttgacaacatctggatttcacttctaaactctacagatatatgcccgccatgcgtctgccaattccagatgttacatgaaaacttattcttgatttgattgctgcaagtagttcattgtagtaaatatgtacagtctttcttgtgttgaaggaattcacctacaaaccttagtagcccgctttacagctatgatggatccatccctgagctttgccttatacacagtgccaaaattacc

SEQ ID NO: 36971 - DNA, 258 bp, Setaria italica
  Peptide Sequence Number=SeqID_102945
acgctctatcaactacatagcagacgcccacttccaaagcactaggctttcaagcatattgataaatcgaattaagcaattgctgaaacttcaattttaaatgcattgcacttgtatgttagctctccaaattgcaaaagcattacgaaggaaactaattcaaagtatccaaccaggcaaccaaaaagctgcaaacaaaagaaacattacctgtacaagatgtggcaagttagaattctaaaccctgaagaaccttct

SEQ ID NO: 36972 - DNA, 1340 bp, Setaria italica
  Peptide Sequence Number=SeqID_102946
taagcagcaatgctgctctcgcggcagcattgtgtacgcatgtcatgaattagagtctgatcaccagctatgccacctgaagcaccatcgctcctggtccataaagccttgagcaaaatatgtagtggtgaaggggcttactttatacgatccatcagtgcctggattgtcacagaatggcatcagctttttttctgcagttaacccataattaccatgaaaagaatccaatctgacaatttggcccatgttgtactctctttccgatgcctccaacagcttggatagcttgctgcatgctattatcaatatctctgatctaccatgttccggcagtatccttttgagttttgacatttaccatgtttcagaatcagaatgaccacatgtacaacacttcacgggaggagacaaattttagcatgacatccataactttcgatttcttgatgtacaatagactagaccattctgtggtttcttggacttcagctttatcgtcttctatgcaattcaaccaaaattcttgtatgtgtgtgtggctcatctgatccatttcccaacagtctgatgataacttattgagaaaggagacatagttatcttacattatactataaaaatgctgctgtctaggccaaagtaagaatgcttgggaaaaataaagttgagaacaccatatatataaaacctctataaattagagctcgcgagtttctaatatcatgctgtcaatctgaccatctgacaggctggtgagtcaattggtttgagcttcatcactttgaactttgaaacaattatatgttaccttaggtggcacatataccatttcaaattatgtttgacttgttccgtggttaatgagtggccgttgataacctccaggagacattgaattactttattttttatgaaagaatcatatgactttattattaggtacgaaaaaggaaaaggaaaagcgaacagcctgactatggtgacattgttgaatcatattttgatgtgatccaacagccattatgactcaagtccaaactaaattcgtgcttaaaagttaaacccaatgaaataagtaacaaggaaaaagagatcgattgcaatcaacacatagcgctaaaacttcaaagaaacaaaaacagacaagacaaactcctaccgtcctacagataccaaaagtggaaaatctgtcgtaacagaatattgtcaacgatttgcaaataccttgaaagagatgcgggcatacaccatcaagctgagctgtgatctggaaagataaaattggcggcccaaacaccaaaaaggggacccagtaatcgatggagagcatgggccca

SEQ ID NO: 36973 - DNA, 3485 bp, Setaria italica
  misc_feature (1)..(62): n is a, c, g, or t
  Peptide Sequence Number=SeqID_102947
nnnnnnnnnnnnnnnnnnnnnnnnnnnnnnnnnnnnnnnnnnnnnnnnnnnnnnnnnnnnnnttttagagataaaatggatgcatctcaaatctcgaccgccaaatcacaaccactaattgattatgggtaaatcggatacagattagggtacaaactgaggggaattgccgaattagaggcagagatcaaggaatcagagataagaggcaacaagagcagcagcaggtacagcgagacagagacttcctaggaggaagacaagaccagttcttgcttcgaatatgttcgatgcctcttctcctggtgctgccgccttcttgcttgcgtgtcttgtggcccagcccataccgaggtacatgacagttccattccatggtgccgccaccgcgccaacaacaggtcgatgactgtgattacaaaaggcaagcaattttccgaccaaagactgcattcgcaatatccggattcagtctctcttgcagagttgcaccagctgcctgcaaatcctgaggagtcctgctgccgctgctctccaaggctttgcccagcttgtgttagtgttagcagcaatgctgctctcgcggcagcattgtgtacgcatgtcatgaattagagtctgatcaccagctatgccacctgaagcaccatcgctcctggtctttatacgatccatcagtgcctggattgtcacagaatggcatcagctttttttctgcagttaacccataattaccatgaaaagaatccaatctgacaatttggcccatgttgtactctctttccgatgcctccaacagcttggatagcttgctgcatgctattatcaatatctctgatctaccatgttccggcagtatccttttgagttttgacatttaccatgtttcagaatcagaatgaccacatgtacaacacttcacgggaggagacaaattttagcatgacatccataactttcgatttcttgatgtacaatagactagaccattctgtggtttcttggacttcagctttatcgtcttctatgcaattcaaccaaaattcttgtatgtgtgtgtggctcatctgatccatttcccaacagtcttgaaagagatgcgggcatacaccatcaagctgagctgtgatctggaaagataaaattggccaacacaaagggaccagtatcgatggagagcatgggcccagatatttagtgcgtaagaatgtcacacttccccaacagctaacttagtggactgaaaccatgctgctgaaccccattcatgtttcagtgttctgaatggaccactcactgaaacctcagctttaaactctttcccggataagtcaaggtcatggagttcaaaatgctcccttgatttcccattaggcaatccataaatttcctgtaaatcttttttgttcgcctggttttgtagccatactaaatccatccaatcgctttgttagcaaggacgttccaggaaacaacattaagtttacattatggagttgtttcctttcagcatcttcaataggtttgaagccaaatcctgacacccatgtgctaaccaactctgggatggcagaaaggaccaacatcttaacattaaatgatatcagcatcttttcaatgatgttcattagtatacggcacatcccttggcgtcgatggtctaccgaagtagcaataaaaggcagctcagcggctttagttccatgtactctgatagaagccgcacataaaatttcatctcctttctccaggattacagtatagaatccctgataatccacacgagcaaagtttgatcccttgctgtacaagacatgaggtatcatgtccacaccagttctaggatccaccatacgaatgaaacattcctccaatagagtaagagccactgctaatttcgtattacattctgcaaaataggcaatcttctgaacagaatgtagcttctgcccatcaccattgcatctcaatatggaccatgagagctcattgtcaagaatattatctgttccgacatgactacgtagtcctatgaaaatctctttacaatatttcccacaaaaccatgtgtcagatatttgaccctcagaaggtagcttctcttgctcaatgcaagtgtcatggtatgaatctccacattgtaaacatttgaaaatagccgagaatgtcgaaacctccttttcactaactggcctcccacaaatctgacaggtgcaattatggcagtaccaactaccttctggaagctccttagcagacaagcaagtttgatgatatgttgatgggcaattgtcacagcaaagtaattcaccaccatctccacagaagccacaggtgtcatcattttcatctactgcctcaacttttctaccacatgcattgcttctcctgctcataaattcagcagaccaagcctcaacctggcacaaagtgtatgacttaccagactctagaaagagtcccagcgaggactttgggttgctacaaccagcatgagccatgaagtccgatacagataaggttttttggcaacaattgcaaacaatgccttcccaggtaaccagaccatcctttacaactttattgctcttaggatcccggtattgtatcacgtcttttacagtcagaaacccagtggcaatcaaccagcagatgacagttttccgggccaagcatactctcttcccacccaataggtttgtgccagcttttccggttttagaaagtagtttgttacatttcttgtggttcttaagcttcttgaacttctttgcacctggaaagcctgctgcaaatttatggcaggagacaagatccttgtttttcactatagctgtgatcaaaaggtcctcatcactgatccgcaattcacgaggccttttcttcatgtacttctcccaacctttaggtttcattttagtagtggctgtcttgcaggcttttaagtcacgagttggatcagtacacagaacagtagcagtgcattcatgggataattttgcaggaacaggacttcccgttggaccattttgtgaatcctctgaaaattgtccatgggatgggagcatcttttcctggaccttgtcatcagggcaggacgctgtggcatctgactgtgactcccttgcaatacagtgggtttctgagaatgtaatgcaatccctaagttcttcagtcctcacactctgcaacatgttcaggtgcttgctctctgaagacaggaacatctcgcgcttattgctttggtcatcttcatctagcttttctgatttcaattcggctttcatatgatttttcagtgtgccaacacgtgaacacataccatgttcctcagaggcattgatgattcctgtgtcagacatgaacatggttgctacatcggtcccatggccaaacacattttccgtagtagattgcattacacttagagaaaacaacccatccagtccagttgcgtcaatatcaaacatccttttagatttctt

SEQ ID NO: 36974 - DNA, 260 bp, Setaria italica
  Peptide Sequence Number=SeqID_102948
ccccggtcacgtacacggccccgccggccgccgcaatgccacgccaagaactcaggcacccaccccaacctaacctcctagtcgtcctattagctagctcaccaacgtctccgctagagctatggcgggagtagagcttggtagcttgctagcactacttgtgctcagaatagtagtcagctctatctagtaggtacgcccccgtgcgctggtcgtggcacgcaagcattggcgacgtgaggtcaaggttggggaggttg

SEQ ID NO: 36975 - DNA, 596 bp, Setaria italica
  misc_feature (12)..(12): n is a, c, g, or t
  Peptide Sequence Number=SeqID_102949
gttgtaggtgcngttttaggagcagggactggagtagaaggcaagttggcaccagttgttggaggcgatgaaggcttgctttcagtggtcgatatgactgaagccatacttgcaggaactatggttctagttacctctgatgtaagtgtttcaggtttggctgcatttttacccaagccagttgacaaatccttaacaggtgttgggatggattgtagggagctagacacattatcctcaggtactaatggagaaacttttggcgttgatttctgcattgagctagacaaaatatccgaagtctttgcagctgatgcttgcatacctgacgaggctgatgtagctgaagaggaaacagttggctttatggaatatgaattggtttgtgtaacaggtgttggagagaacgcaggaggttgagatgccaccttgggtgtatctttcacagtgttctgcacagcatcactaatcctgctaagctgaccagtcttctcatgtaatacagcaggcttggaatgttcagaagtaaaagatgatttgctaagatctctaaatatgtcacccttgctctgtggaggacccgatcctttagtgtt

SEQ ID NO: 36976 - DNA, 379 bp, Setaria italica
  Peptide Sequence Number=SeqID_102950
tcttgtcgctgcgctgcgggagttcgccggtggccggtcccagatgtcccagctctccttcttcctccgcgtatggtctcacatcaaggaacacaacctacaggacccaacgaataagaatattgtcacgactttggagcttttgggaaatgaagcttaacaatcattgggagttctaagagctgcactttggacctccccaataatacagtcttcagcttctcatcacagttcacaatattcttattcgttgggtcctgtaggttgtgttccttgatgtgagaccatacgcggaggaagaaggagagctgggacatctgggaccggccaccggcgaactcccgcagcgcagtcggcaggttgaccaggtcccaccacg

SEQ ID NO: 36977 - DNA, 2525 bp, Setaria italica
  misc_feature (1)..(12): n is a, c, g, or t
  Peptide Sequence Number=SeqID_102951
nnnnnnnnnnnntaagaataaaccaaactttaacgttaagaaccaaactttactaagggacaagcaagtcatgctaactgtaaggctgttctaagttgtacagcagtgtctgttgttgtagaagtagtaattacaagttactacttttgtattgtaccggtaacaaaatgagtgaataagctgtacagagactacttcctcactccacaaacatctagagtacataaacaaaatctggggtattcacgcctatttcactgaacatttgtcaatttgtcctttacaaaatatggcttgaatgccaataaacaaccgactagagagtgtacacacaggctaaccatggaaaggaaaacttttgccagccttcaactctgtaccgtttcaattgccctcacctgggatgggaagggaagaatcaaaattacagttacgaatcaaagtcagtttctgcatcccctgttgtagctgatttcagcttttggctcacaaactgccccttaactctcggtctttgctctgcaagctttttcctgctatgatatctaacctttttctcaaagcatctatcttttcttttcaagcgaaacttcatcaaggcagcttcacggcgagaccggtcactatccaacccattgttatagcagttctggataccactttcgttgccactttctagggcaaccccagtatttgtatggatgtcagtttcaccactaccggtgcatccacttcctttacggatatcctggctgcagctagcgctctggttgatgtgctccaaatgacctctcgtcaagtcaattggttctgattctctgagaatttgtcttgaatgatgcaactgctgattctcctctgactgtttgtgttcatcaacctgagacggtttactaggattttcatggtaattcgactgaccagaggcgtgctgaatagctgccttgttgatgccagctgaatcacaatgcatatgaggagcctgtgagtagtatactggctgcagaattgcaccgtaatggtagggcatcgcagcaccaacaggaattggaagaggtataaacccatatgaaggatggctcatactgtcctgtctatgggaggaactgcttgcgcctgcatcttctctagcactactggaacacagtacagcagctccctctgtgctgctgtccaagggaatccgagcttgccttgtactctcacctgtattatgttcatggggaggcaacaccccactgggttgggaaactgggtccttgtcatgaacaggttcttgatgagttatgcagagagaaggggaaaactggtgctcagctgagggctctatccttttattgccatatcttgaaaaggcagaagaattcgagtgattaaagatatctttttccctgaactcttggattttgtaaccattaagatggtgttgctttcctaagttggtctccagaaattgggaggggcaagatttagcatgacttattgcagcacccttcgatttttcaccaaggttattctctgtgacagcattactttccataactgaagatttgcgttgtacgtcagctgttggtcgggccatagccaagtctttgccaagattgcttggtcgacgtgaacttgcatcagcaatcctcaaggcattatccattatttgctcagcaaccttggctgaagtaataccattaaggcctttggaacgcacattcttctcacttccacttggggcatcatcgctatcttttgacgcatgcaactttgtgtttactccatcataagactcattttgtagtttaatttttctggaagggccagccccttcatccgcacggatatctggtaacttctcaacactctgaatttcagtctccctcttgctaccaaagctttgggcatcactttcctcgtcgctgttttctcctgcctttgaaccattagcaacattggcacttatatgattgctggctgcattattctccgatccatttgtttggctattcattgcatgccgcctccatacatgttgccataggttacgcagctcattctttctcactggttttacaaggaagtccaccgcccccttgtgcatgcacttgagcaccgtgccaatagaatcttgtgacgacatcatgatgacggggatgttcttgcactcgtccgcggcgacgatcctggcgagcagctggatgccggagagcgtgggcatggcgacctcggtgagcacgaggtcgaaggcgtaggcgcgcccccgcatcacctcccacgccttcatcccgtccgcgacggcggccacgcggtatccgcacttgcggaggagcgcggtgacgacctggcgcgtgcagtcgtcgtgctcgacgaggaggacctgaagggagcggcgcgggaggatctggtcccaccgcaccaccgcccgcccgttcgccgccgccgcgggggacgacgacgcgccgccatccgctctccctcctcctcccgccccctcggccggcaccagccccaccggcggcgtcggcgtcggcgtc

SEQ ID NO: 36978 - DNA, 524 bp, Setaria italica
  Peptide Sequence Number=SeqID_102952
ccggcgagttttttttctagggctttaggaattagggggcgcagcgccacccgcgtgctcccaccccccacttccgattcttctgtactcggattgtggaggtaagggagacaagggcataaggcggcggcgcgggcgcgtggggttcccatttgtgccggtctcttccgacgaagcccgtttgcgagggtagcgtcgcgccgaggcggcggcggcggcggcggctgcgcgatgaacgcgcctgtagtcgatccatatcagggggaatttccagagacaatcgaggagtacttgcatcatggtactatgaaatgcattgcgtttaaccgtacaggaacacttcttgctgctggatgctcaaatggtagctgtgttatctgggactttgaaacaagggggcttgcaagagaatttcgtgataaagattgcactgcacctataacaagcgtatcctggtctaggtacggccaccgtttacttgcctctgctactgacaagtcattgacactttgggatgtgtcaac

SEQ ID NO: 36979 - DNA, 268 bp, Setaria italica
  Peptide Sequence Number=SeqID_102953
gtccgggccaaaccaagcggagcaggtggtgctgatgatgacggctcgcgcatccgcagctcggggcgcggtcggcgcgtgagacagagagagggagggcaccccggcgccacgcccacatcggctgacgcgtcggctattttactgcaccccgccgcggccggactcgcctttccgctcaccgcccgccgctttttgctccccgtggcctgtttggcctccctcgtcctgccgtctcggctcccccggcacacgggcacgcgtagcg

SEQ ID NO: 36980 - DNA, 306 bp, Setaria italica
  Peptide Sequence Number=SeqID_102954
atgggtgcatgattgacatgtttgtgcgcttgggccggttggatgatgcatttttcttcatcaaaaggacaggttttgaaccaaatgaggccatctggtccagtttggttgctggatgtcggagtcatggaaatatggagcttgccttctatgctgctaatagactgctcgagctcaagccaaaaggtgtcgaaacctatgtgttactgctgaacatgtacatttccagcgggaggtggatgatgtggccagagtacggaagctgatgagacaggagatctaggaatccttagggatcgcagctgg

SEQ ID NO: 36981 - DNA, 512 bp, Setaria italica
  Peptide Sequence Number=SeqID_102955
taccgaccaatcatccaagagttgatgtcatctttgaatatttaggtacatagtaatatcagtgaattaaaaaagtaaaacagtctataatttgggacggagggagtactatttttttggaaaataatataaatggaaatacgatagaaagactgaaagagcatgaaaattaaagaatatgataacaatagcataatatccaagtatccaactaattgccaccagcgcagcgcagcaaaagcactgagttgcctgggatcaaaagaaacctctaagatagtcagatcctcaaccaatacatgaatccatgacgtgcatcctatcacgaacaaaacgagaataaaacagcactgcctccaccctggccggcggccctagaacgcgccgaggtgcacggccacgagcccggccaggcccaagctagcccatgccgtggcgctgagcccggttgcgccggatgtggacttcttgcccggcggcgagaggaccgtgaccggggtcttgggcgtggc

SEQ ID NO: 36982 - DNA, 143 bp, Setaria italica
  Peptide Sequence Number=SeqID_102956
agcagattccagtacgcccttacaggcacaatgagtacgagaggttcataacatccggaactttgaaggatattgaatataaacccttcttgtcagtcgacatagttttcaaaacataaggactcatcatgaaaaactgaagt

SEQ ID NO: 36983 - DNA, 626 bp, Setaria italica
  Peptide Sequence Number=SeqID_102957
tagttttttatttgaggttaagcagtcccttttttcttcaaactatgtaactgcaacctttttcttgttagcaaactctccatgccatgttctaccaaagttagcacttcagcagaaagttccatatgatgtattcttttcgaaatccgcaagttccatatggttgtaagtattctttgagaagatcaaattcaaatagaaacgtcttcagtattagcatatactggaactacaaaatgagcaaataaaagatgttctaagaaaaatagcatggcagcaatgaattagaaagcaccactcctatgagaaggcgttcggaaacaggaaatgcaccttctgttttttgatattttgttttgagaacacggttatgcaacagctgctacctgaaaatatcttttccggggtgttatatggcaattatttgaccaagatcatactttcaatacagctacatcgtggacactaatgttttgaccttttgcagatacggtgagcaagcaggggaggccacacacaattaccttcacgctacaggaaatgctctcggagtagcgtgggctgtgttcaagattaggaaagcacttgaccccaagggcaatatagaaaaagtcatcgatcgtcag

SEQ ID NO: 36984 - DNA, 1232 bp, Setaria italica
  Peptide Sequence Number=SeqID_102958
ccgcgacgtcgcggcggtcaagctcgacgccgcgcactacttcttctcgctccatgtcccgcacacggaccacccggacgacaaggaggaaggcgacgagggcgcggacgaggcggaggcggcgctgagctacggccttacggtcgctggaaaggggcaggagaaggtgttggaggagctggacagggccctggaggagtacaccaccttctcggtgaagcaggtggaggcggcggcgaaggagaagttggaggtgatggactcgagggcggtggccgagatcacgcctgaggaggctgtcggggataagaaggaggttgtggaggagaagtcggcggcgttctggacgacgatcgcgccgaacgtggacgactacagctcgtcggtggcgaggctgattgcgcgaggctcggggcagctagtgaggggcatcatctggtgcggcgacatcacggcggagggcctgcgccgtggagaagatgtagtgaagaagagcgtggggcccagcgcgaagccgacgcaggtgaagcccagcaccctcaggaggatgaagagggctaggagggttacaaagatgtccaacagggtggcaaattcaatcctgtctggcgttctgaaggtcacaggctttgtcacaagcactgtgatgaactccaaaccagcacagaagttcttcaagttgatgcctggcgaagtcattcttgcttcacttgatggatttggtaaagtatgggatgccgttgaggtgtcgggcaagaatgtgatgcagacatcatcagttgtgacaacttctgttgtaacacacagatacggtgagcaagcaggggaggccacacacaattaccttcacgctacaggaaatgctctcggagtagcgtgggctgtgttcaagattaggaaagcacttgaccccaagggcaatatgaaaaagtcatcgatcgtcagccaagcagcgcatgctgtggccaaagaatcaattaccaggcaaaagaagaaatgagctgaccacgctgacggttccattgtgcctgtaatgtaatctggtgttcagttaactaggaagctctgtgtgagttgtttgcgactgttgacataattgattttgatctcttattttccctctttttgctcctggttgggttcattttgttgtacatgactctgaaacttcacgcgtatgattcgatagtttacatcctaagtaaaaaaaaaaaaaaaaacaaaaactagaa

SEQ ID NO: 36985 - DNA, 346 bp, Setaria italica
  Peptide Sequence Number=SeqID_102959
gaattggtaagttttacctcttggatctgcagttggcaacagactcttgttatttcaagtttcacaagtttgcaggtaggttttcttgcttagaagaaactgaatgactctttcattgtaggacattcgacaaaatttgggtggcatccgtggtgcctctctatttcctcatagcattcgctctactaataccaagggccgaccagctcgatcgtcagacccaggccattccgtctcaaatggtgaccgatgcttcaccgataatggcagcagcaatgggcacttctctggagattctagtggtgctctttcacacaatggcgggagctccattggttcccctgat

SEQ ID NO: 36986 - DNA, 846 bp, Setaria italica
  Peptide Sequence Number=SeqID_102960
tcagcctcctttaaaaaagatgtctgtgcctgctatcactcgaagtaagttctctgatgtacaatcaaaggcatcttctcctaccaatgggcaccaaagtaggcagagtgaaagatctgttttggaaggtcaaacaactagaccctcgcgatctgtcacagctgcagacaatggattcggtaggacaatatcgaggaagtcacttgacatggctatcaggcacatggacattcgacaaaatttgggtggcatccgtggtgcctctctatttcctcatagcattcgctctactaataccaagggccgaccagctcgatcgtcagacccaggccattccgtctcaaatggtgaccgatgcttcaccgataatggcagcagcaatgggcacttctctggagattctagtggtgctctttcacacaatggcgggagctccattggttcccctgatagggaaagcactggaacaaaagaggttctgagtgaactggatatatacgccaattcacgatatgaggcgatgttgctgaaggaggacaccaagaatacgagttggttgcacagtgtggatgacaagtctgaccagagcccagtgtttgatcacaggtttgagccgctccctgagccatttggtccgctatgaactgtttacaacccgtaaagatgggctcattgttctgttcttccctagctattacagactgtatgctgctatctctgttcggtttcctccttccccatcttttcatagatctgctagagcagataaagatagtggggttttgtaccttgtactcctttgatagcttgaatatctatttgagtgattttgtgtttgaaacccaa

SEQ ID NO: 36987 - DNA, 341 bp, Setaria italica
  Peptide Sequence Number=SeqID_102961
ctgcacgaggcactgccggcctcggcgaccgtgctctggggccaccagttcctgtcgttcgaggcgccagacgacacgcgcgttggggtcatcgcgacggcccgcgtgctgcggacggggaagacggttgatgtcgccggcgacattctcgtcgcggcggatggatccacgtcgtccatccgccgccgcttcctccccgacctcaagctcaggtactccgggtactgtgcgtggcgaggcgtgttcgatttcgccgggaaggagagctcggacaccatgatcggcatccgaagagcctacccggagctcggcaactgcctctacttcgatcttgcttacaa

SEQ ID NO: 36988 - DNA, 651 bp, Setaria italica
  Peptide Sequence Number=SeqID_102962
agatgttttgctttagcttcctgtggatgaaattaactgtgtgtttgcaaattacactggtgaaatgattttttttctttttatttgaatgtggcggtgatttagaggttggattcttttgatttgactgttgtgtttgcatggatcctagagtttcatggatgttaacatagtagtccttaatttccataccattgttgacaactgtttttgtcctgtgttttcctgtttcaaaactttcctttgggtgtatgagttatcctttgagtttgccttggtagcatggatcactttgcttgttatctctctggttatttttgtgacaatcctttgtacccattactttcttttacatgtgcttacttatgtattgttggattctatttgttgtcttggtgattgtattgggattgtcaagctttgttaatcctgatccgctttatcatgatgactgatgatgtgaatctgcttaagctattatcttgatcttaaattgccagttactacttgattgtagtgcttcaaggctgctcagctttcttttggactaaactttttgtattactttcttggttaactaattactgatgcggttgacatctgagattgagattaccccttattggtcattacattttctttgtaatttct

SEQ ID NO: 36989 - DNA, 292 bp, Setaria italica
  Peptide Sequence Number=SeqID_102963
atagggcgcagctgcaaggaggagcgccgcagccaagagtggcgcggccgcgcgccccgtcacggctgcagcgacggcggaagggcgcgcttgcttcaggctggcgcagcagtacgctggcgccgccctcacccgaggaacggaggaagaagcgaagcaggcgaactgaggcggtagctggggccgcgcggccgaaggaagcccgtacatcgcgcgcagcgcgtgcccggcgtcctccgccgtcgcagtggaagatacaagtcgacaaaacgaggcaaatctaggagcgccg

SEQ ID NO: 36990 - DNA, 360 bp, Setaria italica
  misc_feature (115)..(115): n is a, c, g, or t
  Peptide Sequence Number=SeqID_102964
agacaagtactacaagcaacaacttgatgtctgtgtgccgtgacactatcactggtggcggtagttcatagttttactggtcttattaatggggagatcatgagagtgaaaaagngaacccatgaatcaaatccaatgaggcggcggcagcttaggcggcttaggcagtcgcaccaccacggcggcactcgttcagcatgtcaaggtagaactggcacttgctgatgtcgcttccatagtggttgaggcactgcatcatcaatcaagaaatgtaagaacccatcacgaagcaactattataactaatgtacataacaaagaaaaacattaaccatgacgccccaagtcaatctgagatct

SEQ ID NO: 36991 - DNA, 460 bp, Setaria italica
  Peptide Sequence Number=SeqID_102965
atcaaaacacagatgggcaacaacaggaaacagaagaccaacacaggtcggagacgacgacgaagacactagacgacacatagggataactctggtaacagtagtaggagcagcagcagcagcctccgagacaacagtctcatgctgaatggtccgggggcccattacagcatcaacagctctgtgtgccatggcactgccagtccaaaagccatgccttgagcaatcgtggaccccaattccctccaaggatggagccaccaccgctctgagcaggagctggaggaggagcctggcgcgctggctgaggtgggtttctcagaggagcagcgcgaggagcaggacgcgatgctgaccttcctgagctgcggcgaggcatggcggcggctggaacggtcggcggacgaaagaaaccctagcgaggcggcgcggggcaaggtggggaacgaacagagaggac

SEQ ID NO: 36992 - DNA, 259 bp, Setaria italica
  Peptide Sequence Number=SeqID_102966
cttgacatgctgaacgagtgccgccgtggtggtgcgactgcctaagccgcctaagctgccgcaagaatcagcaccgttcatcattggagcagcaggagcagcagcagcagcctccgagacaacagtctcatgctgaatggtccgggggcccattacagcatcaacagctctgtgtgccatggcactgccagtaccaaaagccatgccttgagcaatcgtggacccaattcctccaatgaggcggcggcagcttaggcgg

SEQ ID NO: 36993 - DNA, 340 bp, Setaria italica
  Peptide Sequence Number=SeqID_102967
agaatatatttctacaactctgacatttttcatgcaatacatagctaaagttgcaacatacttgtacatataataatgcgaaggaagagacaagagacccatatgcaaatcatgcaactacaacaccaaattgaaataaatgtcaagtcaaaagacattcatcattcacaagtacctggctgaggtgggtttctcagaggagcagcgcgaggagcaggacgcgatgctgaccttcctgccaatacaaaatggcgaacataagcatctaattttttacaagcaaatggtgcagtttatcatagaaagagctaactgaaacatcattgacaaaatggtaact

SEQ ID NO: 36994 - DNA, 529 bp, Setaria italica
  Peptide Sequence Number=SeqID_102968
gaactgggcagcaaaacaatagaatagcctcttccaatataaaatataaaactttcacagttgtgttcttaaaagtcatatgggtgcacattcttagtaaaatcagctgttgcgtagggaaaatgtttctcttaagaaggtgaaatgagaaattcatagaaattcacacattacccaaacttaatctgaatcctctaatccaaatgcccaaaactgaactttccagagaagctggtaaaataaaacccaatagaatagccagttttgcacactagtggatctaaacatttgatcaaattacaggcccttcacttaacgtttttccccaagttttcagttgccatatcttaaatgcaagtgtgtcaaccaattgcaattagtctagagtgttgacaaaattatatcaatctccatcactttcaagatctgaattccaattcctaactacagttgcattaacagaaagggaatcctattatttgggtaatgaaagtacgaaactgaatgaatatctcaaaccacactaagt

SEQ ID NO: 36995 - DNA, 249 bp, Setaria italica
  Peptide Sequence Number=SeqID_102969
ccatggctgcgacgacgaccaccgtgcggaggcggcagccgacgcaggggacgacgtcgccgccgcggacatcgtcggagggccgcgagcggacacgctgttctggttcgacgaggccgtgttcgaggacaccgccctgctgcttggcgacgaaggaagggatcacctgtacacacccactgccgctgcacgttgcttgcagcaggtggagagcacctttcccatggaggaggaatctgcccgcatctc

SEQ ID NO: 36996 - DNA, 452 bp, Setaria italica
  Peptide Sequence Number=SeqID_102970
tcaagctgctctacgcctacctcacccacttcgtgccagcacgcacaccaccgggtcggatggtggttggggccggcacgctgctccaccggacagccaacgatggcgtcgatgctgccgagtcattcgcgcgggctgagttcttgctccacacccttgtccagttctggcttgtcggggatgacttctcgccactgcccgtgcaggcttgccaggcgctgggcctgcggctaccttctcgtgctcgtgctgagttgagtgagcgcccaccatcaccaggtctgggtgatgcagtcaagctgcttgtgatgtacctcaactgctgtgatggccacatattagtggatggggatgcacgcatgctgtctgaaggaataccagtgtggagtggcgtcttggatacacaggctgcctttggaatccgttgatacagaggcctctgtatcgctttg

SEQ ID NO: 36997 - DNA, 467 bp, Setaria italica
  Peptide Sequence Number=SeqID_102971
tgatgcaggaaaagctgtcggtcgtccgaatcacgccggcggtcttggttcctcttcttcctctggtccggcagccatggcgtccaatgggagcagcacggttgtgggcgagatgcagagtagcttggagcgggtgaggcggcagctctcctccacctccacccggcagctcctccagggccctctcttgaagcgatccgacacgctaagaaaatggaacgagcgttgggtcatacttgatcctacaactggaaagatagaatacaaggttcgtagaagtgacaaagatgttaggggagtaatcgtgtttgattcaacaagcacggtgacattatcacctatgaactttcatgggctggcgaaatatgatggatgctgtttctatattggaactccacagaaaaaggaatactttctttgtgcagaaactcctagcgctgcaagagcatgggtatccactttacatg

SEQ ID NO: 36998 - DNA, 937 bp, Setaria italica
  Peptide Sequence Number=SeqID_102972
ttgtaatgattcctcatcgtataacagcccaacccaaaatgcaggcaaagcacacaaggtctccgtccacgggccaccatcagcacctctcatctcaaggtatctctttaacctaacctcgggaaaaaattgttgttagatggttctcccaatcattaagagtaggcaactccccaggaacttgtggaagctttccttgcataaaatcccgaaatgacattccggtgcagtcaatatacttcttattcgatacacaaaatacattgggacatccaatgcataatccacatattgctcaaatctccttaagctgagaatccatttggctttccttctttaaaggggaaattggcaaatatcgctgttgcaataggctgcaaggcgaggccagcacgaaatttccttatcatatcctgttctgaactgaagtcaagattaacctgcacagtacatgtccgaaacatcatatcatggccaagagtaccaactttaggcatgtaattcctcattatttcgtatcttccctacaaagcaataactgattttgtcagattttatcggagaaacgtaacagttcaactatgttacctttaacatggccactttatcagtcattttttctaagtgctcgacgaatgtgatggataaccagcaagttcatattgttgtgtcaagcaatgggagatgtatcaaaagacagcatttctagtgatacaatcttctttgtttaagtatcaaagactgctatggacgaaaatcaaaacaagtatgttgggtcgaagtgaccattagtagacagtccaggaacaaagcaaagttcaaaacatttagttttacaagatcaaaggacagaattacctttggcattattggtatatcactcagtgcccattttggctgaaagccaagtccaagaaatcctattcccatttcctct

SEQ ID NO: 36999 - DNA, 2388 bp, Setaria italica
  Peptide Sequence Number=SeqID_102973
gtgccggggcgcggtgctgctgctgctcctcgcgtcggtgctcgcgcccctcgtgctctacgggggctcccccgtctcggtcgcgcccctcccggactccaccgtggcgagcgccgcgttcgatcgggaggacgcgcccaatctggtgtggccgcagatagctgcgtccctggccaaagatttgaccatcgagaggcttggggagcacaagaaccgtgtgctatcagcaacagatcactggcaggcagttgagggagcgagtagtaggagccgtgtgcccggaaagcctgatgcgagcgtactgagggaggagtctgagacacggaatgcggatgaggaagatgccccagttattgaggggaatgagagggcacggttgggccagggtggtgtgatcaagcaggttgttggaagtgaggcaagtgcagatggatttggtgagcccagggatggcaaggaagctgtactgcagaatggagaagaggttgggataaagttgctgcatccaattgatgcagagcacaaggagggatcggatgaagcaggggagaacatcgtttctggaatgcacactgtaggaaacctgaattcatcttctagtgagactagagatgctactacctccagaaagcatcaaacaagggtgagcaacaataattctgctcgtagcacagcaaacagaagtgctggtcggtccacaacattaccagatgcaacaattcacatcatcaaggaccagttgacaagagcaaagacatatcttggatttgttgcatctagaggcaatcatggatttgcaagggagctccgtgcacggatgagggatatacaacaagcactaggtgatgcgactagcgaccggcagctacctcaaaatgtccacagcaaaattagagcaatggagcagacactggtgaaggtcaggaaaattcatgatagctgctcaggtgctgtaaacaggctccgtacagtccttcactcaacagagcagcaactcgaatcaaacaaaagacaagccaactatttagcgcaagtagcagctaaatcactacccaagggtctccattgccttacactgaggcttacaaatgagtattatttcaccaacccaaagaataaggattttccatatgcggaaaagctggaagaccccaaactctatcactatgccttgttttctgacaatgtattggctgctgcagtggttgttaactcaacacttgttcatgctaagaaaccagaaaaccatgttttccacattgtgacagataggcttaactacgctgcaatgaaaatgtggttcttggctaatccattgggtaaagctgctattcaggttcagaacattgaagagtttacatggttaaattcaacctacagtccagtcctgaaacagctggaatcccagtttatgattgattactacttcagaaatgggcatgctaggcctgatgaaaatcctaagtttcggaatcccaaatacttatcaattctcaatcatctgaggttctatcttcctgagattttcccaaagcttaacaaggtgttatttctagacgatgatactgtagtgcaacgggacttaactgcactctggttggtagatctcaaaggcaaggttaatggtgctgttgagacttgtagggagacattccataggtttgataagtacctcaacttctcaaatcctcttattgccaagaattttgatccacatgcatgcggttgggcatatggcatgaacatgtttgatttgtccgagtggagaaagcaaaacatcactgaggtctaccatacctggcaaaagctgaatgaaaacagactattgtggaagctaggcacactccctgctggtcttgtaacattctggaaccgtacgttccctcttgatcgttcctggcatcagttggggcttgggtacaacccaaatgtcaacgaaaaggatatcaggcgggcggctgtcatccactacaatggaaatctgaaaccctggcttgagattggattgcccaaataccgcaagtactggtcgagacatgtcgatttcgatcaagtgtttctacgggagtgcaatataaatccctgaatagcaagtagaggtgtatgatttatattttcgtttttcaactgtttcttagatcaattctttgtgctccaggtattttaacttgcctggagcgctaattctttttaactgatctcttcccatgtaaaggtgcaagcaggttagtggtaggcatagatcatacaaacggttaggagccacgaaggcatattgcatttttgtacttatgaatgctaatatggtagtagtagttaattattgattgtatgagtggaacgctctgtaagatcacaaacaatatagtttgcttcccttttccacct

SEQ ID NO: 37000 - DNA, 257 bp, Setaria italica
  Peptide Sequence Number=SeqID_102974
tcgtcttcgctgcaggtcgcctggccctggctggcgatcgccaggctgccgccctgcacggtcgcgttcaccgggcccgcgcagcgcacaccgtcgtcacggcggatgctgacctggcccttgccgtccttgaagtcgtaacccagctgcagcggcttgccggtcttggcgtcctggatgccggcgccggcccgccagttgccgtcgaggaaacgggtcgaaccgctcttcagcgcctcgggcggaatgctcatggg

SEQ ID NO: 37001 - DNA, 874 bp, Setaria italica
  Peptide Sequence Number=SeqID_102975
gaacaagtgaaccttgagcagaagccacaatccttgttgcaagctgctccggcatggctgcagcatcggaccgtgccgaggtcgacacggcccgcccgttccggtctgtcaaggaggccgtcgccgtgttcggggatcgcatcaccgtcggcgagagccactccaggcacagtagcagtgctgccgccaccgccacccccaatgccaatgccagtgctagtgccaattccatgcctaccgcaagtgccaagcatgaagctagcagcagcagcagcaccatgaccttttctccaaacccaatggcagaagctgaagaggagatcatgcccgccactgtgccgatgtactccgctccgtcctcgccgccgtcgctcgcgtcgtcgccgtcgccgatcaaggcgcgcggcgacgaccgggaccatgaggtgggtgggctcgtggtcatgcgctccatccggaagctggaggcggaagtggccgagacgaggcatgaggtggcgcagctcaggaagcgcgggaacgagatggagatggccgtggccagcctcaacgcgcagctacaccggggcctctccaagctcgccgagatggaggccgacagggcggcggcggcggcgcggcgcagcatcggcggcgacaccgacgtggcgtccacgctccggagcgagcggtggggcgacaagctcggagcgggcgagtacctgccgtcattctcgcacgcgctgagccttggcgagatcgacgacgctgagctcatgggaagccggagtaggaaggcgcagaaggtgaagcccatcgtgccgctcatcggcgacatcctcttctccaagaggaagagcaccaaggagaaggtcgatgatggattctacagtgg

SEQ ID NO: 37002 - DNA, 487 bp, Setaria italica
  Peptide Sequence Number=SeqID_102976
taacgaaccggggaacgtaacccccggaacgaacgaactaggaagacgtcgaagggcctaccgccgcgcggcgtccaagatcgccacgctgcggatgaagctcgccgaggaggacgaggaccacgacgccgacgagttcgcgcggaaggccgggctggcgcgcagcgcgtcgctgcggttcagggcgttctgcgccatccccgccgggaagcccaagcgggtgctcagcaagctgtggccgatcggcaggagcggcgttagccattaacagccagtcattattagcttctctgatctcctgtttttgtttttctgagggtgatttgtttgtctcttctagtactcctacatcttcttcttctttctcctcctctttccagttacagttccaaggcaaattgtaccttgcatagttgcatgtagttgtaattccaatggtcacaaataaaaaaaaataagaaattgcacaggactaaaaaaaaaaaaa

SEQ ID NO: 37003 - DNA, 339 bp, Setaria italica
  Peptide Sequence Number=SeqID_102977
tttttatctgaactcaaaaggctcctgtcacagaagagtttccaggaaggcgtgtgaagaagattcttccacatggaagaccttgtttcaatctcattgaggttgtaactactgaagaacagttcagggctgaaggcaaaaaaacttgctgctcatctagcagagccagatgttgagggaatatatgagacaaaattccaccggagctcaatgctgttctccaaattggctgtgtatgcaaagtggacaatctgcacaaaaagcgaagtataacaagatggatgggatcttgctgagttgcagatgaaaacaccgcagagtgctcatacctggaacaaa

SEQ ID NO: 37004 - DNA, 351 bp, Setaria italica
  Peptide Sequence Number=SeqID_102978
cggcgcggcaggggatgtgcagattaagggaagtaaggagaatgggcagcccgagcagcagcagcagcagcagccgtcgggcagcgaggcgctggagatgcccgccacgctgctcccgcgggacatcgactggtcggagcatttctccttcttcacctcgttgggcgggttcgggggcagctcggacggcgcgaggggcctcaccagcattggcctgtccaattctgaatcgaggccggacagcgtgacgcagcgtggtttggacaacggcgcggaagagagggtggaggagctcacattgaagaattgcatcaacactgatgttcaacctgaggtttcggctggtggaag

SEQ ID NO: 37005 - DNA, 253 bp, Setaria italica
  Peptide Sequence Number=SeqID_102979
acacgaagcacatgcggcaggcaccatacgctagctacaagcttcaattgtttttgagccaacaaaaatcaaagctgctatacacgcaggcaaagtagagcaggctatagcatttctctcttgctttgcttgtaacacatactagatctagaaatgggtgaggaggcagctgcgccgttgctgggcgatgtccacctccatctccatggagataataacaggaaagaggaggaggagaagctgccggcgacga

SEQ ID NO: 37006 - DNA, 244 bp, Setaria italica
  Peptide Sequence Number=SeqID_102980
caaagctccccgactacacctcgcgatcgcaggaacacgcgtcacactccctctgccactcactcactcgcgactcgatcggggacctagtcacgccgcaggcgtcagattatcggtcgctccgggcgtgcgcgactcgtataaatcgtacgttcagggatggccgtggcgttcccggcgcacatcatggcgctgagcaaggtgcagcggctgtacgacgcctgcgacgtcgtgttctcgtcgg

SEQ ID NO: 37007 - DNA, 231 bp, Setaria italica
  Peptide Sequence Number=SeqID_102981
aggtacatctgactcatccacccacaactgctggccacattgcatgacctgtaattttagcccacacaaggtcacctgagtcaagaccctggtagtcatgaaagctaacagcaagtgcaagcaactcatcatgacccttcttatcctgattggaaattccaatatttacattcagggacctcatttcttctagaggagtattggtaaaatttttattcctttctattctta

SEQ ID NO: 37008 - DNA, 163 bp, Setaria italica
  Peptide Sequence Number=SeqID_102982
ccaggttcctcgagctcgcgttgcagtgcgtcgacgacttcccgtccaagcggcccaacatgctgcaggtggtcgccacgctaagggagctcgacgacgcgccgccgtcttctaatgaaccagcacagtccgctgcttgcgactgatgagggaaggggcaacg

SEQ ID NO: 37009 - DNA, 763 bp, Setaria italica
  misc_feature (1)..(69): n is a, c, g, or t
  Peptide Sequence Number=SeqID_102983
nnnnnnnnnnnnnnnnnnnnnnnnnnnnnnnnnnnnnnnnnnnnnnnnnnnnnnnnnnnnnnnnnnnnncttagaacaaagagcgtactgaactacttgaagcatgatgttacagactgattatcgacacaagtatacgatcccatacaactactactatatggattgacaaacttctacagcaacagttcacagaacgacatcaccaaaattcaggagttgctagggatgacattaaagaagtggtagacctcatcctcgtcaaacactccaacctcagttgagcagacctcgcaacagacggggtgataagcctgtcccttgctttcagcttctgatgtagtagaaggttcagcagcctttcctttgcgatttttcctcttgctcttgccctctcgtaagatctgatcagtcttgaccttgcagttgcgcacaaacatagcgcggtactggtttacatacttctcatgcctctggcaatccacgcacagggtagtgaaacaggcggggcaactaagcacggcgtcagatgtgtggcctttcctctgcctattcatccaccgctcatcgacgtcatccaggtcgggatcgtagaactcgggctcgacggagtagtctatttcgtcgtcgctggacactagttcgcggggatccacggggtctccggcctccgcatccattggctgcttcgccgcctcctcaggtttctccggctccatgactctccttgccggcgttctctcactgcttctttggttcttcg

SEQ ID NO: 37010 - DNA, 445 bp, Setaria italica
  Peptide Sequence Number=SeqID_102984
gggcgccataagaaaacaatcattaattcattactgccaaataaaatttacttagcttacagagaaaaaactaaatagggtaacctaaacaaattgatctgatttcaatccaagattgccctacttgaatcagactaagtcaagcagtgaaggctttacctctggcaatccacgcacagggtagtgaaacaggcggggcaactaagcacggcgtcagatgtgtggcctttcctctgcctattcatccaccgctcatcgacgtcatccaggtcgggatcgtagaactcgggctcgacggagtagtctatttcgtcgtcgctggacactagttcgcggggatccacggggtctccggcctccgcatccattggctgcttcgccgcctcctcaggtttctccggctccatgactctccttgccggcgttctctcactgcttctttggt

SEQ ID NO: 37011 - DNA, 439 bp, Setaria italica
  Peptide Sequence Number=SeqID_102985
cccttctccaccgcgagtctagctttctccccgagcaccctggccctctcccttatcgcctccccctcctcgccgttgcccatcaccctcccgatggcctccgcgaccacctcgccgccgatcacgcgccgggcctccagcttcgacgcgtagtcagtggacccgacgccgaccccgacgttgagcagctccacgaccaccttctcgttgtagaactggtcggcgtaccgcggccacgttaccatcggtacgccggcgctcacggcctccagcgtcgagttccacccgcagtgcgtcacgaagacgcccacggcggagtggttcaggatcagcatctgcggcgcccagccgcggatgatgagcccacggtcgccgcgcgccaggagctccgcgaacccgtcgggcaaccactcttgctcctcggtgtccgttcgccgac

SEQ ID NO: 37012 - DNA, 181 bp, Setaria italica
  Peptide Sequence Number=SeqID_102986
ctgaatcaagctaagggaaaacgacgtgtttgcacattgaaggcattggcgcgctgcatgtggagtggaacaagaatggttttcttttttattggcgcatcgagttggcatgctgctggaaaacacttcctcatttggccgcaacggtaacaggagacttttggcgcaagtagagcttact

SEQ ID NO: 37013 - DNA, 290 bp, Setaria italica
  Peptide Sequence Number=SeqID_102987
atggcggcgacgccggccgcgatggcgccgaggggggaggtggcccagaccctccgccagcatcggctccaggtgcgacgcccagttcacgcacgccagcttcacgcgccgcccgcgctcatccacgacccaccgcgacgacgtcgacagcgacttcggcagcgccgccgctccctcggcggcttcgtggcactggcaggccagggccagagcggcggcgaggcacgccgccgcgacgaggagcctcgccatggtggttggtgggtgagacagagtgacaagcccaccgg

SEQ ID NO: 37014 - DNA, 410 bp, Setaria italica
  Peptide Sequence Number=SeqID_102988
aagggctcttcgacatgaagcacttgaaggtgtaaatgtttgtgcagtggttcaccaaccaagctatactttgttcaacatgtttgacgactttgtccttttggcaagaggtggccttattgcttatcatgggcctgtaagtgaagttgaaatatacttcgcaggcctggggatcaatgtgccagaccgtgagaatcctccagactatttcattgacattttagagggaatagtaaaaactaaaatgaggggaaatgtgactcctaaacacttgccactcctttggatgctacataatggctatgaagttccaaatgtattttcaaaaggaccttgagaatatcaatacaattcgtgagttatatactgttcggtccatttctagcgaacggtctttggcagaacagtca

SEQ ID NO: 37015 - DNA, 958 bp, Setaria italica
  Peptide Sequence Number=SeqID_102989
atgcactgaggctgctgcaggatgctgctgcaatggcagagtataatcctgaaatattgtacagccttgcttgggaaaatgcaatgcaacggaaactcaatgcagctgttgaaagtgcaacagaatgtcttgagatggtgatgggaggttccgttagtgcctggaagttattaattcttgtattatctgcacagcaaaatttacaagaagccgaagcagtagcagattttgcaatggatgaagctgagaaagatgatcagttggatattttgaggctgaaagcacaaattcaggcttcccgtggacagttcaagtctgcagtggaatcttttcaggttttgctttcaactattcaagcaaagaaggaagtttggaaatcgaccacttgtaaggaggttaaatccctacagaagttggagatggacgcatggttagatttggcgtcaatatactcaaagctcgaagcatggcatgactcgaacgtctgcctggacaaagccatatccattgatttgttttatcccaagtgttggcacatcagaggtcttctattggaggcgcaatccttgcaccaggaagccctgatggcgttctcatttgccctctcaatcgatccagattatgtaccaggcatggtttgtatggcaggaattctccgaaatattggagggaaatcgttatcaattgcaagaactttcttgcgcaatgccctccgtttagagcctacaaaccaccgagcctggttgagccttgggcttgtcctgaaagctgaaggatcgctggtggaggccgcggactgcttccaggcagcatacgagctcagagaattgtcgccgattcaggatttctccgagcaactccccatcatgctgcattaggaacctgtagcaaaggttcacagtttttcatgtagaaattttcttcatttctcagttattaacttatcagttatcacttg

SEQ ID NO: 37016 - DNA, 1364 bp, Setaria italica
  Peptide Sequence Number=SeqID_102990
caccacatcaccagctgccaccctaccaaggtctcattatcttttactccatccccacacacaccaccttttatataacacactccctcttaactcctcccatcccaccacccccatccatttcttcctcgtcctgcccggcggctgctggcctcactcctccgctccggctctgctcagggaattgattcagtgaagtgaaggcaatcagattctatgatggggttcaaagccggaatttttactgtgaccatgctagtcattgtgctctcctcaccagcaattgctcagaaggccaagagtcctcctgctccagcatccccaatccttccaccttccccggcaccggcaccggcgccacaccatgtcgacctcgcagacctcctcagtgtggccggtccattccacaccttcttggactacctgcaaaagaccaatgtcatcgaaacctttcaaaaccaggcaaacaacaccaaagagggcatcactgtctttgttcccaaggattctgcattcgccgcactcaagaagactacattcgccaacctcacccaggaccagctcaagtccctgatcctataccacgcattccccaagtactactccttggctgagttcaacaagctgagcaccctcaatccggtgaccaccttcgctggctcacagtacacgctgaacattacttatgacatgggcaccgtccaagtggagtcgatgtggtccaacccaaagatcagcagcagtgtgtactcaacccgcccggttgcagtgtatgaggtcaacaaggttctcctgccaatgcaaatcttcaagagcgaccccccgcttgctccagcccctgctcctgcaccagatgccaaggcctctgatgtcgctcccagcccaacctcagggaaagccgcgagtgcaaaggcgaaggcggaggagaagaattcatcgtaccaagtcagtgtcagcatcgtcaattacttggtccttgctgtctcaggtggcttgatgctcttgtggtgagaatcagaagttcctgaccatgttgaagcacagggttcggcttagcttccccgtgttaattttatatggattttctggattcattcttttggacatatagtaggcattgtgttaggatcgagttgttgagtgtttgcatcatatgcttctatgattaatccccgttgatactcggcttgatgcgtgtatgcagaaaatatttcagacatgccagtgataattctaatacctagagctagtgagtggtacagtggtacttatcatgcttgtttcataatgctgaaagccaaggcgatggtgttcaggactgaatcgattaatagttaacagcatactttggctactgaaaaaaa

SEQ ID NO: 37017 - DNA, 528 bp, Setaria italica
  Peptide Sequence Number=SeqID_102991
actaatcagcgcttagatgcaaaccatccaaattccataaacaacagctgaaagactaaatgtaaaagtgttactgctgccctatcagaagtacagacagaattgtgcctaattcaatgaagcaatgtacaagctgtgtctggctgcagatgtgcagaattgcagctctgcctcctaccttctgtatctctatcatacatatgctagtgaagtgccatgaacacaatcagatgaaaaatattccaaaaattgattacaagacatcctgaagatgcagagattgaaccgcgcgtcaggatcgtgttgctgcagctgcaccaatcatgtctccagactcagagtcgtctttgaattccacatcggtgaaacccaaagttctcgccaagcaccgcacaagctggtcatggatgacctcgtcggccgggagctccactccgtccccacctcccgccgcagcgacgtgacctctttgccggcgatgccgcatggcacgatgtggtcgaagtacccgagatcggggtcgatgtt

SEQ ID NO: 37018 - DNA, 368 bp, Setaria italica
  Peptide Sequence Number=SeqID_102992
aggaatataactgaaagacagcaaaatcatggaggaaatagacagactccaaagaaactgaaagagctgcaaggagagggccataatcatggtgtgaggagcttgtcacccagacaaatggctgcttcactgaagcggaagagcttatcagaacctaaatacccagagctgcaaatcccagagaacattgaagaattctcgatgtcgcagattgcaaaagcaacggataacttccactcaagaaatttcataggagaaggaggttatggccctgtttacaaaggaaattttggtggacaacgaccaagtggccatcaagatgctgaagcctcatggtagacaaggtttcccagagtatcagcaggagg

SEQ ID NO: 37019 - DNA, 1685 bp, Setaria italica
  misc_feature (1653)..(1685): n is a, c, g, or t
  Peptide Sequence Number=SeqID_102993
acaacgaaacttcctgcgtgctctgctgcacttccaccgccgctgcttcggccagctgctaagtaggaggataggccggccggcgggcaagctaaggaaggaagaagacgagcacaaataaagcagcagcagcgagcaagatgagcaaggaggcggcggtgaacgtgttcctgagctgcttcatgcacgtgggcctcgcgctggtgctcctcgtctacctccccatcgccttcgtctgccgcctcctcgcccgcgtcttcgtccggcccttcgccaggggcgaggacctccgcggcaaggtcgtgctcgtcaccggcgcctcctccggcatcggcgagcacctggtgtacgagtacgcgaggaagggcgcgtgcgtggcgctggtggcgaggacggagatcgccctgcgcgccgtggccaagacggcgcgcgacctcggcgcccccgacgtgctcgtcgtgccggccgacatcaccaaggtggacgaggccaagcgcgccgtcgaggagaccgtcgcgcacttcggcaaactgaaccatctggttgccaatgcggggatctggtccagctgcttctttgaagaaatcaccaacataaccgccttccataatatcattgatctcaacttctggggcgccgtctacccgacctacttcgctctaccgtacctgaaggccagccggggcaacatcgtcgtcacatcctccgtcgccggcagggtccccaccgccaggatgagcttctacaacgcgagcaaaggtgctgtgatacggttctacgagaccctgagggctgagctcgggtcccacgtccgcgtcaccatcctgatgccggggtacgtcgtctccaacctcaccaagggcaagggactccagaaggacggccatgtcggcatcgacgaggaggcccgcgacatcaatgtcgggccgctgccggtggggaagacggagtcgctggcggcggtggtggtggcgagcgtgcagcgcggggactactacgtgacgtggcccgggtggtactggccgttccacatggtgatgtgcgcggcgccggagctcctcgactggttctcccggacgttctacgtgtccagctccggggagccgcaggacggcggcgccgccctgagcaagaagatcctcgaggccgtcggcgggaagaagttcctctaccccaagaccatccgctcccaggccgccatggcagctaactgactgctagctggactcgttttccttcgtcaagacaagatgttagccacataaattgaatatattatacataaaaatgcatgttctgctgttggattggtacgggatgatctcaaaaggatgcagggtgaaatcaaacgggtgcatggggtcgacactgtattttttattcgttttattttcattttctctcatttttcttcctctttgattttatataagtgatcagtgtgatgtgaattaatacgaatgtttattggtggcatgagcgccccgtgatgaagtggggtgtggatgcaggttgcaaagttgatgtatctaaacgactgcattgttgaatttgaattgaagatgcagctaatgtgtcatcaataggtacctcgtttcttaagtgtataaattctagtttgctttttttttcgaaagaaataacttttttttnnnnnnnnnnnnnnnnnnnnnnnnnnnnnnnnn

SEQ ID NO: 37020 - DNA, 571 bp, Setaria italica
  misc_feature (490)..(571): n is a, c, g, or t
  Peptide Sequence Number=SeqID_102994
ttaaaagtaaaacggtaaacggttaaaggtgactgcggcggtggcggacggcggaggcggagcggagacgctgcgggactgcatgtgcgggctcgaggcgttcctgggcctagagcacgccggggcggaggagggcgacgacgtggaggcctgggacgccgtcgacctcatgttcgcctaggatagtaagattgtttagcttgtcggtaaataaaccagagagtgattaggagcaggctccgctagttgctgctgcctgctgggcatagctgcctctgcctggctagagaagtacttactagagatagtaccagactaccagtaatgtacgagcatcttgtaacgcttgatgactgaggcgagtgatcttgtgtatgctcacgctgggtcaccacgtggatgagtgacccattgtcatcgaggagcaacgttgttggtgaccttgtatgacgcgttacatgaatcatgaatgttgttagctcaaaaaaannnnnnnnnnnnnnnnnnnnnnnnnnnnnnnnnnnnnnnnnnnnnnnnnnnnnnnnnnnnnnnnnnnnnnnnnnnnnnnnnn

SEQ ID NO: 37021 - DNA, 447 bp, Setaria italica
  Peptide Sequence Number=SeqID_102995
caaacgcaagcaaccaagcccggagcacgaccggccaagagcgcggagccgagcccagcatctacaaaaatgcagcagcaggggagcggcggcggcacgggtagcagtagtacccccaccgccaccggcgggcgtaggcgcgtgtcggtgcggggcgcggccgcggcgtccacggggtccgcatcggtgtgggagacgcggatgaggatggacgaggtcaagggcggcgtcaaggtcttcagcgccgggggcgccgatgagcccgccgacgaggaggggatgcgggtgtaccgccgcctgcgccgcaaccagagcgagggcaacgccggcgccggaacgggcgctgcggccgccgcggcgaagaagcggcgcaactggaaggcgtccgaaccggtcaccgcgatcggggacctccgcaagtcgcgctccgacgccgccgccgccgtg

SEQ ID NO: 37022 - DNA, 432 bp, Setaria italica
  Peptide Sequence Number=SeqID_102996
ttttaggactacaaaatgatcttttccattgaccacacatagcaaagtagttttggggtacatatatagagatagacagaggtaggtagaggggcattttaggaaataagttcctactacatacatagataggatgcacatgcatcatcaaccacacccaacacacacatgatttatgctatcacaaacagcaacacaaataaaccctataaatattgttcgaacaattatagcacagaacaacagcatatgctgcaatgtttcagggcctgttctacatccgaaactccaatcagctgcatcagataatgtgacagcctccaagcttcctttttattactgcctccccagcagtaattttttcagtggacaatgtgctgcacttcaggacaaaaaacggcaagtagatcgaccgttcacacgaccgaaact

SEQ ID NO: 37023 - DNA, 990 bp, Setaria italica
  Peptide Sequence Number=SeqID_102997
aacgaacgaggcggccagcctcgtgcccggctccctcgccacggcgtgccctgttgagagaacgccgtccgcctcttccttcgtcatgtacaggggccccgggacgtggatcttcaccacttctatctgccgtcctttagcgtcaaccgattgggtcagaaccgacagcgcctcggctgaccgttcgtactgggggtccttctcgtcatccgtccacgacaggaggatgacgccgggtttaatgaaacagcacaggttgtcgacgtggccatttgtgtcctcgtcaccgtaaagtccacgaggtatccagatgacctttgtgactcccagaaaatccttcagctcgttctctatctctagtttagtcatgttggggtttctgtttggatccagcaagcattcttcggttgttatgcatgtaccttctccatcgacatgaatgcttccaccctcgagaaccattttgtgcgaaaacctagggatcctctcaatctcaactattttcttggcaatatcattgtcaagactccaatcgtcatagattcctccccaggcgttaaattgccaatctatccctgctattgtttgttttgtgattcctgactcgactttatgagtgataaaagtgggtcccatatcacggaaccaggaatcgttcatgtttatttcaatcaccctgatgttcgtatgatgttccatcagcttgtggacatacgggtactgcttggtacttgcacatattgtgacaggctcaaattttgaaatggcaattgcagctctcgcaaatgtctgttgagctggaccagcattgtcccgccagttgtctggacgctcaggccatcccatccaacactgctcgtgcggttcccactccgccggcatccggaaccccatcttcgccgggcgcccctccatgaccttcgccatcatcgtccctgccgctctgtctctgtccctccctctcctctctaaattaaccctcgaatcgat

SEQ ID NO: 37024 - DNA, 557 bp, Setaria italica
  Peptide Sequence Number=SeqID_102998
ttgatcaggtgcattcgcctactgatggcagcgcgcgggtgcgcgccccagccactagtccgtcactgttagcacttccacagcaaggaaggaagcggcgagcggccccgcgccctccacgagacactcccaagtcgagaggaggcggcggagcagcgaggcctcggccgaaatatcttctccatccagcctcggtggtcgtcgcggctgccggcgggagtcacgatacgacgcgatggcgtgctgccgggccctcgcgctccaccccctccccgcttccgctccccgcgcccgggttagcgcccaccggctccgcccttcctccgtgcgcgtgcggtgctgcgcctccgcgggcgaccgggcggagccgccccaggaggccgttctcaaggccatctctcagatagcaagctctaaaggaagggttgcacaaacaacaaatgttatcatgggtggcactgttacagatgacgcaacagatgaatggcttgttcttgataaaaaggtaaatacttatcctacagttagagggtttacagcaattggtacaggaggcg

SEQ ID NO: 37025 - DNA, 504 bp, Setaria italica
  misc_feature (456)..(504): n is a, c, g, or t
  Peptide Sequence Number=SeqID_102999
tgaatcgtgaagattcccttgctctgcatgagtgaagcttgcaaagcagagttgcatcatcctctttttggcgagggaattggaaggactagtatgacatgctagccaaggaagggattagtggtcagatgcctatactgaagttagttccatcgatgtagctcgagattcaaaaggagaactgtttaggtgcttggggaacccatgccgatgcaatgtcacatgtgagaccagtttgtttatagaagagcacaatatattcttgccacataggcagttgtattcgcatagaattggggtgatggaaaatggatactcccttcgttctccgttccaaaattgtaggttgttttagttttctagttcattgatattattatgcatctaaatatacactatgtctatgtgcacctagaaaagttaaaatgaccaatttggaacagaggaagtaaagtnnnnnnnnnnnnnnnnnnnnnnnnnnnnnnnnnnnnnnnnnnnnnnnnn

SEQ ID NO: 37026 - DNA, 1225 bp, Setaria italica
  Peptide Sequence Number=SeqID_103000
caagattccataatggctcgagctaatggtatagcacattagatgatcttgcacctaactcctccctctgaagtacccaaacaccacttttcaacaattcctctattctattttcttgtcggattttccactaccacttctatcaaaaaaaattcatagtactgtgtttatcaatgcacaattttcagacagaccttggactcaactgttacagatagatgcagcttgcttaattataagcatattaattacaaatgttttacatgctatgcacacttactacacaatcgtgttgtgctttcaagcctattgcgtatttgatccaaggcataaagtagcactcctccaaagcgtgacatgttataacttgttaaacactcacaactcgttcatttctgaaaacagagatagcaagctctaaaggaagggttgcacaacaaacaaatgttatcatgggtggcactgttacagatgacgcaacagatgaatggcttgttcttgataaaaaggtaaatacttatcctacagttagagggtttacagcaattggtacaggaggcgatgattttgtgcagtcaatggttgttgctgtcgaatcagttatcgaagaacgtattcctgagggtcaaatatcccagaaagtgtctgctaaagggaaatatgtgtctgtcaaaattggacctatccgtgtggtttccagcgagcaggtccaagcggtgtacaatgccatgaagaaagatatgcgcatgaaattctttttgtgaatgacaaataggttggagtgttgtacatcgaacagttgaatcgtgaagattcccttgctctgcatgagtgaagcttgcaaagcagagttgcatcatcctctttttggcgagggaattggaaggactagtatgacatgctagccaaggaagggattagtggtcagatgcctatactgaagttagttccatcgatgtagctcgagattcaaaaggagaactgtttaggtgcttggggaacccatgccgatgcaatgtcacatgtgagaccagtttgtttatagaagagcacaatatattcttgccacataggcagttgtattcgcatagaattggggtgatggaaaatggatactcccttcgttctccgttccaaaaatacccttacgttactaccgttaccaaaaattagttaaggtttagtttttaagttttttacttaagttttactaatttagtaatta

SEQ ID NO: 37027 - DNA, 221 bp, Setaria italica
  Peptide Sequence Number=SeqID_103001
acaatattacccatagaagaccagtactctatatgtgcacatatgctcattcttgcttcactgatgcacaggccaaatcaaaacacgtattcactgggcatcattgcaagcaacacactcgcatggactctacatatcctgctggaagccaagaattgtcgcgctgccccggcgttgccatcccttggacttgctgccttgatgcccgtcttctcaatcca

SEQ ID NO: 37028 - DNA, 379 bp, Setaria italica
  Peptide Sequence Number=SeqID_103002
caaaactattcccatagctcagatatggaagttcgaggaagcagcactttcaagcttggattctatgccaacttaaacgtgcaaaatattgcacaagaatggcttgttgagagcaggaggctgttttatctcagaaccgtcaacagtgtcacgaataacatctttaagggcaccactcctctacgggctgagaacctacaaaatgaactctcagaagatcgcaggggcttaaaccccccttccttgcataatctaagagagtttatatcatgcaagtcaattgtaaatagacatgaaaatactgaactggtcaggcatagtatgataaatcatgtgcaatcagtgttcccagtaactacaggtttcttgacctttttgt

SEQ ID NO: 37029 - DNA, 497 bp, Setaria italica
  Peptide Sequence Number=SeqID_103003
cctgggcacatcatcagttccctccacagcgacgtcggcggccgcctcaccctctgcgctcgggatccagccgctaccgccggggctcttgcctacttgcctcttggtcacgtccaacgtatccttgccgcctgccgctgccaatccggtcctggggtaatagtcctcgccgggaaccttgctcgccgccggcgtgaagctggtgtcgtcgatgaagccggggtagggcggcggtagcctacccccaccgctcctgaacgacgacggggtcctgcccgcccccttgtagtgatgatgcttgctggagccggtgaacttgaggagcaccatgtccttgagctgtgaggtgagagacttgacggcatctttgccgttaggcgtggcagcggcacgggagccgtcctccccgcctcccgttggaggagcacgcgatgcatgccagcatcttcagtttccgctactgctagtcacgctgctctctctctctctctctctct

SEQ ID NO: 37030 - DNA, 380 bp, Setaria italica
  Peptide Sequence Number=SeqID_103004
aagaaaggagacaaagcgcttaactatgatttcgagcagagcactatcaaatgggacacaaaaggtgtccatataaggtagcacaagacaacatgaagggaaaatcctttcaccagaaaatcaaatacagggcacctatttatggtaggacaacatgcaacgatacaatcagtaactccagaatgatatatttgaggcgactcccacaaatgggtaccttatgttctgaatttagatatatagaatccaggaacaacatcagagtgccagaacaagaaccaaatcaaaataacacaatgatacaactgcagcaaactcttttgccccaggaatgttgttgcaggacgcagcctaactaatggcctgtttggtagggctcc

SEQ ID NO: 37031 - DNA, 246 bp, Setaria italica
  Peptide Sequence Number=SeqID_103005
atgtcctaagtgtcctaaggtgttctgccacttccttcattgttggtctctgatctatttccagacagacacatttaagtgatagcctcccgatctcttcaaggagagtaacattactgccggtgacgatgtaatttgtagtcagcttccctcaagcgggctcaacaatgacccaattcatgatcagcgtgcgttgctcaaattgaaaaccgatgtgtaccagtttggtgttcttctcttgacact

SEQ ID NO: 37032 - DNA, 824 bp, Setaria italica
  Peptide Sequence Number=SeqID_103006
ttttttttttagtcttgtagatcacatagtatttctgcacattttatctgttcaggaaacaacactaccaacactgaacataaattttctacatctgttagcagaacaaattcagataataacatcatgtcatcgacagcgtgagatgcagagtgcacgctagttcagataacatcatccgactgacagcataattgcaaattgcagtgcgggcaagatgttctgataacaatacaacacatcacacacaatatgtacacgaggttcaatctctgatatctgaaccgagtagcctgtcgagtttagtgccttcagcatcggcgatatgagatttaattacagtttcagacaccagtgtagctcccttggccaaggacttcttccaaggacttcttccaagatgtcctaagtgtcctaaggtgttctgccacttccttcattgttggtctctgatctatttccagacagacacatttaagtgatagcctcccgatctcttcaaggagagcaatatcttcagcacgagctgcaatgtcatcatcaaacaatggccttcctctgttatctgcctggtaagctgcgcgaaattgtaagatgaggggttcgtgatccgcgtaaaatatgaagttcttcctactaatgagtgtcaagagaagaacaccaaactggtacacatcggttttcaatttgagcaacgcacgctgatcatgaattgggtcattgttgagcccgcttgagggaagctgactacaaattacatcgtcaccggcagtaatgttactctccttgataagcctccgagcccatgaaaagcctgtgagctt

SEQ ID NO: 37033 - DNA, 909 bp, Setaria italica
  Peptide Sequence Number=SeqID_103007
aattctagaatgcagcttaagaagagtttgagcattttcaaaaagaaatcgtagcaattctaagattctatcggagcctggcaatgtgagaattttcacacaggaggagctaaatgatgtcacaaattactcgtatttactcagtggaggtacttcaggtaaggtttacaaaggaacgcttgaagacaataccgtggtagcggtgaggatattttctgaggtacttgagagctttgaacaggcgtttatcaatggagggatgatcttatctcaaattatccataagaacatcatcagacttttgggctattgcttggatgctgattgtccagcttttgttctatgagtatgctgctaaaggtagtctctctgacattctagatggccatgaatatttcccgctacatttacgtgtgaagattgcagttcagactgcagaagcattagaatatctccattcctcagcaactggtatcatcagacatggttatgttgtaccatccaaaatacttcttgatgacaatttcacgccaaagctcacaggcttttcatgggctcggaggcttatcaaggagagtaacattactgccggtgacgatgtaatttgtagtcagcttccctcaagcgggctcaacaatgacccaattcatgatcagcgtgcgttgctcaaattgaaaaccgatgtgtaccagtttggtgttcttctcttgacactcattagtaggaagaacttcatattttacgcggatcacgaacccctcatcttacaatttcgcgcagcttaccaggcagataacagaggaaggccattgtttgatgatgacattgcagctcgtgctgaagatattgctctccttgaagagatcgggaggctatcacttaaatgtgtctgtctggaaataaatcaga

SEQ ID NO: 37034 - DNA, 732 bp, Setaria italica
  Peptide Sequence Number=SeqID_103008
gcaatggaagacaagcagcttctcgccgtggccgtggccgtgctgctcgtcgtcgtcctctgcaagcggcggaagcccaggcccaacctgcctcccggcccgtggacgctgccggtgatcggcagcctccaccacctgatgcgcagcccgctgctgttccgtgtcctgcgcggcctggcgcacaagcacgggccgctcatggcgatccgcctcggcgaggtgcccgcggtggtggcgtcgtcggtggaggcggcgcaggcgatcctcaagacgcacgacgccgcgttcgccgaccggttcgcccccgccaccttcgccacggccgcctacgacgccaccgacctgatactctcgccctacggcgagcggtggcgccagctccgcaaggtcgtcgtgcaggagatgctcaccgccgcccgggtgcagtcgttcaggcacatccgcgaggaggaggtggcgcggttcctgcacgacgtcgccgcctccgccgccgccgccgccgccgtggacttctccaagggggtcttgaagctcgtcaacgacaccttcgtgagggagtgcgtcggcagccggtgcaagtaccaggacgagtacctcgacgccatccacggggcgattcgcctgtcgtcggggatcaccgtcgccgacctctacccgtcttccaagatgatgcagatgctcggcacggcgccgcgcaaggctctcgcgtgccggcggaggattgaccgcatc

SEQ ID NO: 37035 - DNA, 617 bp, Setaria italica
  Peptide Sequence Number=SeqID_103009
atggagatctatgttaaccatgaagtatgcatgtccagaacagtgtttgacaatttgaaatctctcaagaagttgaaaatatatggtatacatcgggccaatacttgctccgtaattgctacattgtgggatcagaatgggttgactgtgtttccttcatcacttaggagccttcagttactgcactgctacctgcagccatcctttttgtccaagcagttgaataatctctcatcacttgatactctgtgcctgatggactgtgacacggttgagatgccctgtccaccggtaagcctgcaccaccttagaatgctgaaacaattgaacatttataaatgtgattggatcacatctttcgagggttcagaagcattggtttccctggaagaaatgaaggtggaacaatgttacgacttgggatatgtaccagttgtaaacaacatgccatctattcagaaattgcatttgatacgttgccctcaagtgatgtatttgtcgaatgctggctaccatacagcattgaaggaactggtaatagaatcttgcgatggactatcatcactcaaggggttgcgtggccttgtctcccttactaagttgaaggttacaagctg

SEQ ID NO: 37036 - DNA, 1055 bp, Setaria italica
  Peptide Sequence Number=SeqID_103010
tccttccttcctttcctcgtccccatcccttctccactccacgccgacgtcatggaggtcgaggaggagggccatcgccgccgtctccgtccaaggcgacgacgacggcttcttcaccgtcgacttggacccggacgactacgccgctgaatccgagtccgacgacgactctccgtgggagggcgcgctcgtctaccgtcgtgacgccgccgtccaccacctggagcatgccaccactctggagcgcctcggcctcggcgacctctcctccaacgactcccgcgcgcgtgccgccgccatggggctgggggcaccggaccagcctcagacccccgtcctcgtctccctcgacgtcacccgccgccgcgcccgcctgcgcctcgacggcatcgtgcgcaccgtcatcaccctcggctgcttcaggtgtgctgagccagcacctcaaggtatatttgccaatttttccctcttattgacagaggacccagtagaggaacctgacgtagttgacctcggcacgatatatgaagaagacactgctagcggtgctggcaccctgggtgaagacgaccaagatgtcgactgggatgaccgcctgcacttcccagcgggtgacaaggaaattgacatctccaaaaacatccgggacatcattcacctggagatcaccatggatgcagtctgcagccctagttgcaaaggcctgtgccttgcctgcggcgaaaacctcaacaccagcagctgcagctgcagcaaagagaagccacgggagcccaagaacgtgaaaggtccaggacctctcaaagagttgttgaaaccgatccagaaaagatgatgatgcaaacaccacatcttattgtaggtagtaatgagtttgtagaactagcagcctgcgttgttgtatgcaggacagcagcagtgcccagttactacatacctttaaaatttttaagggaattgtgtcaagttcagctcctagtatagaatgtactccggtgttgttgggcagcaaatggatatgttcaacgtgttacccaccttggtttggtaaaaaa

SEQ ID NO: 37037 - DNA, 797 bp, Setaria italica
  Peptide Sequence Number=SeqID_103011
aatgaatgcttgaaattatgtagtcttaaatttagtgcttatttgttgaaagtagttcatagtattgtcataaaggtgttacctggatcatatcagcacagtaatctttgcgcttagcttggtaacggtatttgtctatctgaaaggcagtcttgttggtatgaattatgacattaacagcaaggatgttaacaaatatccatgcatcaggtgaatcctgtttcacatgaacaatagtatctaaatgatagatgcttctattccagtatctaagacaactagagtaccaatggtaggacatggtagcactccagcttcattttcactagccatatgaaatagggcaggtgctttgctcttcaaaatggctgttgcttgctttttctttcagttttatgtgaacataaggagagcatatgcaatttcaagccaagtaactgaatctctatttcttgtgatacagcaactgaactggttactagatctattcgggtaatgatggaatttggctgtgaggaggtaaccactcttttcattgactttgaaacacgtagatgtgaaagcttatgatgtatcctagttttttatatccgcaccacatttattggtggctgtaaggttggtttataacctcaatgggaaaattggagataggattctcagtccgtagattaacacccagtttccatagaaacatctttcccagaacattctttaaagctgaagtatcttacatcctaattgcaaccaggtgacacttgaagcagaagttacaaacaagggtgccctcgctctgt

SEQ ID NO: 37038 - DNA, 672 bp, Setaria italica
  misc_feature (637)..(672): n is a, c, g, or t
  Peptide Sequence Number=SeqID_103012
tacttcgtctacctctggccgcagctcaccttcctcgcgttcgatgccaaggagggcaagtgcgtggggaacagtggtgtgcaagatgggggagcaccggggcgccttcaggggctacatcgccatgctcgtcgtcctcaagccctacagaggaaggggaatagcaactgaactggttactagatctattcgggtaatgatggaatttggctgtgaggaggtgacacttgaagcagaagttacaaacaagggtgccctcgctctgtacggccgtctgggttttatccgagcaaagaggctgtacagatactatctaaatggcgtggatgcttttcgcctgaaactattgtttccacaccctgatcctggcttgcctccgatgattgtcggcagcgaaagggatgaccagcatatagattcgccctacttgtgacagtaccctatgagtaggtagaatgtgttggagtcctggaaccccaaccttttttgcacttctgtttcaaagctttcacagctcacatgtaactgtaacattatttgtgcttacaaataacttttttgaggtattctatgtattactgcccctattttaagaatgctgcgaaattcgtaaattttaaaaaaaaaaaaaaaaaannnnnnnnnnnnnnnnnnnnnnnnnnnnnnnnnnnn

SEQ ID NO: 37039 - DNA, 333 bp, Setaria italica
  Peptide Sequence Number=SeqID_103013
aagaagacgtcgaagctcatgcagctagtcggctgcttgattgtatgaatgcgcatgatcgagtagctgatgaggctgccaaccttagggatcagcttgctgaggctcgtgaagcttatgcttctgagaaggaggagaagcctagcatggcagcctctctggccatagctatggtggccaaccggggtcatgctatgacccgagagaggattcgagcggacttccaggagttgttgagcgctgctctgatggtggccaatgtactcgacccgctgaggaaagtgttgagcctcgatccttagtcaagtggttgagggttagccccgggtatta

SEQ ID NO: 37040 - DNA, 1275 bp, Setaria italica
  misc_feature (1249)..(1275): n is a, c, g, or t
  Peptide Sequence Number=SeqID_103014
ttttgattgtgtcggggatgaggaagacgtcatccctgctgatgatggctccaagttggggctgccgactgctgccgcggaggctacttctactctagaggctactcccttgatggatttgaccgaagaggagtttattattgcccctgtttcggtggcatctgaaggcgcagatttggttgctctaggggacctgccaggggtagttgtgccgagtgtgggtaccctagttgtcattgacaaatccccggtcgacaagcaaggagaatctgcggtaagggaatcaacgggtactcgtgatgccgatgcggtcgataaccaagtacttgaattgccggcggagtcggaggttcaaggggtgatgcatgccgtcaactcttgtgttcgggacttgtatgactgagcgcagaagaatacccagcttcttcatgagcgtgcagaggctgcacttcgtgttgcccagcttgagagcgatctcatggatgaacgacgctcgtgggatatttgaagacccacgatgatgctgtcaagcttttgcttgagcggcgggaactcgaagctcaagtgaagaagcgggatgcccggtacaagtcgttgcagcagaagtgccaagagctcaagagcgtcgaagctcatgcagctagtcggctgcttgattgtatgaatgcgcatgatcgagtagctgatgaggctgccaaccttagggatcagcttgctgaggctcgtgaagcttatgcttctgagaaggaggagaagcctagcaataggacaagacctactactaggaccaataagactatggtggccaaccggggtcatgctatgacccgagagaggattcgagcggacttccaggagttgttgagcgctgctctgatggtggccaatgtactcgacccgctgaggaaagtgttgagcctcgatccttagtcgaaaggttgaggggtgccccgggtattattgctagtccctgcttgccagcaggtactagcaatagtgaagttgtactaaccgcgggcagatttgttcgctgctggagaggggatagctcggagttgcacggacgccaagtgggaacagtacctgggggaggttgaaccccatagctgctagaatgaccgagtatgtaacctctgatggtcagtagcaatggtagtcctgtatttagtgtcgagtagtttgtgatggactcgaacatattatttttgtcgtcataatcctgaacaatgactgtcttgaattctaactnnnnnnnnnnnnnnnnnnnnnnnnnnn

SEQ ID NO: 37041 - DNA, 543 bp, Setaria italica
  Peptide Sequence Number=SeqID_103015
ttcatctacaaatcaaaatctctccaggttggtcttgttgctatacttactgggacagtatttctgcggacacacttgtctaatgatagaactcatgctaacagttacatgagttcattgtttttcgcacttacttttctaattgtcaatggattacctgagatggctatgacaattaatagactcccagtcttttataaacaaagagactgctgcttctatccttcctgggcttatgcgataccagcatttttcacaaagattccagtctcattagttgaatccgtaacttggacatgcataacttactacctcattggttatactcctcaagcatccagattcttccgccagctacttgtgctgttcctcatgcattcaacagcactgtcattgttccgatgtgtagtctcttattgccaaacagcaccagtttcttctgttggtagtacattgttacttctattcattcttttgtgtggaggtttcgtcattccccaaagttcgataccgaattgtcataaaatctacttaattaggcca

SEQ ID NO: 37042 - DNA, 1159 bp, Setaria italica
  misc_feature (1135)..(1159): n is a, c, g, or t
  Peptide Sequence Number=SeqID_103016
ttttttttacagttatgcatggaaaatatttcaggaatggaagcccgacctgttttgatattttattctatgatacatctgatgcaattacattttgcaatcaactcaacctttttcattggtttgagtactattacatgatttcactatggacagtaaaaaccaagcagaagtcatcctgtataaatataagatttacatcaaatcggaaacaccaccagacttaccatgagaaacataccgaacacagtttaccaagcatggcatgtgaattccaattgccaagaacatggcaaccagcagctgcttcaagtgaccgcatcagcaaaaagaggaggtgcatcttgcgagccgttgagtgctggtgaagtatatgaacctgatggccttcaaggcatcaatgtcatgaacggataaatactggccttaagcgaagacatcatatctccgagcccattgaaattggcttttctaccacatctgcaaatcttatttgccgtggtttggaaggtttatgatcattctcctttggatgccctgtggcccagggagcttgtttcttcgagtgtacttgaattccaagaaaagatggcagaggtggcttattcgtcacggacggcaatgtgcgagaaagccatgattctgaaggtgatttcgggactggtaaagggagcagagattgcaatggtatggtttcctttttagcaacattattatcttctaaatgtggcagaaactcctgattagcatcacgcagcaaatcttttccatcatccagtgggaatttgggttctctaacttcagagatcttttcggtcaatggatcattgacttgctctttcacaatcgagttctttccaactatctgttgcccaccaggctgagaatcatacatgtttgcattcagagctacctttgtatccacaagcacacccaagtggcatgtttctgaatcagtatctccatggtgatccattgaatcttcatgccctgctccatctggtcccgagctcatggaacttgatcccttaaaactactatgatctgatccaaccaacgaggttcgatcatggtctctctcaagcgaaccagaaccattgctcctacttgccttatcatccctatctccatcctnnnnnnnnnnnnnnnnnnnnnnnnn

SEQ ID NO: 37043 - DNA, 614 bp, Setaria italica
  misc_feature (578)..(614): n is a, c, g, or t
  Peptide Sequence Number=SeqID_103017
ccgcggcggcgtctaagatcttcaactgcgtctccgaccgcgccgtcacgctcgacggcatggcgaggctgtgcgcggccgcggccggcgccgccgtggagatcgtgcactacgaccccgccgccgtcggcgtcgacgccaagaaggccttccccttccgcagcatgcatttctacgcggagccccgggcggcgaaggaggcgctggggtgggcgagcacgacgaacctgccggaggacctcaaggagcggtacgccgagtacgccgccagcggccgcggcgacaaggccatggccttcgacctcgacgacaagatcctcggcgccgtcgggattgtgccggccagcgccaccgtgtaggaggaagcaggcagtatcaaaagacaagtttttgtggatatatacacgctagcaggtcctcctggcacgtcgccaaagaggcaaagacgctacataaacacgagaaacagtttttttaagaaagtgcaatgaaagagagaatatatacgacatgcatgataatgatgctttcctgtaagtctttctgtaagtaatagaagaccgtgcagtttcggaacnnnnnnnnnnnnnnnnnnnnnnnnnnnnnnnnnnnnn

SEQ ID NO: 37044 - DNA, 520 bp, Setaria italica
  Peptide Sequence Number=SeqID_103018
gtttgcttcacccaaggatttcctagcacctcttcatcacttgattctccctgaactggtgaatcccaactcgaatcactctgtgaattctcattcttggttgatgatgcgtttccctctttcttcttgtaggttcgattgaaattaggtgcatcgtaacaagtaaagcggtctggctgagttttcatacgctttgaacgtctcaagtccacatgctcgtacaagacttcaacatcttgtgcactatccaattcatccatcacagtggtacacatgtcttctgtgaaattgtgcttcttaacctgagtgacttgaactgttatgatccttggacgtaaagcctcatcacgtggtttgaatgatattatgtccatgctcttgccaaaacctggaggtatgctcatggaatcatcactataccgctcttgatctcctttgatgatttgataaatgatcttaccttctaccaccttgatgttgtaatttcctatttaccccttactaaggtaacttaagtaaa

SEQ ID NO: 37045 - DNA, 710 bp, Setaria italica
  Peptide Sequence Number=SeqID_103019
tagaaaccaagaggcaacatgaagaggttggtcgaggggccgtgatccctcacgatcactgaagcttctgccagagctttcttcccattgaatctcttctcatcaggaatgccatcctgtcggtactgatccaactgcactttaacttcttctggagttgctttgtgtttcttaacaatcgctttcgcctcgtcatacaggctactccgagctccatgttcagataatgctaaagaagagtttgaacgccaaagaagggcttcaaggactcccaatggatctctccggaactgagattttgaatccacccagattgagtatcgtgccatggggaaaaggcggtggctaatcagcttgggaatttttccattcaaccgctgatctgagaaaggaagatcgctaacaagaatgatcctccataggccaatcttgttgtcttcaccaatcatgttgccttcctcctcttgagccgctcgagtgacttcatcccagaaagctacatagcaaacctttctgaaagagttttccgtcattcctattggctggtgaaggtcgtcacctccaccaaatgcacaggttgccacgacaactttgcagtatctcatatattctttgtcagcagcagaaactcggaaccctccattctcatcataaaagcttcaagaccaaggaaagtgtgacagtgcattgttggctttttattgtattgt

SEQ ID NO: 37046 - DNA, 391 bp, Setaria italica
  Peptide Sequence Number=SeqID_103020
acgaagggcgcgtggccatggcctagctcacaaaagaggaggaaccaatggcgccaaccgccaacccacgctgctcgagtgctcggaggtgtgcgacgactaacatggtagcgttgacaggacgtcggcgagcctatgaaccgtcggtgcgccgccggactgccgctcgccgccaaggaggaggagcggcggatggtcaccgccaccatgatcgtgaggaatgtcaggaggcagggtgggggaacgaagaagaagactccaccatgaatcgaccaagcaaagcaataattccttgtcccattgtaccatacacatagctgtagtaccttgtaccgaagttacccagtcaattgcattggtaatctgattctgatgaggacaaaaaaaaaaa

SEQ ID NO: 37047 - DNA, 383 bp, Setaria italica
  Peptide Sequence Number=SeqID_103021
atggtggacgcaggttggcttcttcgaagaggacactgacactcccttctgccgtcgagtaacagggtgaagagatcttgtaatgcatctgtggagttgtgcgtgcacatggccttattctgatattggtggatgcatgctatccattttgaagaggacattcactctagtttctgctgctcgagtaagaaggcgaggagatcttgcaaggatgatacatgaaaggtgaggagatatgataaggacaaggctacaaaggatcgaataagttgtcttgttgattaaacactgactactttagcaaagaatttgtgcactgttttcctttttctgtaggtagttgatggatgcagagcagggggcacgcacgccagcattctacg

SEQ ID NO: 37048 - DNA, 1859 bp, Setaria italica
  Peptide Sequence Number=SeqID_103022
ctggcgcgtggcccgcgcagcccgcgccgggtaccacaagcaccagctttgttgcacttgcgccgcgccgccagcttccccacgcaccttcgccgccgtctccgtgcttcgattccattgccttgtactagtacgctgccgtgaccccgcctccccgagctcccttgcagtgctactcgcctcccaccgcggccttctctgcagctcgcttccccccaccacgcggtccgcgttccagccgctagggtttcgggagctccaggcgagggccgcatgacgacgcggggagccaagcgcgccgccacctccgggccgggcgcccccgatctaccaagtaagagagtaatggacggaccctcttttgatgttcacagggcggagtcttcccatcagcatgtgatggcaggacccgctactttagatcctcgacgggctgaggctgccagcaaacatgtcagggcactcaataaccagtttgcgagctgggttcaattgcagctgcaaaatcatccagctgaactttgggaggatggtgtcaaagattacatatcccatgcttctgaaatcatggaaaaattcaaggatgttgtcaactggcttagacaaaatcaagcaggttcaacagttgtttcatccccaagtccacacaaggatgagaaggctaatctgccagcagttgtttcatccccaagtccactcaaggatgagaagactagtccgccaacagcagatgatagcaagctcttggtgcagccaagttcagataactcgcagaaggctccagtgatggcatctagttcttcagcttttcagagctcaagctcaccaacaccaaaccttttttcatctcctcctaagtcgcaaacgccagatttcagtggtatgtttggtggtaagaaaaacacatccggtgacagcaataaaccagctttccagtttggtggaaataatgtcatatttggtgacaaaaagaacgcatctggtgatagcagtaaaccacctttccagtttggtggaaataatgccatatttgatgacaagaagagcacatccggtgatagcagtaaaccacctttccagtttggtgtaaataatggtttttcaacctcaaatgcaccatctttattttctactaaagctgcccaaagttttagctcacaggctccacctctgttttcactgaatcaacaatcagttctatcaggaaacaaaaatacttctgaagcttcagctgatgcagatgaagatgccgaacctgagaaaccaagcagcccttctgtaaagaaggcagaagagaaaggaatagttgttgttcatgaagccaagtgcaaggtgtatgtgaagcatgatgatgctaccaagggttggaaagacattggtgttggtcaactctctatcagaagtaaagaaggtgcagagaaagcttcgaaagagtccactccgaccattgttattagaaacgatgttggtaagattctcctgaatgctttgatctacaaggggattaaaatgaatgttcagaagaatacagttgcctccatatttcatacttcggatgcgcagtcagatgaatcaagcggtggcacagttgtagctcggacatacttgttccggttgaaaaatgaggaggaggctacaaagttgtcgacagcaatcaaagagaacgcgccctcggactgactcttgcagcttgcatccttgtctcgcccctaagcatctggcacgagttggaaaagtagagggaaacaccaccgatggcctctgcagcaggccaaagagatgccttgcagagttctttttgcctattatagttacaccaagataaatattctcttgcttgtaacttgtaacgtgtaagg

SEQ ID NO: 37049 - DNA, 625 bp, Setaria italica
  Peptide Sequence Number=SeqID_103023
gcttgctggctttgtgtcatcatcattaccttgggcgtgcatttgacaagctaccatagttttgcccgaaacaattttactggctcagttacatccttgccgcttgctgctgagaagttggggatgcaggggtcctatgcattcttggctgatgggaatcgtcttggtggtcagcttcagcctagcatatttgacaagtgcaacaactcaaggggctttgttgtggaagtcagtgacaacttgatagctggagctattcctgcagaaattggctcgctgtgcagttctcttgttgttcttggtattgctggtaatcagctttcaggtgcgataccatcaagtattggggagttaagttaccttgtcagcttggatttgagtaggaatggccttggtggtgaaattcctacttctgtaaagaaattgccgcacttagagcgcctctctttggcccataaccttctgaatggcaccattccagctgatatcaatcagttgcatgctctccgggttctggacctgtcatcaaacctcctcacaggggttatcccctgatgcccttgctgacttgagaaatctcactgcactcctccttgataacaataaacttactgggaagattcct

SEQ ID NO: 37050 - DNA, 334 bp, Setaria italica
  Peptide Sequence Number=SeqID_103024
agctggacgcgcgtgttctttacctgctgcaggacatggagaagaacgcgaggccgctgcaggaggtgaacgacagggacatcagcatcttccggccaaagccccataggcattactaggtttccatattccagcagctttgctgtcagtgatgcatgagctgacgtggagacaccggtagttcagaggtcagagattgagaataatatgattatatgcatacgggtgacattcagcttgttggatacttggatgcatggttgagtctggaggagatgtatacggtagattattcagatttcttttgtaattctttgtacctttgttacatgaa

SEQ ID NO: 37051 - DNA, 500 bp, Setaria italica
  Peptide Sequence Number=SeqID_103025
aaaacgaaaacaaaaaggaaaacctaaaccaaataacgtaacaaaccgacggaccaacgaacaatcatggtgaggttacaacggacgaacgctgggaggctggtgatcaacggcacggtgtaccacctgaggcagctgcactggcacacgcccagcgagcacaccgtcgacggccgcaggtacgtcatggagctgcacctggtgcaccagaccacggagaacaagacggcggtgatcggcgtcttctacgagaccggcaacatccccgacctgttcctcaagacgctggagccctccatcaggcgcatcggggacacgcgggacagggaggagcccatcggggtggtcgaccccaacggcgcgcgcgccacgggcagcgtgtactaccgctacatgggctccctcaccacgccgccctgcaccgagggggtcgtctggacagtcttcaagacggtatgcttaaatcttaacgcttggatggctgcctctcgtgtcgccgg

SEQ ID NO: 37052 - DNA, 1206 bp, Setaria italica
  Peptide Sequence Number=SeqID_103026
actaagagacacctagttcaacgacgcgcagcacagcatgggtccagctcgtcgccacctccaccacgccgtcggggcggcgctcctcgccgccgcgctcctgctctccgctgccgtcccgggcgccacggcgcagcaagaaacagaggacgagcacgggttcagctacgtcccgggctcgccgaacggcccggatcggtggggcaagatcaacacgttgtgggccgagtgcagcaacggcgagatgcagtcccccatcgacctctccgacgaccgcgtcacgctggtgcgctccctcggcttcctcaactactcctaccgccccgccgaggcctccatcgtcaaccgcggccacgacatccaggtgaagttcagcggcgacgctgggaggctggtgatcaacggcacggtgtaccacctgaggcagctgcactggcacacgcccagcgagcacaccgtcgacggccgcaggtacgtcatggagctgcacctggtgcaccagaccacggagaacaagacggcggtgatcggcgtcttctacgagaccggcaacatccccgacctgttcctcaagacgctggagccctccatcaggcgcatcggggacacgcgggacagggaggagccccatcggggtggtcgaccccaacggcgcgcgcgccacgggcagcgtgtactaccgctacatgggctccctcaccacgccgccctgcaccgagggggtcgtctggacagtcttcaagacggttcgccatgtggccaagtaccagctggatattctcagggaggcagtggctgacggctatgaggacaacgcgaggccgcttcaggaggtgaacaacagagacatcagcatcttccgccctaagccctttatatggaagtaaacattactagcgatagatgcatattgggctgaccaacagggataccacatcgcgacagcttattatggcagacgactaatttatcttgtaattctctctatttcagtgcctttctatacgaataattaataaaacacaggatcatctatgtccacattgatgaccttgcatggatgtttagaagaagtttttttacattgaccatcatgttgatgtggagatcgattggattaaatagtaggaccaaagtaaccaagactaggaataattactacaagggaaggacaagtaggactagaacggactaatagaaggaaca

SEQ ID NO: 37053 - DNA, 466 bp, Setaria italica
  Peptide Sequence Number=SeqID_103027
aagtaggactaacaaatagaccaaaagaaaactagaggagaccgtcttcacttcatttgttgatgctgtcacttgttcttgaggataagtccaaacaggattgccaccatcaacccaagcaaacacaagataaacccatacaacatcttcttgtcataaccatcactcctgatcctattctccaaagtagagcaggttgtctgagcaagaagagtcctcatggttagttccctctcgagcctctccttctccatgatgaggttctccttctgcctggcccagtcttccttctcactcatcaaagcttctttctcttcatacatctcattccttagctgaatttccgccaacagatcaacctggagatcatcagccttcttcttgaaattgtcaacaacttcccaaatgtttgcagcaacctcctggaacattgccagacacttgtcgtccttccactcaatgaaat

SEQ ID NO: 37054 - DNA, 604 bp, Setaria italica
  Peptide Sequence Number=SeqID_103028
acaccgacgcgtctcctctgttctctctggtttgcgagcgcggtcggaggagactagggtttcgcggcgagatgtcggcgtacgacgaggtggagatcgaggacatggagtggaacgcggagctgaaggcgtacacgtacccgtgcccctgcggcgacctcttccagatcacgctcgaggacctccgcctcggggaggagattgcgcggtgcccctcgtgctccctcttcctcaccgtcgtctacaacgccgaggacttcgccgacgccaaggagccggcccacaagccgggcccgagcccagtcgccgtcgcctgaggccgccccccctgatcggcgagatgaacgcattggattgatctcagggcaggaaaaggaatgagtgttaatgtttgacatacacgggagcatttgtactaccatcactacttagatgagtgggtttagaggcatactatcaaagcttcggttgttaaattatcttgtttgtatgggtgacccgctattgtaaggtgacatgaacaactcgtgcttcgaaaattttgtttgtgaattgtcttgcctcggtcactcattagcaagttacaatcccgattgatcttcaa

SEQ ID NO: 37055 - DNA, 622 bp, Setaria italica
  Peptide Sequence Number=SeqID_103029
gcacattctgggccttggttatttgtttccttgcctgtatccgactggaagcttctatgtgggtcaatgttgtgtggttaccattataagtttaattttatttaatgtgacaagacagtgagaccatgttatcctgtatatacttaccaaaaagatttccaagagtagtaagatgtacaattcatatggcttggttcacaccgtgaaacttagtatttgctttcaagccgattggttcacaccagacattgtattctacatctttgctgcatgtgtagtcttgcagtgttatcatgttttttggaaggaccactgatgtttcgtatttgaatcctgttgacattattttatattgcttgcagaacgcattggattgatctcagggcaggaaaaggaatgagtgttaatgtttgacatacacgggagcatttgtactaccatcactacttagatgagtgggtttagaggcatactatcaaagcttcggttgttaaattatcttgtttgtatgggtgacccgctattgtaaggtgacatgaacaactcgtgcttcgaaaattttgtttgtgaattgtcttgcctcggtcactcattagcaagttacaatccaaaaaaaaaaaaa

SEQ ID NO: 37056 - DNA, 544 bp, Setaria italica
  Peptide Sequence Number=SeqID_103030
aaagagaataccaaatatttaacattgccaaacttcatattacaacaagattagtttgatgcctaattgtggtgaaaatacaagtataaatttcattttaagtccttttcacggaagatcttctgttttccgcatggcatttcaacagcaggttatcaatcttcatctgcaaataagtttgctaaaagatacagatttgcatatacctttatctgcacattttatgacagtacagtgctattaccagaaagtcaagggcgccaagggccagccctagaatagatgggtcaaaggtcaaattgtgctacatatacatgctatactgtcattgcacatttctcatatcaagttcgatcataccaaaatactacaaccatgaatacagaaatgcagcaccaatgtcattccacatcattacccgcgagtcaggcccaagacacagtgtcaatcaagtcaacatgttcttctggcagaatatttagctgaatgatttaatcatgtttgcttcaggattgaataaaggtatgcatttaataatctaata

SEQ ID NO: 37057 - DNA, 1072 bp, Setaria italica
  Peptide Sequence Number=SeqID_103031
ttttcccacactggaattccatctcactatgaatatgcaactagggattacaatagctgttcacaaatgcaacgagttactttataaacagttaggctgtaagatagaaaagaatgaaggtaataaactgttgctgtttgctccttaagttgagagagcactgcagggcctctctacggtgatgttacacatctgcagctctctaaccatctgaccaacgaagagatactatcagcaagggcatttcctgaacaaattatgcaaatacatctttcatgcgtgcacaaacggtactaatagcgtgtcgtttacaaggaaccgaagaaataaggagatcttaggacgagcagcaagaggtcttctggttgacaggctgcccgcggatctgcacggtggctggccttgcgtttgacgcggctggttggctggccatcctgtccttgatggatgcagccatagccatgaaggcctgctcgacattgatggcgtttttcgcactcgtctccatgaatgggatgcccatctcatcagcaaacgcctttgctgtctcagttgccacaactttgttggcagttagatcactcttgttcccaacaagaagcttgttaacactgtcgcttgcataacgatcgatttcgtttaaccattgcttcacattgttgaagctttcttggtctgtaacatcatatacaataatgattccatgagctcctcgatagtaactgctagtgattgtcctgaaacgctcttgcccagcagtatcccaaatttgaagctttatggttttcccatcttgctctactgtccgaattttaaaatcaactccaattgtgctgatgtagctgtccagatatgaatcatccgcaaatctgagaagcaagcaggacttcccaacaccagaatcaccaataagcaaaagcttgaaaaggtagtcgtactcgggattcattgtcgaatcaaatctggcggaatcgctcgcctgccgcgggttcgaacggagccggagggagagggcgcggtccgaacgaattgatggatctgggggaggaagaggaagggacgcgggggggca

SEQ ID NO: 37058 - DNA, 625 bp, Setaria italica
  Peptide Sequence Number=SeqID_103032
agggtcaagacagccaccagagatgacgacacatgctgctccacttcacgagtagcggacaagggacattgcaccgtgtacacagcggatgggaggaggtttggcgtcccattgccatacctcagaacaatttttgaacgtaaaaaaaaattgaaacgtacatacctcagaacaatgatcttcagtgaactgctgaggatataccaggagtatgggtttgcaaaggatggcaggatcacaatgcattgtgatgtgacaatcgtggagtaggccttcctgagctctttagagatgcctcaagtcatataacgccatatgtggcacagcaatttgaagtttgttgttcctgaacatatgcaggattttgcatatcttgatgtaatatactttggactcttgcatgtaaagtactctgacatagttggaaggaaagaaggcaattttatatttctatcaaccacaatgaactggccgcattattccttcctagaactttgagaatgttgtagtaggagcctggcaaaccaataccagagcgtggcgtggagaacaactggagatggcgctccaagccgacgacctgacgcgagaagcactcaagcggacgacgctagcgccgccgccg

SEQ ID NO: 37059 - DNA, 259 bp, Setaria italica
  Peptide Sequence Number=SeqID_103033
aatttacaaataaatatcctgaccagattacacaacacacatccatcacttatctaacaacaacaacaacaacaacatagcctttcagtcccaagcaagttggggtaggctagagttgaaacccaacaagagccacaaatcagggtttaggcacatgaatagctgttttcacatctatcacttatctaagatcacaattaaatgagagttcactgctaaataattattttttcaacagatatagaaaaatacataacca

SEQ ID NO: 37060 - DNA, 246 bp, Setaria italica
  Peptide Sequence Number=SeqID_103034
gctcaactaccacacctcaccaaactttcgatgggtgcaaatcaccttgttggccctattccagctgttcttagcaatctcactggtcttactctactagaccttggttccgacaacctgacaggtgacattccaacagaattaggcctcatgcaaaaactttcttatctgcaaatcatagacagcatgctgacaggtccgattccatcttctcttggaaatttatctgaactgtctttcctagat

SEQ ID NO: 37061 - DNA, 379 bp, Setaria italica
  Peptide Sequence Number=SeqID_103035
ctcaagtactgcaggttctagaaaggtaggacccaacaagtaggtggggatttcaccatacaggtggttgttggagagatcaagtgtcttgagatttgcaagcttgccaatctctgccgggattgggccagtgatgttgttgttctgcaggagaacaatctgaagattggtgaggttgcctataattggggagagcatgccggagaggctctggcttggggcctccagcccagtgacgagcttgtccggcgagcaggtgaccgttggccagctgcagggatcggcggagtccttgtcccagctcttgagcatgccatgggggtccttgagctaggttttttatcgccatcagagcttgcacttcatagttgacgcccgt

SEQ ID NO: 37062 - DNA, 1669 bp, Setaria italica
  Peptide Sequence Number=SeqID_103036
cgaccttgaacttgtgagagtcggcgcactgtgaggcctcccaccgctctgcaaggccatcaccttccagcatccggaccacctccgacatcttgggccggtgcccgggaaggtactgcgtgcacagcagcgccacctgcaccatctcctccagttcgatcctgtcgtacccgcccttcagccccttgtccaccagcacgtccagcttcttctcctggtgcatcttcttcacccaatcaagcatggctcccttctggtttgccgcctttccaaactctagcgcggtctgaccggtgattagctccagcagcaggatgccaaagccgaagacgtcggtcttttcagaggattggccagtggagaggtactcaggcgcaatgtgaccaacagtgcctctcaccgcagtggtgacatgtgaatcccggtggtcgaggagtttagcgagcccaaagtcaccaacaatagcctcacagtagtcatctagcagaatgttggctgctttgacgtccctgtgtatgatcttggggtcacactgctcgtgcaggtagagtagccccctccctgcgccaagagctatcctcttcctggtcgcccagtccaaaggtggctttgctttgaggcgcgacgcaacgcttccatttgacatgtatgggtagaccagcagcctctctgtggcggtcatgcagaacccgtagagcctgagaagatttctgtgcagtgccaagctaatcatttcaacctcagtctggaactgtgcctcgccaccagcagcattgccgtccttcagtcgcttgacggccacaagagttccatcagggagctgccctctgtaaacatatccgaatccaccttttcctagtatgttcttgctgctgaaattgtctgttgcggactgaagctccctgaactgaaacctcttcacatttccaagactaacattctccaggtgttggtcatcaacatcaaaaaggatctgccggtttcgacgatggcctccaccagaacacaaatccagcagcgaggaaaaggaagctgatgcaaccagctgctgtaccaaatgcaactgcaaacttgtggcttttagattttgccggcggcagagcaccctgtgagctattcaggttgtaggacattggcatcggtgcagtcccgtagcaatctttctctgcgtttgcgccacagatgaggggattcccaactatgttgaatgttcttgccaaagaccccggtattggaccactcaggttattgtatgacaagtctaggaaaacaagctgggacaaattagctgatgccgaagggaatggaccagacagggtgttgttgttgagcctcaagtactgcaggttctgaaggtggcccacagtggtggggatttcaccatacaggtggttgttggagagatcaagtgtcttgagatttgcaagcttgccaatctctgccgggattgggccagtgatgttgttgttctgcaggagaacaatctgaagattggtgaggttgcctataattggggagagcatgccggagaggctctggcttggggcctccctgcgaagcaaccaaacagcaacagaacactggtaagaacacaaggggataagcattaaaagcaaggtagagatgaggaggaaggaagtggctttgttacagcccagtgacgagcttg

SEQ ID NO: 37063 - DNA, 399 bp, Setaria italica
  Peptide Sequence Number=SeqID_103037
ccgtgttcgtcttcctcttcgtcgtcgtctcgtctcccctcgcgtggcttgccggccgaggagcggaccaggcgccggaccctgaccggccacggatccaccagccatggccgacgctcagactcctggaggttatttcttcggccgtccggcgaactacgaggacaatcagcaaccagttgctgccgatggacagaacacagggagcactcctgggaaccatgggcagcagcaaccaccggcgtctagtgaccagaagaaagccggcatcttcagcaacctattttcatgcttctccggcggccgagcggagagctagctgcggcctgagggcgtgattattcgctctcttcaaaattcgagcaccacttgttactgtacctcaactgcaagctctgc

SEQ ID NO: 37064 - DNA, 637 bp, Setaria italica
  Peptide Sequence Number=SeqID_103038
tcgtcttcctcttcgtcgtcgtctcgtctcccctcgcgtggcttgccggccgaggagcggaccaggcgccggaccctgaccggccacggatccaccagccatggccgacgctcagactcctggaggttatttcttcggccgtccggcgaactacgaggacaatcagcaaccaccggcgtctagtgaccagaagaaagccggcatcttcagcaaccgattttcatgcttctccggcggccgagcggagagctagctgcggcctgagggcgtgattattcgctctcttcaaaattcgagcaccacttgttactgtacctcaactgcaagctctgctattgggaagctgttgtgtttttcttaggcgtttcatactacctgttcattactaccacaagaactgcgattgaatgtaactattcattctaaatttcagagtccccttttgttttaaacaaaaaaaaaaaaaaaaactgctaatttggcaaaagttcagttcaggatacggtgcatcattcagctaagaaaatacagtagcacgccacaggcgtgacattaactaagccgaattatactagtttactaaaaaatcaaagttgttcgattaacttggaatgaaaattataaccagatagtcaaa

SEQ ID NO: 37065 - DNA, 547 bp, Setaria italica
  Peptide Sequence Number=SeqID_103039
aggtgtttcgatgtggtttgagcctcttccttgtcgagagtccactgaccccggcagtcgttgaaggccctgaatgcctccgcttccgctatgtgaccctccgtccatcctccggcgacgtggccatggacgagcttggtgatttcatgcgatgacttggaggactccatgcaccagcgctggtcgagcaggtccgtgccgaccaggcaggtcgccatcttcatgagccacgagtgcttcctgttccgggccaagtaccctacgaggttgtactgcgcaacttgatcgggccaccggttcgcgttgagccgccatcgcttgatcttgtcgacggattccatcacggcagggatggcacactccataacaagagcagaccatagcaaggcatatgtgatggtgacatcgatgtggttgtacgcgtgactactactgtggtagaacagaccgatcgcccacagcagtacaagtgcggctaccgtccgtataccaacagccgaggtaaggatcttccagcggttcatggcgacgttattggtcatgttca

SEQ ID NO: 37066 - DNA, 1060 bp, Setaria italica
  Peptide Sequence Number=SeqID_103040
tatagatatgatgcattatttattcttgctccaacaatatcaatctacgacactttatttattctgcattattgccccagatgaaaaatcaaactgaaacacaatgaaggtaaggtaactagtaactgggggcgttggctagcagtgcctgtgcttgtgtgtcgtatctgaacccttggctcctggaatgatctgcagcccagatgaagataccgtagagcttcccctgcgactgcagagtctggcaggcgtttaacgacgtgttaatcggcactgatgtcgtcgtcggcgccgtggtgaagctggcgaggatgttgcctcctgggtagttggcaatctggttgtcgaagtggctcacatactgcgcctccgttgtgctcgcgctgtacgcgtagaactggaagttgatgtagtcgatgacgctcccgtagctgttccacagggcctggtaatggcgctgcacgtcggcgttgtcgaacggggcgatggacgccatcttgatcaccccgttgctcttgagcgtcgtcaccaggcggccgacgcactcggcgaaggtggccgggtcgacctggaactgctcgtagtcgatgtcgatgccgtcgaggttgtactcctggacgatcttggtgagggaggagacggcgttcttgacccaggagtcgacggaggtgatgttgaagaacaccggccggttgttcacggtggcgccgccgaggctgacggcgaccctcacgttggggttgctctgcttgatggaggcgacgtcggaggcggtcaggaccgtgttctgccagaagatgttgaactggccgttggtcggagtcggcggctgcgtggcggtggtgtagtcgatgacgaaggcgaagatgtagtcgaactgaacgttggggttgatgggcacgtcgctgaactgaactccgttgaagatggcgccgatgtactcccggaagtggttggagtttgctgctgtggtcattggggcatggagggccagaagagcgagtggaagaagaactgcctcaaggagctttgaggatcccattggtagtctttttgaaac

SEQ ID NO: 37067 - DNA, 347 bp, Setaria italica
  Peptide Sequence Number=SeqID_103041
tttaccgttacggtaagtaattaattaactaaattgtaaggtcttgtcttgcaagcggaggagcttttccggaaggttctggagggcgggtcgaagaagaaggcggctcggctgctcggcctcgacgttggcagcaagtacgtcgggctggccgtctccgatgagaagaacaggatcgctttgcctctgagtgtcttgagtcggacaaagacaaacatcaacttgatggcagatgatttcaaaacattggcttcgaaatattcccttgctgggtttgttgtgggctatccattcaacctgcatggtcaacatacttcagatggagttcaagtaaggcttctgctgga

SEQ ID NO: 37068 - DNA, 376 bp, Setaria italica
  Peptide Sequence Number=SeqID_103042
caaggaaaagatttagtagttcattagtaaaccaacgaggaagcgctaatacaaatatgcatgcagcataactattgagtacactcaaagagtcacgatatgaacagcaaaaaagaggaaaagaattccttcctattccagagtcataccaccatggagagataccttacagacacaaatactgaacttcatacagaagcttaaaacttccaactgtaagtatcaatattaatttgtagaataataaattaactgaagaacgaaacagtgggaatggctagcatagagcctgggaggaaaacaaaaaagtaaaaaaaaaaggattgtagacgacagagtaggtggggattggataacatgttcatatttgtagcca

SEQ ID NO: 37069 - DNA, 912 bp, Setaria italica
  misc_feature (1)..(11): n is a, c, g, or t
  Peptide Sequence Number=SeqID_103043
nnnnnnnnnnngaagtacaaaaggtatttttttttttttttaaagggttaaagctttgtcatgcttgtataattcacaaaatggcgcagcctgattcagtacaatgcattggaattcagggattcgaatcaccaccacaagtgaagccaacctgactaaaacactcccatcagtttaaatccaaatgttggaatgtcatttccccaacttttggactcactcgcctaaaatgggtgccaaaaaagatatgagatcaacgcctaaaacttcccttttagggtttactcaatctcttcttcagctcttgaacaaaatccttcctgtcaacctcttcttcctggttggctttaacatccttcaacttcacacttcctttctgcatctcagactcaccaaccagcaccatccaaggaatgcctgattgcaaggcatacttgatgtggttcgtcaccctggtagtgagcttgaactctgcctttattccagcactccacagctcgctcaccagctcagcagccagtgtaaggtcctttccaaggattgacaccagcacctctgtctctgtagcacggatcgtctcatttctttctttctcctgttgctccatgattgcaaagaccctctctattcctaggctgacaccaacagcagggatctgcttaccgctaaacatacccacaaggttgtcataccgaccaccagctgcaatggagccaacctgtgtggcacccttgaacacagcttcgtatataacaccggtatagtaatcaaggcccctagccagacttaagtcaaaaacaatcctgtctaacgcatttgctttctccagagctttgaataatatctcaagttcattcagtgcaacaacagacccttcgttctgcatgaacttgctaccctccttcctcagct

SEQ ID NO: 37070 - DNA, 1725 bp, Setaria italica
  Peptide Sequence Number=SeqID_103044
tctgtctctgtagcacggatcgtctgcaattcaagatcgcacagttactgcaagtccctttgaaacaggaagggtaaaatggtgattgagacatagctatacctcatttctttctttctcctgttgctccatgattgcaaagaccctctctattcctaggctgacaccaacagcagggatctgcttaccgctaaacatacccacaaggttgtcataccgaccaccagctgcaatggagccaacctgtgtggcacccttgaacacagcttcgtatataacaccggtatagtaatcaaggcccctagccagacttaagtcaaaaacaatcctgtctaacgcatttgctttctccagagctttgaataatatctcaagttcattcagtgcaacaacagacccttcgttctgcatgaacttgctaccctccttcctcagctccagcaaaacttccaatgggtgtcctctagtcttcactaaattgccaatttcatctgcagtttcatttgatatacctttctcatccaccagctcctttttcacttgttcaaatgtttgcttgtccagcttgtcaatgctcgagcaaactgttctgaacttttgagcaggcacaccacaaatttctaacattccatcaagcaactttctgtgatttaattttatctcgtatgttccaatatccagctgattcagcaattcagtcaaaactttgatgacctcaaaatccggttccataggttcatatacaccagcaatgtcaaagtcacattgatagaattcccgataccttcccttagatggattatctctcctatatacttttgctatttggtatctcttcagtgcgcttatgttattcatcgcaacatatcgggcaaacggaacagtcagatcataacgcaaagagcaaagctcaccaccctgatcagcgaggtcatatatcaacttcgaatcttcaccatatttgcccataagggtttctctcagctcaaatacaggtgtatcaagagcagtagcaccgtgcatcttgaatacacctgttataattgaaaatgcacgctcccttatcgccatttgctctttcccaaagtcgcgtgtacccttaggaattttaggcaacctccttacttcattgctctcaacaatctccttcaccttctccacaaggcactccaagtccgggacacttggggtcaaacaacaatgagagagaggtcccccactctgcaaccaatgcagaattcacggaagcaatagcacctccattgtttagatggtccttaagcagcatcagcacagcagaagtgcccttccccagagttttcttcttcttgctcttcttgtcacccttcgctttctcaccaccagcctgtggcttctcagctgaactgcccacttcgttctcaacagcagcttggggcttctcaattgaactgtccccttcgatcaccgccattgccacagctgcctcccaagcaaggaagtccctgaacttaagcaagtggttgtacacccccttcaggaccgacactgcatctgaatcaatcaaaaccctgtcaagcatccccttcaaatcatcaatgctgacgccaccagtaagtttctcccgaagctcagcatcagcaatgctctctgcgcagagtcttgcccgagcaacgctcatcttgcacaatgcctgcactgctctcgcgagctgcgtggccagcacaaccaacgcctcctcctttt

SEQ ID NO: 37071 - DNA, 461 bp, Setaria italica
  Peptide Sequence Number=SeqID_103045
taccacacagcataagagaatcaagaatgagaagtctagcatcaaaatgctttgcaagctcctttgtcaatgtttcctgattcatttcagaccctgatggaccagataaaagaattcgctgatttagagaagaaattttttgtaaacatttattgaactccctttccatgtgtatgaatgcagataacaagagcatctcctttgtactctcactgagataatatgggaaattatcaagggtaacatcaatatcctcggggctaacaattccttgtttcaacccatccttaaaggcttgccatgcgctcagagatgaagtggctgatggattaggatcactctgatttttcaagggcttcaaaattcaccagtcgtgtcagacctcatataagattggtcctacaatatcagaactggtcttaccttagctaacttaccagatcctgctctagtaacttcag

SEQ ID NO: 37072 - DNA, 253 bp, Setaria italica
  misc_feature (186)..(186): n is a, c, g, or t
  misc_feature (210)..(210): n is a, c, g, or t
  Peptide Sequence Number=SeqID_103046
gggactagggcttcgtgagcgctctctctccctctccccccttttcaaaattcgtctcaaacttgtaccagattgattgattcaatttgctgctgcttcgcttgcttccgtcccaaatccacaggctcttcctgctgctgctaccccatccattgcagagccatggcgtcctccgtcgggggggcncgaggagtcgggcccccgggggtnacctcctcctccgccctcccccgcctccggccggcgctggcgc

SEQ ID NO: 37073 - DNA, 278 bp, Setaria italica
  Peptide Sequence Number=SeqID_103047
gcgcggcgcgacggcgcgcgcttgccgaggagcttcttcttcagcttggtgttccagtagttcttgatgtcgttgtccgtccgcccgggcagctgagctgcaatgatggaccacctgcttccaatgctaatgtagaggctgcaaatgatatgctcctcttcttctgtgaagtcaccgtgcttaatgtttggcctcagatagttgagccatctcagcctgcagcttttcccgcatctcttcagcccaatcttctgcggcagcgcgatccagttgcccgg

SEQ ID NO: 37074 - DNA, 408 bp, Setaria italica
  misc_feature (1)..(1): n is a, c, g, or t
  Peptide Sequence Number=SeqID_103048
ngtacagaagaagcagcaggattttggacagggcaggtgcctatgcaatagtcagttccactcccaactccccagaatatgctgagatcgagacttacaaggctagtcttctgaaggcgtttgatcagctgaagtcatgacgctgcaatgccaatgactacgagagttgattcagcaatatgttttggcggccaatgccctagattttgagtcgacaggaattatatcgagcacatcctggtggcctttctttgaccaggcatcggtttgttgctgggaatgtatgtcttgtactttgttccaaacaggcagcactttttttttgcccttttttgcaggccaataataagagctgactttgccttttaggctgttaacaactaccgtttaactaacttacctaaaaaa

SEQ ID NO: 37075 - DNA, 906 bp, Setaria italica
  Peptide Sequence Number=SeqID_103049
tgcatcattatggattctactgcctgctggcatgtttaaccaatactacattttctgcttcgccaattcactttgttcttctcatgaacttttgagtaagatctttgagcgcttgcctcgagttaagcacaacttgatcctcactatcaggaagatcatcgatagcgcccgctaccagttttgcatgttcagcagcaagagacctcgtcctctcgattccctgactttttgaaaggtatttgagggcctacaagtgtaaaattgagcagttctgagaccacactagacaatttttgagcatttcacaacccaaatagttggattatattactggaaacaaagaaagtacactttcctttcaaaaaaatacacttgcaatacgaaccgtcttataacatttaaagggtcatcaaatcccgctcaacaatctcatgcagttcagggaattcttccatcgcaaaaagtacgcgagctatcacaattccttgatggatatcagacaaggaggctttgcctagtgaagctgatgtgcctgtgaaatcaaggatgtcatcgatcaactgatatgctatgcccaagtgtctgccatactgataagcaagagcttgtacttctgttgtttgctcagcgaggacagcaatagctttgcagctgtttgaaatcaaggcagctgtcttgtagtatgtcttctgcaaataataatccatgctgtacaagcatcaatgaacaggtgtcacattaagtaaaatattaggaagtgttgattgtcatggcttgatgaactcatctagcattcctttcttttcttcattctgcagcgctgtgctggagttattgacatctgcataagctcaccagtaacaagattatttacagcagttgctagtaatgatacaacctcagtat

SEQ ID NO: 37076 - DNA, 1367 bp, Setaria italica
  Peptide Sequence Number=SeqID_103050
caaatgcatgatgcattgttacatttttaaaagaaatgatgcatcattatggattctactgcctgctggcatgtttaaccaatactacattttctgcttcaccaattcactttgttcttctcatgaacttttgagtaagatctttgagcgcttgcctcgagttaagcacaacttgatcctcgctatcaggaagatcatcgatagcgcccgctgccagttttgcatgttcagcagcaacagacctcgtcctctcgattccctgactttttgaaaggtatttgagggccgtcttaacatttaaagggtcatcaaatccctgttcaacaatctcatgcagttcagggaattcttccatcgcaaaaagtatgggagctgtcacaattccttgatggatatcagacaaggaggctttgcctagtgaagctgatgtgcctgtgaaatcgaggatgtcatcgatcaactgatatgctatgcccaagtgtctgccatactgataagcaagagcttgtacttctgttgtttgctcagcaaggacagcaatagctttgcagctgtttgaaatcaatgcagctgtcttgtagtatgtcttctgcaaataatagtccatgctgcagcgctgtgctggagttattgacatctgcataagctcaccagtaacaagattatttacagcagttgctagtaatgatacaacctcagtattgtcaagagacacagctgcagaaaatgccctgaaaagtaggaaattgccagccaatactgcaagtttcttccccactttgaagttcaatgagtccatgccacgcctagtatcagcatcgtccaaaacgtcatcatgaataaggctcgatatatgaatcatttcagttatctcagcaagatgcatatgccttgctcgaggcttattctctaagccatcagctatgtccatgcttatagctgaagccatcaacagtagaacagtaggacaagttcttttcccttcagctccagctctgaagaagtatccagctgctgatgtcagttcaggcacctcagcaaccaccattgagcgcaatcgatctgtcacttcagagacttcatctttaatcagcacaaaggggtctagctgctcctacttagctgttagccctgcttttctggaagaatgatcacttgtgcagtgaaaataacatgaactccaagtaaatctgtcccaatagcacatattcgttggcattcggggagcggaggaagcggtggaggctgagcgcaggagcccagcgagaagaagccgtcccggcagcatcatggccggtcccaatcgccggggaggccgcctgaggcctggccaccgctgccagcgagatgcgttgaccagagccaaa

SEQ ID NO: 37077 - DNA, 526 bp, Setaria italica
  Peptide Sequence Number=SeqID_103051
aacaattacattgcttaatacattcttgatataataattgtatgcttgccgtctatacgcaggacttttatagatgtcaggagggcttcgaggctagggcggcctccgtgattgaacaagccgctaagaagcttgttaaggacatgcactacgaggcgcgcgttcaggccatcatcgacttttatgctgaatacaaaaggatgaggatcaaaaaaggagaggccaggacaatgaacctgaccaaggaagaattcatggcggtgcctccgtggtggtgccgatcctttacccggtgctgggaaaaaatggtggacgtgtggttgcagcctgggtggttggagaaccacaatgcctgctgggagcggcgtctgcagatgccatatgcatcacaccatcaaggcagcctgagccttgatgagtacaaaggaaaaatggacttcatcacatgatggtcaggagtgctcccggttcaaaggcatgggttatggtccaaaaagggcaaggccaacggcaggacatcgacttc

SEQ ID NO: 37078 - DNA, 1025 bp, Setaria italica
  Peptide Sequence Number=SeqID_103052
tttaaccctaagttaagtaaggaaaccttaatttagtactacgacaagttactagtaatacttcctatggcatgtgtgaaaacagtaaagatacagctgctgtgatactaacatgaatgttcttcgctgatataaagccatcctgatgcaaatctctacaaaagatcgctacaggatacatagtctgcagatcagaaataaaacaagcttccatctacgcacagtcaaggctcttgtgtttctgtaatgctacccttttttaagtcactccgacgctgcaggctgctctttctccgcctcggatgggccattggcgggggtctctttgctctctgcaggctgctttgtgccgtttgctggggctgccgctccttctttcgcaccatccttcgcaccttctttggcgccatcctttgcgccttctttggcagcaggcgctggtggaggctgcagcatgtgtggcggaggagcatgcttcagcttcactaagacctggcgcatccgggagaggtccgtgggcttgcctggcttcgggccctgaataactgtgatggatggcttcttgtccttgtctttctttcccccccgcttctcgatggtggctatttcatgcggaatgagctctgaaatcgatttccagtactgcttgtccgcgctagcatggaatttctcctgactggctacaaaaatcttctccctttccctgttgtggaccttatttgtctcgcagttctgtatcctcttctcatagaaagctatcttgaattcttcagcttcagcaattatttgggcccgtagctccttctccctctgttcctttttctcaagttctatagcattttgcctccgccattcgcggaggaggaagccctcctcccggcccatctcggtcggcggcggcaggatcgggccgtcgccgccgttggaatcgaggtcggggagaagggcgagggcgagtaacccccggagacgtggcggatcgggaccccatcggactcgacggtgatctcctcctccacctcctc

SEQ ID NO: 37079 - DNA, 585 bp, Setaria italica
  Peptide Sequence Number=SeqID_103053
tgctactccatttaagtttcaacctcagacagatctaaatgatattcaattcaggtaaccaacagctcaattcatgataggtaggcgggtaaagctaagcaaagcgatgcaagcgaagcgattacgccttctggttgtagacgtaggtgaggccgcacttgccgcagtagtggcggtcgaagtggttggccatgaaggtgcccgcgccgcagtcggcgttggggcattccttgcggaggcgggtgaccttgccggtggcgtcgtccaccttgtaaaactgcagcacggcgagcttcaccttcttgtgcttgtgcttgatcttcttgggcttggtgtacgtcttcttcttgcgcttcttggccccaccgcggaggcggagcaccaggtggaatgtccaagtaatataatcatcaagcaagatagaaaatggaaccaaaattaaactcgcatcacatcagctcagtaacaggcgttccaagaagatagatactgctactccatttaagtttcaacctcagactagttattttcttttaaatgatattcaattcaggtaaccaacagctcaagcaagatagaaaatgg

SEQ ID NO: 37080 - DNA, 709 bp, Setaria italica
  misc_feature (7)..(7): n is a, c, g, or t
  Peptide Sequence Number=SeqID_103054
ttttttntttttttcgtacttctagttgtgagttagttttttttttttttttttggtagcaaaatgaccaagtaatataatcatcaagcaagatagaaaatggaaccaaaattaaactcgcatcacatcagctcagtaacaggcgttccaagaagatagatactgctactccatttaagtttcaacctcagacagatctaaatgatattcaattcaggtaaccaacagctcaattcatgataggtaggcgggtaaagctaagcaaagcgatgcaagcgaagcgattacgccttctggttgtagacgtaggtgaggccgcacttgccgcagtagtggcggtcgaagtggttggccatgaaggtgcccgcgccgcagtcggcgttggggcattccttgcggaggcgggtgaccttgccggtggcgtcgtccaccttgtaaaactgcagcacggcgagcttcaccttcttgtgcttgtgcttgatcttcttgggcttggtgtacgtcttcttcttgcgcttcttggccccaccgcggaggcggagcaccaggtggagcgtggactccttctggatgttgtagtcggcgagcgtgcggccgtcctcgagctgcttgccggcgaagatgagccgctgctggtccggcgggatgccctccttgtcctggatcttggccttcacgttgtcgatggtgtccgaggactccacctcca

SEQ ID NO: 37081 - DNA, 1889 bp, Setaria italica
  misc_feature (1417)..(1417): n is a, c, g, or t
  misc_feature (1429)..(1429): n is a, c, g, or t
  misc_feature (1438)..(1438): n is a, c, g, or t
  Peptide Sequence Number=SeqID_103055
ttactcacaaacttataagttatagattcctgcagttcagaatactgcttttactttcctttccaatagacaaaaacattggaatataggattatcagagcagcaggacacaggaatagtacattgattatgaagggcataacagtgtcatcaacccagcatttactatgataaccttgaagagggctttaaaatccatccaacatcctcaactgaacaatacagaactaacatgtttccaactacacgataacaagcagcagaagcacaacactattttgcacccaatagagtagatcatcaacctgaccttgcaacattccgtaagctaacataactaactcccaatagagtagatcatcaacctgaccttgcaacatttcgtaagctaacttaggcaacaaatcttttacaaatcagttagtgagcataccatattgcaccctatcatgtctatcaccgaccttgcaacatttcttatgctaacataactaaactaggcataaagctttttgcaagctatcagcaagtgagcatacccaacaaaaaaagattgaaaactacagtgacatgttatcatatcaatcacacacggcaatacacaaactactgacccagggaccaatattacatcaacatcgagcacatagtataggattaacacaaacataattggaattcaacagtgcttgataggatccataacgacacgatatcatcaaaaccaaaagtaagcatcaccataagagatgcaggagttctgttccaagaaaactactttaacatgcgacaaaaaagaaaattatcatctagcaagactttccattttccttctccccaacataacagcggagcaccctacgcctgctggttgtagacgtaggtgaggccgcacttaccgcagtagtggcggtcgaagtggttggccatgaaggttcccgcgccgcactcggcgttggggcattccttgcggaggcgggtaaccttgccggtggcgtcgtcgaccttgtagaactggagcacggcgagcttcaccttcttgtgcttgtgcttgatcttcttgggcttggtgtacgtcttcttcttgcgcttcttggcccctcccctgaggcggagcaccaggtgcagcgtcgactccttctggatgttgtagtcggcgagcgtgcggccatcctcgagctgcttgccggcgaagatgaggcgctgctggtccggcgggatgccctccttgtcctggatcttggccttcacgttgtcgatggtgtccgaggactccacctccagcgtgatggtcttccccgtcagggtcttcacgaagatctgcatcttggcaggcgcgcccttcccggcggcggccgcccttaccaacaaattaaaccttaaaagaaacggaaaaaaggaaaaaacggaaaaaatntttttttttttnttttttttntttttttttttttttaaaagttttcaacctcagacagatcagtgtgagtagtgctgttggttacctgaattgaatatcatgataggtaggcgggtaaagctaagcaaagcgatgcaagcgaagcgattacgccttctggttgtagacgtaggtgaggccgcacttgccgcagtagtggcggtcgaagtggttggccatgaaggtgcccgcgccgcagtcggcgttggggcattccttgcggaggcgggtgaccttgccggtggcgtcgtccaccttgtaaaactgcagcacggcgagcttcaccttcttgtgcttgtgcttgatcttcttgggcttggtgtacgtcttcttcttgcgcttcttggccccaccgcggaggcggagcaccaggtggagccaagaagcgcaagaagaagacgtacaccaagcccaagaagatcaagcacaagca

SEQ ID NO: 37082 - DNA, 632 bp, Setaria italica
  misc_feature (593)..(632): n is a, c, g, or t
  Peptide Sequence Number=SeqID_103056
ggggccggcggtccagagcgccgtgcagagtcagatcagcgccatcagctcgccgttcgcggagacgagcgacctgttcgagacggggggcagcaggggcatcacggcggacgcgctgcggcggctgccggcgatggagatcgcggaggacagcgccgtggatactgcgggggaggcgctctgctgctcggtgtgcctgcaggacttccgggtgggcgagcccgcgcggaggctccccgggtgccggcacgtgttccacgtgccctgcatcgactgctggctcgtcaggcacggctcctgcccgctctgccggcgagacatctgaccggcgattcgatcgccggcgtccgcttgcgtctccgtaaatcgccgtcgtggtgcgccgatcaggtgctatactttggactgaacgagctgttgggttagtggagtagggtttgtaggacggcgcctgatgcccgtaagggaaatggtgctctctggtggtgaggggaaaaaaatcatctgcctaaggaaaatcaaaagataaaaaaaaatgggtagggaaaaacaagagatggattgggttcaagtgtggataagagtgattcagnnnnnnnnnnnnnnnnnnnnnnnnnnnnnnnnnnnnnnnn

SEQ ID NO: 37083 - DNA, 281 bp, Setaria italica
  Peptide Sequence Number=SeqID_103057
acaagtactttcactactgcatggagaaggatggccgcagtaatttcttgaagaacacatggtgaacatagttttacataacataaaaatatggctaagtgtgggaaccaattaagcatactgtactttttacctgtacggttgactggacgcgcgcctcgccctgccttcttctcgcgtcttgtcgcggcggcctcctgctccaaatggctgtgtctgctaggatcctgctgggttccggtacactgccatggtggatggggagcttcctcgttctcaaa

SEQ ID NO: 37084 - DNA, 262 bp, Setaria italica
  Peptide Sequence Number=SeqID_103058
cgtgtctcagaagttgctgatgatcttccagttatgttggcgtctggggacggtaccctggatgtgctcactggttgtgcaatgcagagctctggtgacgcgaatggttgtggtaaggggaacatccgcaatatctcttttacaggtaatcaaccagcaaggttgagactgccaaaaatatgcgctgcaattggctggaaagaaccatcatttgactttgaagaacaaggacctcctcataacaattatcatttgcaaggtg

SEQ ID NO: 37085 - DNA, 599 bp, Setaria italica
  Peptide Sequence Number=SeqID_103059
cttgggtctcgacgtcggcgcccttgccgccggcggcgcgacacagcagaccaggccccttcttccgtcgggcggaatctccaacgtccctacccggtacattgctgggagtgcgagatccatcgttcggaagtcgtgcgggttctgcatcatttcaggatgtcctctcagtttattggtgatggagcctcccatgaagcataagccgagtgccgtgccaatcaacacttcgctggagaagctggagttagaagataaaagtgctgtgttagtcaagcgcaggaggattgaatttttgggatcaattgtccaaccacaacaggacattgaagttgacatggagcacaaagttgctgatgatcttccagttgaaatttctactggggacgatcccatggatgtgctcactggttgtgcaatgcagagctctggtgacgcgaatggttagtggtaaggggaacatccgcaatatctcttttacaggtgattagtagtaaatggcaattaatacaattaggctttatgtcctttggtttctttcatttcttgaaagttggccaggaggtatggcatgcacatgaatgtaaatgcatcaaccg

SEQ ID NO: 37086 - DNA, 513 bp, Setaria italica
  Peptide Sequence Number=SeqID_103060
gtgggtttaacgctctcccccccttcctccatccactccccgacctgcttgggtctcgacgtcggcgccctcaccgccggcgaggccccttcttccgccgggcggaatctccaacgtccctacccgtaccttgctgggagtgcagatccatcgttcggaagtcgatcgggttcttcttttgccggaccagtcctctcagtttattggtgatggagcctcccatgaagcataagcccagtgctgtgccaatcaacacttcggtggaggaactggagttagaagataaaagtgctgtgttagtcaagcgcaggaggattgaatttttgggatcaattgtccaaccacaacagggcattgaagttgacatggagcacaaagttgctgatgatcttccagttgaaatttctactggggacgatcccatggatgtgctcattgattgtgcgatgcagagctctggtgacgcgaatggttgtggtaatcaaccagcaaggttgagactgccaaaaatat

SEQ ID NO: 37087 - DNA, 729 bp, Setaria italica
  Peptide Sequence Number=SeqID_103061
ccccgactgcttgggtctcgacgtcggcgcccttgccgccggcggcgcgacacagcagaccaggccccttcttccgtcgggcggaatctccaacgtccctacccgtacattgctgggagtgcagatccatcgttcggaagtcgatcgggttcttcttttgccggaccagtcctctcagtttattggtgatggagcctcccatgaagcataagccgagtgccgtgccaatcaacacttcgctggagaagctggagttagaagataaaagtgctgtgttagtcaagcgcaggaggattgaatttttgggatcaattgtccaaccacaacaggacattgaagttgacatggagcacaaagttgctgatgatcttccagttgaaatttctactggggacgatcccatggatgtgctcactggttgtgcaatgcagagctctggtgacgcgaatggttgtggtaaggggaacatccgcaatatctcttttacaggtgattagtagtaaatggcaattaatacaattaggctttatgtcctttggtttctttcattcttgaaagttgtccaggaggtatggcatgcacatgaatgtaaatgcatcaacgttcttgcttcttccttgatcagatatctaaaggtacacttcttttttttcccctgtaatctattgttttactgaaatccagaggttatacaggtaatcaaccagcaaggttgagactgccaaaaat

SEQ ID NO: 37088 - DNA, 1501 bp, Setaria italica
  misc_feature (1)..(54): n is a, c, g, or t
  misc_feature (1454)..(1454): n is a, c, g, or t
  misc_feature (1487)..(1487): n is a, c, g, or t
  Peptide Sequence Number=SeqID_103062
nnnnnnnnnnnnnnnnnnnnnnnnnnnnnnnnnnnnnnnnnnnnnnnnnnnnnnactaagaacacttgctgtttttaccactgaactttactatgttcaatacactttttgaagtagtgttcaatacactttgtgttgtgactacaacatataactaatatgtaacaatttgtcaggaccagtcctctcagttttattggtgatggagcctcccatgaagcataagcccagtgctgtgccaatcaacacttcggtggaggaactggagttagaagataaaagtgtaagaaatggccaaaatatcttgcatccgtttcccgtcttccttttgaattcactgcagcatgcttgagcttattttctctctctgcagattgaatttatgtttctgtattttgatggtaccaattgctgtccttgtaggctgtgttagtcaagcgcaggaggattgaatttttgggatcaattgtccaaccacaacagggcattgaagttgacatggagcacaaagttgctgatgatcttccagttgaaatttctactggggacgatcccatggatgtgctcattgattgtgcgatgcagagctctggtgacgcgaatggttgtggtaaggggaacatactaaatggcaattaatacaattaggctttatgtgctttggtttctttcattcttgaaagttggccaggaggtatggcatgcacatgaatgtaaatgcatcaacgttcttgcttcttccttgatcagatatctaaaggtacacttcttttttttcctgtaatctattgtttttactgaaatccagaggttatacaggtaatcaaccagcaaggttgagactgccaaaaatatgcgctgcaattggctggaaagagccatcatttgactttgaagaacaaggacctcctcataacaaattattcacttgcaaggtgactgtccacctagagggactcgtcaacactgttatggagtgcttcggtgaccccaagcctaagaagaaagctgcacaagatcatgctgctcaagcggcactgtggtgcctcgagcgctttgggcatgccaagtgatcttcagatgtgtcgctacaagcagcgcgtctgtctgcactcctgctgctctgtctgaccaacctttgtttccgttgccatatgtacatgtctcgtttaacctagggtcaggtggtatagttcgttcattggtgcttagccgtgcttgaacttgttgctggtggcaaaatgtcggcatcatcatcgtcgtcctctgtggatccctccccgtgaggagtcattttggcctgggcacgtggttaagaatttcattcctgggtagtacatatcatgctgtgacgattgttgtggcatatcgattatccaattgtccttgcagttgtgggtacctgactgtcacttgattttgaatcctgagccatggcatgagtaatggtttangccccgccaccaccggtgccattctgctgaacnccacgccgcggctg

SEQ ID NO: 37089 - DNA, 393 bp, Setaria italica
  misc_feature (325)..(325): n is a, c, g, or t
  misc_feature (372)..(372): n is a, c, g, or t
  misc_feature (380)..(380): n is a, c, g, or t
  Peptide Sequence Number=SeqID_103063
gctgggaaaaactcatccagtccttctaaaacgaaattgcgcacgtctttgcatccaaacacaggattcaggaacaatagcatggggtaacactggctacataggataagagtagatagataatacagacatgtcaatatagcacggactctggtatcagactatcactcctacctacactacatcctcctttcatggagctgcaagatagaaaggtcaaaagaaagacagaggaccagaggttcacactggggacaggggcagaaaattcaggcgcaatgcttccggtgacggttttctccatttggttctgaagctgccccgnaacagccacgacaggccctagcgaatctagccgcagtcgaggtttanggtttacncgcacttgatgga

SEQ ID NO: 37090 - DNA, 1664 bp, Setaria italica
  Peptide Sequence Number=SeqID_103064
tttttttaaagaacaataggggtaaacaactaggactaacaataaggaataagagtagatagataatacagacatgtcaatatagcacggactctggtatcagactatcactcctacctacactacatcctcctttcatggagctgcaagatagaaaggtcaaaagaaagacagaggaccagaggttcacactggggacaggggcagaaaattcaggcgcaatgcttccggtgacggttttctccatttggttctgaagctgccccgcaacagccacgacaggccctagcgaatctagccgcagtcgaggtttatggtttactcgcacttgatggagcggtagatgtgccgcacgaagaagagtgatgcgcggaaaccgacagtgcctagcatgaggaagaagccgtagcagacgcaggtcatgtagccaaagaagaaggatgtctgcatgaagcctgacatgtcggaccgcgcgtggtagtagtagatgcagtagaagaagatgaatatgccagtggagcctccacacaggacagacctccaccaccactggtgatcctcaacagcaagctggaaatatgtgagtgctactgtgacaaaggctgtgacaatgatgaggataatgaacacaatgaaaaggatgctgtagatggtgtagatcttatgcccccatatgctagcaaatatgtagtacagctcgatgtaaatagcactgaaagggaggaaccctgccattgccatctgaggaatggtgcttcggtaccatggaagttgagggatttcccttgggtatttggtggtgcggcagggagcttggaattctgtgttactatttttcccagcaataccacccaatacaaggagtggagaggtcacaagtgcccagatcagaataatgacaatgattgtgccaaaaggcaaagctgctgtagcactgtacgctatcgcaacagtatttaggaagcagaatgtaaggaagagaggaccacagaacaggcagccagtaaatatcagattcctcacccagtttgttccctccagttgaagatagaaggaagtggctgtgtatccagcaataccagatgtaagggcatatatgacaacaagggcagtgaaaagagctcccctgttgtatgggtagaagacgccaacaagtgcaagtaggaatatgaaaatcgcaagggcaagaagctgagttccagatccaataattgctgcaaaaagggacttttgcttcgggaagcggaaaacgtcgccatgtatgtacttccatccactctcctcttgatcttcaagggactcatcttcatgcgaatacttgatgaaatcattcttgagcacacgcatcaagattgtagccaggaagccagtaaggaggagtaccgtaacacatgagttaattatggaaaaccaatggatctcaagatgttgtggcatagaggaagacttggagtacttttccattcttttctcaaaagaaatatctgtctttttccatgtcactgaataagagaactctattggcacttccttgtcctctgtgatatctacagccacatttggatcagtttggacgttgatttctatgacacggttatcgttgtacatgatgtcaaagtggatgtgcttaaacagtaggtattttgcatccccttgctctctat

SEQ ID NO: 37091 - DNA, 781 bp, Setaria italica
  Peptide Sequence Number=SeqID_103065
ttcttttgttagttcttacttacgttcttatttcttaagttatttgttagtccaggaagccagtaaggaggagtaccgtaacacatgagttaattatggaaaaccaatggatctcaagatgttgtggcatagaggaagacttggagtacttttccattcttttctcaaaagaaatatctgtctttttccatgtcactgaataagagaactctattggcacttccttgtcctctgtgatatctacagccacatttggatcagtttggacgttgatttctatgacacggttatcgttgtacatgatgtcaaagtggatgtgcttaaacagtaggtattttgcatccccttgctctctatccttgtccattttaccaaggaatccccataaaggcaaatcatcatagtacatctggaagtagtaatccttggcaactgcatcccggagcttcgcaacttgctcctttgtcaatgttttctcgcagagaatcttggagttcttgtcttccttgaagttcaactcatatggtgcatcaaccaaccgatcaccatttagaacctctcccaaagcttcctttttgtcctttggatgttctggtgcacagaagggcagatcatagtaccgatatgtctcacttggattgtgaaaaggaccgactttgttcgcgtagagtgggacatgatccccctccttgtacttgtgatcagagccatcagctctggctcccatcgcacaagacaaaatcagcaccgcaagaacaacgccccgccccccgcccttgcc

SEQ ID NO: 37092 - DNA, 768 bp, Setaria italica
  Peptide Sequence Number=SeqID_103066
aaaactccatcatcacgcagcagatggagatctccgcaccatcacaacggcagaagagagctgcgcgagcggcaaggccgcgagagcagcgtccaccggctgccggcggacaacgacctcttcatggcggcgcggttcagatggtcagatcctggtgacacctcgcagcaaacagcgctgcctgtcccctgcttctcgccaccggcctgctcgtgtccagggtcacggggctccccggctgacgctatcggcgacggcggcgagtccatggaagccacgcgccgaaagttccgcccccgcgggccggggcgctggcgcggttgctccgacgagatgtccggttgcccgttcgcgtgctggcctggctgctcgtgttccggggctccggtgttccccgcgtcctgttcttgttcggcgtcggcgtcggcgccgggagcaggatgtgttgggtcgggttgctctgcggcggcggcggcggggtccatcacgttggcgcggcagagcgggcagctgacgtgggcgcggagccaggtgtcgatgcactggacgtggaacgcgtgggcgcacttgggcagcagccggaggagctcgccgtcctggaactcgccgaggcagacggtgcagtcggatgcgccgagcgcaccgccggcgcggtacgcgtgagcgcgatggactcgatcgccgcctcgtcgagccccacggtccggatgtgccacgcgtggtgcacgacttcctccgtccccggggggatcggggccgccgtcgtcg

SEQ ID NO: 37093 - DNA, 478 bp, Setaria italica
  Peptide Sequence Number=SeqID_103067
caaaccattgataatactgcccaggatctccaacagctccgcaataccattatgcttttgcccttccgctaaaggaagaacacaagttgttccttgttcgtgcactgatccctcttcacaagccaaagtgtgtatctatgtaccatcaacagctatcttattgcatcacacagtttgttgagaaggactgcaaactcgctgacacagttattaggggcttactgaaatattggcctgtgacaaacagttcaaaggaggtgatgttcttgggtgagttagaagaggttttggaggcaacacagcttgcagagtttcaaagatgcatggttccactcttctgtcagattgcccgtagcatgaacagctctcatttccaggtggcagagcgggctactaatttactactaggaaacaaattagaaccaattaatttagtaaaaaccttaaatttaaagttacttaaaaactttaacttaaa

SEQ ID NO: 37094 - DNA, 410 bp, Setaria italica
  Peptide Sequence Number=SeqID_103068
ccctccttcccgtccctcgccctcaccccccatcctcccacatccaattgttctctgcggtgctgggatcctagatttgctcggccggcggcggcggcggttccgggagctgggaaagactggattttttctggccatggaggcgtggcctgatccgttcaggcctgggcgctggagtggctccctgaccaggtccgattcgtattggttcaaatgatctgggcggcctgattgcttgcttggttgcgccgggggatcggagctagggtgtgggttcttggctggccgggcggtggattcgtcagcttgggtctgggagatcttggggttgttggttcagctcaggagccgcaggctgcgtagatccccgcttcgctcccgtggctgattcgtgctgctagggttttggt

SEQ ID NO: 37095 - DNA, 1706 bp, Setaria italica
  Peptide Sequence Number=SeqID_103069
aagtaactaagggaagaataacttaggggttagttaggttacaggctcaggagcccgacaaggactggctgcgtagatccccgcttcgctcccgtggctgattcgtgctgctagggttttggtttgcctgtggtggaagatgattaagaatatccttggccggctgccgaggaagccggggaaggccggggatagccgggatgctgctgctgctacgtctgcggggaacggcatggagccgtccaattcctacagtgttgccaggagcatggacccggggaacaagagggctggaaatggggattatgcagtgccacctggggtagctcctaacccggtgatgaatggggctgtggtgtaccactccaatgagccgctgccggcgttcaaggatgtggcggcatccgagaagcagaatttgtttgtcaagaaggtgaacctgtgctgcgccgtgtatgacttcacggatccgacaaagaacctgaaggaaaaggaggtgaagcgccagacgcttatggagcttgtcgattacgtcacgtcggcaaatggcaagttctcagaggtcgtcatgcaggagatcaccaagatggtgtccattaacctgttccggagctccaaccccacgccccgtgagaacaaggtcattgagggagttgatctggaggaggatgagcccctcatggacccggcatggtcgcacttgcagattgtgtatgaggttttcttgagatttgttgcatcacaggagacagatgcaaagctcgccaagagatacatagatcactccttcattcttaggctgctagatctttttgactcagaggacccccagggaaagggactatctaaagacaatacttcatagaatatatggtaaattcatggttcatcgcccattcatcaggaaagcaattaacaacatattctacaggttcatatttgaaacagaaaagcataatggtattgcggagctgttggagatcctgggcagtattatcaatggttttgcccttccgctaaaggaagaacacaagttgttccttgttcgtgcactgatccctcttcacaagccaaagtgtgtatctatgtaccatcaacagctatcttattgcatcacacagtttgttgagaaggactgcaaactcgctgacacagttattaggggcttactgaaatattggcctgtgacaaacagttcaaaggaggtgatgttcttgggtgagttagaagaggttttggaggcaacacagcttgcagagtttcaaagatgcatggttccactcttctgtcagattgcccgtagcatgaacagctctcatttccaggtggcagagcgggctctatttctctggaacaatgaccatattgaaaacctaattaagcaaaactacaaggtgctactacctatcatctatccagcactcgagagaaacaccagagatcactggaaccaagctgttcgtagcctgacattgaatgtacgcaagatcttctctgatcatgattctgcattcttcggggagtgcgttcagaggttcaacgacgaggagctgaagcaggaggaatccgatttgaagcgagaagccctgtggaagcgcctggaggaaatggccacctcaaaacctggtgagaacaaccccttgggcacacccaatggcaaatccagtcaaactgctggctaaggaacaacccgacaaatagaacaa

SEQ ID NO: 37096 - DNA, 760 bp, Setaria italica
  Peptide Sequence Number=SeqID_103070
tatcatacacatgatacactcccactaccatttcagtataacagcgaaacaataacacgatgcccgctgccactgaagtataaacccacccaagagtggatatctgcaatcaaaatcgacgctgtttattggactatatgtaatgtcactacacatgccaaatctctcggaaatccttctgtatgtgtacattttgatcatacagttctgacgaaaccaaacatgtcctacccgcctacaacaggggcaatccaacgcaccaacaaaaaattccaacactaaaatcacaacaacctgagttccaggcacaagggtcaaagagttgcaaggccacggctgtcattgcgggtgtcctagccagcagtttgactggatttgccattgggtgtgcccaaggggttgttctcaccaggttttgaggtggccatttcctccaggcgcttccacagggcttctcgcttcaaatcggattcctcctgcttcagctcctcgtcgttgaacctctgaacgcactccccgaagaatgcagaatcatgatcagagaagatcttgcgtacattcaatgtcaggctacgaacagcttggttccagtgatctctggtgtttctctcgagtgctggatagatgataggtagtagcaccttgtacacatgccaaatctctcggaaatccttctgtatgtgtacattttgatcatacagttctgacgaaaccaaacatgtcctacccgcctacaacaggggcaatccaacgcaccaac

SEQ ID NO: 37097 - DNA, 194 bp, Setaria italica
  Peptide Sequence Number=SeqID_103071
ccagcgccagcccgcacccgcgccccccgccggcaccccgacgacgacgccgacgggcccctcgcgctcgaagcggcagctctgccggcctctgccatcacgatctccttgttcccgctgaaccttggtggctccgatccgagcggcgcgttggctggcgaaggaagcagcgcggtggtcttggtggaacggaa

SEQ ID NO: 37098 - DNA, 850 bp, Setaria italica
  Peptide Sequence Number=SeqID_103072
ttttgatgggaaatcttctttttgcataatgccaaagttaggattttggagtgaactaaatatggcctcgataaagcacttgatgagattttacattctgacacgacagaatattataacagcttgtgtaaatggcagatcgctagcagtaataactaattgtgacaacagattcagctcacggccaaagtaacgggagacacgtaaacgtacatgctgaatacaaatcttattcgtcgttttgtagtgcttcattctcaaaggtccagagacatgcgagtttccatccggggaagatgatttaggaggcaggagtgaacttgatcgagacactgttcacgcagtggcgctcatccgtgggtgtcttgaagccttctcccttgaatacatggcccagatgcccgccgcaggctgcacaagtgatctccaccctccgaccatcaggatcgggtgttcggtttatggctcctggaagtccttcaaagaaagctggccagccgcagcctgagtcgaatttggtgtcggacttgtacagtggggttccgcagccagcacagttataaaccccgtcagctttaaatttgttgtactctcctgttccaggtaactcggtgcccttttggcggaggatgcggaactgctcgggggagaggatggcgcgccactcctcttcgctcctctgcttgctgctgcccccggacgccatcgccgcgggcgggggggtcggggcgtcgggcacgggagcgatccgaagaaggaacgaaacgcgaggaggaggtagacggcgcggtgcggacgtgcggtgaggctgtgagggggagcaacggcgctatgtggactttgcgctttg

SEQ ID NO: 37099 - DNA, 342 bp, Setaria italica
  Peptide Sequence Number=SeqID_103073
atagaagggatatattggagatatgtgagtagtaaatagaaaaaaaagtagcatcttactaagagcctaaaacttaacacttacgataacaaattcaaaccatttgattttaaattaccagttaacataagaatgcaaaggaaagaagcatgcacagtaagccttttttttccttgtagcatccataactgttaatatctcagctaagttgataacttcctacaacttcgtgagctgcaacactgttttcttagcaccattattagtttgtaaactgcaggtatgtctgctgcatgtcactcatatgtaactaaatatcaggcagcatttatcctcattgtt

SEQ ID NO: 37100 - DNA, 174 bp, Setaria italica
  Peptide Sequence Number=SeqID_103074
tttttttttttttaaaaaataaaaatgctgctgatattcttcaagatgatagttggcaatcacatgatggtactcagcgcggtttctgatgttggccacaaacgaattcattcattcctattacaatctgcacttataaaccaaacgcaaattacgatctcatatatccttgac

SEQ ID NO: 37101 - DNA, 824 bp, Setaria italica
  Peptide Sequence Number=SeqID_103075
catgatcggcggcctcgccagctacgccgcctccctcggccagaacatgatggatgggcagcatcaacttgcggtgatgcagcagcagcatcagcatcagaaccatggccaacagcagcaacctgtcacgagcgagagtgacatgcatggctcacgccacgatgagctgctgatggagagcaagtccggcagcgacaacatggagggtggtgccgggtcaggctctggtggcgaagagctgcaggaggaggacctcagcttgcagcagccccgcaagaagcgctaccaccgccacacccagcaccagatccaggagctcgaagcgttcttcaaggagttcccacaccctgacgacaagcagaggaaagagctgagccgggagctgggcctggagcctctgcaggtcaagttttggttccagaacaagcgcacccagatgaagacgcagcaggagcggcaggagaacacacagctgcgggctgagaacgagaagctacgtgctgagaacgcacgctacaaggacgcacttgccaatgctgcctgccccaactgtggcggccctgctacagctgtcattggtgagatgtccttcgatgagcaccacctccgcattgagaacgcgcgcctccacgatgagatcgatcgtatctctgccattgccgccaagtacgttggaaagcccgtcgccagcctgctgcccaactcatcaaacatctcctccgttgttgctactgctgcaccttacccgcagccgctctccacccaccacatcatccctggagcagcggacatgtttggcggcctccaccatcgtggagctgcag

SEQ ID NO: 37102 - DNA, 511 bp, Setaria italica
  misc_feature (459)..(459): n is a, c, g, or t
  Peptide Sequence Number=SeqID_103076
tagttagttttacaaaattaaaatagacggtcttaaatcccgaaaagtatgcggctgatgctcgcggcaacgccactatttgctgtcgtttccggggggaaattccgatccccgcagtaatttaacgccgcaatttggagctattgcccggttgatttgccacctcgaaagctcttcaatggtagtaatttggggtgaggttaacatccccaaggtccaatcagacaaggtcatttagcccctagcacacagcctcacggacagctccataggcacgacagggaaagggacagggaagtttctcttcagacttcagacattagcagtttagcagtagcagcagcatcacctcacttgcttgggggtttgcaaccaaaactataatattgtaagtagcgcgcgacgagttgggggtgatgatatccctaaatcattgtgattttctagttgacaagatcncggcgtaaagtgtattattgtccgccccctattcttgcgtacttcgtccgtt

SEQ ID NO: 37103 - DNA, 1301 bp, Setaria italica
  Peptide Sequence Number=SeqID_103077
ggcgggcgaggagagggagaacgggttccgcctgcccccgcctgacctcctacagtgatgtgtttggagaatggacgcctgggaaggtccctatatgtgggttttgcggcgaggagtgcaatgatgagaagtttgagacgttgcaggatggttttaaagtatgttcaaagtgttccaaaagcaataatgataacaaggaagaagggaataaatgtcctggtgacaaaaaggagagtgtggacaaccatgcttccagtgcatggacagatgcggagacgttactccttttagaaggagtcctaaaacatggagatgactgggatcttattgcccagcatgtccgcacaaagaataaatcagaatgcatagcaaggcttattcagttgccttttggtgaacatatgctgggcacaataaatggtaaatctgttagcaggctccatatgaaccaggcaactgatggaaaaatgaaccagcacattacgaaggagtcttcaagccactcaactgaaatggttgatggcatgcagattgatggaaatgaagatagtgctgataaatcagttgaagaacatcctcctacaaaacgcagacggttattttcttcaatggatgctaccgcttcattaatggagaagttagcactcctgacaacatcaagtagcccagatgttgttgctgcagctgctgatgctgcgattaaagctttgggcaatgaaaacccgcaagcaaggaaagcctttcgcctcagtgagcgagaatttaagactaaggcattcgcttcaaaccatgcccaacagatcgatcacaaagttggcaataaggatgtggaaatgcatggccggactggttctgataagaagcaggaaaagaagttcattgctaatgcataccaagtgagggcagctgttgctactgctattggtgtagctgctgcccgtgctaaaatgctcgcagaccaggaggagcgagaaatggagctcctaatggcatcaataattgaaactcagctaagaaagatgcaatacaagatcaaacactatgaggagctagagttggtcatggagcaggagcatgccacttcgcagcaagtgaagggatccctcgtgaatgaatggctaaaggtcctggagcaagcattccggactggagtgtcactaccgagagatgaattgctcataaagctgttcctgaaccagtccactgcatgaggaagctggctggagttaggcgccaccccccctcccctccccccccctccctcgcatctccctctgactgtagctgctagatagcttcct

SEQ ID NO: 37104 - DNA, 752 bp, Setaria italica
  Peptide Sequence Number=SeqID_103078
ggctgtctctggcgttggaagacggaggtccaacaggtggagcagggtgtgggatcgcagcataacgagcccactcaaggaattcgtgaggaagggggagcatgttcttgagcggtccctctccgagtcgaggaaggaaatcaggaggggtaaaaatgcggaatcagcagatattagtggtgaatttcattctggacgcaatggccatgtgtcgggcagagcaagccaaggcgcaagtcgaagctcacaggctgcatccaatggggatgtacagaatttccggaccgattggcttaagaatagcaagattggcagaagcaggagcgtgcattatacatcgcctgggaacttggacaacgggatgctgcgattttatctgacaccaatgagaagcacgagaactgcaaacaaggggagaaggagaagctcacgcttgtttgcaagagggcttttcggtttcatgtgagcagctgaagtagaatgtcagaccatgccatgtgttttagaagatggcagcagcagaagcaacttttcttgcaatctacttggtttctaaggattggcaacatcgtaagttattccgacatattctttcttataggagattgttaagtcccgacctaggctcaagatgcttcagtattagttgcagatttgctgctcagttcttttaagatgtttcttatagatggaatctggacaaaacctgtgcagattagtatcacaaatgtaattatttacgttcataataa

SEQ ID NO: 37105 - DNA, 726 bp, Setaria italica
  Peptide Sequence Number=SeqID_103079
actaacaaaaataaagtagacccaataacaattgccatgaaaaccggttttttggactagcctggacagctttctcgaagagctttctggccatagtattgtttcctgcacgcatttcaacctgagcccacgctagccagcttgcacaacttttcggattggattgagtggcttgttgaaacaaagtccgtgcttgttcaaaacgctctgctttagcttcaagcaaagcaagagtttgataaatatattcatttcctccacaatattttagggctttcccaagtaggttccgtgccttttttacgtttccttgctttatttctaaaattgcccacccatgccaagcagcaatgtgctttgcatcagccacagtagcagcatcaaatagctctcgtgcccttcgaatatttccacccttgctttctaggactgcccaacactgccaaatgtatgggttttcgccttgcgttgcctggcatcccctttcatataccgctctagctttgtcataccttgactgcttgctgtaaagctttcccagtgccacatatggacgtccgtcttcaggccagaatgagatacacttgtcgaggagcttctctgcttcagggaactcaaacttccgggtgtgcaccttgacgcggtagagccagagctcgaggttgatgggcagcggccgctcgccggccgcggcggcgagctcccgtccgtcgccggctcgagagc

SEQ ID NO: 37106 - DNA, 971 bp, Setaria italica
  misc_feature (1)..(39): n is a, c, g, or t
  Peptide Sequence Number=SeqID_103080
nnnnnnnnnnnnnnnnnnnnnnnnnnnnnnnnnnnnnnnttttttttttttttgttattgaagcaatgtcattagcatttggaagaataacttggtatttcggtccaaaaaaattatgtagacacagtccaaacttctaccaggaacagatggtggtagaactacgtacatgtggtggcgataataattaacaggtgattgctaaatggcagcggcaggtgtgtcattctcttctctcagtaatggcattggcattagtgatttttaccggtgggagtggaagtgtggaacagattgatctggaaaatttacgggacaggaagaagagggagaggcttcctgggcagccgccgattcctcctctgagaaacaactcccctcggatcagaaccctcaagcaccgcatccagctccgacgggtcgaggcccagcctcttttttattgaagccgtccaaatcgaaatcacttcctggagtctctgctgcttcgctgctgctgttatcggcatcattgctggaaaagccagaggtacctccagttgctgaagattctgaagactcatctgcagaactcctggtggtaggaagattcgattctgttgtgcttttaacagtgtcctgcttcacaggcccggatggctggtctaggtttaggagcttcttcacgctgtctagggcagggtcgatgatgtcgaggaagcccatgacccaggaggcatcatccacaacttcgatacgctgttgaaagtataggttcctaatttcttcagctcgaactggatccccctgttcctcctctagtgctgcccatgtcatccatgtcacctcactttgagagtttatgctcagcgaagatctcaacaatcttctggcagcggtgtagttaccagcacgctgttctaggactccccaagcctggagacaacgagctgcacattcattcgttgaattgactgacaaagctctttgat

SEQ ID NO: 37107 - DNA, 978 bp, Setaria italica
  Peptide Sequence Number=SeqID_103081
ttacggttatttggttctttggtttctttaggtttttaggttagttcttttctttcttacgttcttgttcttagggtctagggttcgtattgtattgttcgtaggtaagtccctattgaaaaataaccaaaagaactaacgaaaactaaggaaattggtctaggtttaggagcttcttcacgctgtctagggcagggtcgatgatgtcgaggaagcccatgacccaggaggcatcatccacaacttcgatacgctgttgaaagtataggttcctaatttcttcagctcgaactggatccccctgttcctcctctagtgctgcccatgtcatccatgtcacctcactttgagagtttatgctcagcgaagatctcaacaatcttctggcagcggtgtagttaccagcacgctgttctaggactccccaagcctggagacaacgagctgcacattcattcgttgaattgactgacaaagctctttgatagagggcccttgctgttcttgcatttccttctttccactccatccacccccaagctatccaaactggctgatgcctcgggtcaatctgtgatgcttttctgaataacacacgagcaacatttgctgatgaatagttgtattccagcagtgcaagtgactggagaattacagggtccctagggtttacagcatgcccaatctttagcaacttccttgccctgtcaatgttaccttcatttgcctcaaatagtgcccatacatgccatgaaaaccggttttttggactagcctggacagctttctcgaagagctttctggccatagtattgtttcctgcacgcatttcaacctgagcccacgctagccagcttgcacaacttttcggattggattgagtggcttgttgaaacaaagtccgtgcttgttcaaaacgctctgctttagcttcaagttctttgtttgttatttgtttctttttttctttgttaattt

SEQ ID NO: 37108 - DNA, 761 bp, Setaria italica
  Peptide Sequence Number=SeqID_103082
ctatgaacaaatacagtgtgcatcttaatgcactgtgcttttcgtctatttggaagaaaagcagacaagcagttgacctgcaactgcaaggaatgcaatgcactggacttaagcccaaacgctcaaaaccacccattgctggactaagtgcaaatcgacataatcatacatttaggataatgctgaacacacctccctcaaacataacgaactaaggttacttcaacagtaatatcccaaatgtgaaggatactaggagtaccttactaggaaactcgacatcttgcacagtaccctacaactacaaagtggtgaagtgatcatgtgcgtttctaggactgcaacactgccaaatgtatgggttttcgccttgcgttgcctggcatcccctttcatataccgctctagctttgtcataccttgactgcttgctgtaaagctttcccagtgccacatatggacgtccgtcttcaggccagaatgagatacacttgtcgaggagcttctctgcttcagggaactcaaacttccgggtgtgcaccttgacgcggtagagccagagctcgaggttgatgggcagcggccgctcgccggccgcggcggcgagctccccgtccgtcgccggctcgaagagcggcaccttcttcgcgatctccgcgaggcccctgtcgaacgccccgcccatcgtctccccctcgaaccggcccccatcccgttcgggcccgcctgccgcggccgcgccagcagctgcagccgcgcgc

SEQ ID NO: 37109 - DNA, 476 bp, Setaria italica
  Peptide Sequence Number=SeqID_103083
aggatggtgaggcagtggaggaagttggtgagtcaaacaagaatatggaagaaaataaggatgaagcacccaagaggaagaaggcaaggattgttagagaagaggaccacaagaaggataagaaacaaagcagctctaagtccagggatgcaaaggacttgctgaataccccaagtccttattcacttgatcgaccggcgcgtacgaggaaaacagtggagaggttggttgaagtgattgagaaggaaccaagcggaagtttattgttgagaagggtcgtggcactcctttgaagaatatacctggtgttgcatacagaatagcaaggaagaaacagactgaccttaagtttctccatcaaatccttttgggagtttggaaaggctgctgatttcaaaagccatatacttgagttctctggatttgtgtggcacgagagtgatgaaagcatagagctaaggccaaggagaagcttg

SEQ ID NO: 37110 - DNA, 919 bp, Setaria italica
  Peptide Sequence Number=SeqID_103084
aaagcaacccaagaggaagaaggcaaggattgttagagaagaggaccacaagaaggataagaaacaaagcagctctaagtccagggatgcaaaggacttgctgaataccccaagtccttattcacttgatcgaccggcgcgtacgaggaaaacagtggagaggttggttgaagtgattgagaaggaaccaagcggaagtttatttgttgagaagggtcgtggcactccttgatccgtagaacgtgttgatcagtatatactttattcttgctcggcaatttactatctctcctgatcgggttctgaagaatatacctggtgttgcatacagaatagcaaggaagaaacagactgaccttaagtttctccatcaaatcctttttgggaggttttggaaaggctgctgatttcaaaagccatatacttgagttctctggatttgtgtggcacgagagtgatgaaaagcatagagctaaggccaaggagaagcttgacaaatgttccaaagaaacattatttgatctctgcaaactgtttgctattccagtttcaagagtaaatagtaaaaaggaagacattatcatgaagctgctggacttcattgctgaacctcgcgctaatgatgattccacactttctgatgatcagggatcaaattctaggaagcgcaaacgagagggaggaagtgcagctaagaattcagagggcacacacaagagatctaggaaggtaacatcttatgtttgccagacacaatcttttttataacatttcttgcccatttacttgaaagacggctcatgtagctacattgagcaagtgttcaagcagagtttcatcatcaccaaaaagttctaaggataagcagagctctgctgaggattcaaacttaaggaagattaaacccattacaccaaag

SEQ ID NO: 37111 - DNA, 216 bp, Setaria italica
  Peptide Sequence Number=SeqID_103085
attattttggccggagaagaatatagtaagatatttgaggcaaactagcacctcatttctctcaaaaaagacatcacaagagatgcaattgctgctctataccctattcaggaaccattattcagatttcaagaaaacagttttccagagacaggaatcaaacccctcaatgcaatgcagagtcctcttctgtttccaacacagctgcgagtccga

SEQ ID NO: 37112 - DNA, 1586 bp, Setaria italica
  Peptide Sequence Number=SeqID_103086
gggagaggtcggcgctgtcacacaagcagaggcagctcaagacacagctgcgggtgttgtgcggttacgacaaattgagtgatgtgttggattatggggataagttgcttttggcaccaccaccgatgcatggagagtggctccctcgggccgcggtgtttgtgctcgtagatctcatggtcgttatggtgggtcgtcctaaagggatatttaaggagtgtggcaagagaatagattcaggcctccggctcatccatgatgaacttgtgaagcttggcattgtggatggtgtgacagaggtgaatttggaacactcaacaatatggacagctgggctgtacttgatgcttttacttcaatttctggaaaacaaagttgctgtggaactgacaagatcagaatttgttgaagcccaagaggctttggcacagatgaaaagttggtttagtcgtttcccaacaatccttcaaggatgtgaaagcacaattgtaaatgttaaagggggacaaatatgcacattctgttggttgctttaatgaggctgctttccacttccttgaagcaatgaagctgacagagagcaaatcaatgcaatcgatgtgccaagtgtatgcagcagtttcatacatttgtaagggtgacgcagaatcgtcttcacaggcactagaattggttggtcctgcttatagaacaatggactcttttgttggtgtgcgagagaagacttgtattatttttgtttatggacttctacttatgagacagcataatccgcaagaagcacggaatcgccttgcaagtggtttgagaatagcacaccaacagttgggtaacatccaattggtttctcagtacctaacaatgctgggcacattagcacttcagctacatgatgcaggacaggctagagagatcctcaagtcatcgttgaccttagctaagacgctatttgacattccaacacaaatctggatcttgtcagtatttacagagttatatcgtgagttggaagagagatcaaatgaaatggagaactctgagtatgagaggaagaaagaagatgatctggagagaaggctttctgaagcttattctcatgcttttcaccaggagctggtggagcaatcaagaatccagattcagccgctacatgacatgtcgaggatgcagtcggagatggctggcccaaccgcgaacgatgacctcgacattccggaatctgtggggctttctgctcctcagccttccgtcaaaaggcttgtggagcaaggctcagggaggcgcagtacaaggcggcggcagtcatgatgaagcttgacctgacgccccaggctgctgatgcccctcagaacgggacactgtaatagtatcgtgctaggccttgtcagataggtgtagcggctgacatgtaaatgatgtggttctaggttatgatttattgtgttaattatttgtatcttttataaacattataggtttatactgtaaacagagataaattgggggagacgttgagttgcagtgtagagttttaaacatcctaagtaaggttttaaagtagaaaacaagtttttaggtacgtacta

SEQ ID NO: 37113 - DNA, 658 bp, Setaria italica
  misc_feature (624)..(658): n is a, c, g, or t
  Peptide Sequence Number=SeqID_103087
cgggcaatgtcgccacaggaacgaggattctctgtgatactgtccgacatgtgtccacgaatttcagggatcacaaccaaagatgaagctatatcttgtgaattgggcatgcgtgctctctctttggcattagggaagataaagctaaaagaatctgattacagtgataccatagaaaagtatctgagctctacagaccctgatcctgacgaggatggtgttcttcgtcgcggaggcaacctagtattgaagtttcttgagaacgaggacgtatcagggtttggcaagttttgtaaagtgaagttcaagaaagtatcattgttgagacccaaagcgactcggcctagttcaagggagatctacatgatctgcgaaggtctgaggtagaaaggagtgtgcttcagaaggcaagcggcagactccaccccagggcaattcagttgccttgagctggggtagttgttctgctggcaaactggcaatgcgatacatctgtttgatccttgggggtaaggtgccgcaaagccttggtgccacttgtgtaataacttaatcgaaattacgctagtagcttgtgctaggaatactatgaaccatgaaatccttgatttttattggcaaccnnnnnnnnnnnnnnnnnnnnnnnnnnnnnnnnnnn

SEQ ID NO: 37114 - DNA, 451 bp, Setaria italica
  Peptide Sequence Number=SeqID_103088
aagctgggtgcaatggtacacggaacagactcagggcacccaacacaattgcatcactcattccagttcccaaaccgtaccaacaacaagctgctgatacgcggagaacaaagttatggcatccagatacacattcaaaaatcgcaagctctgatttacgagctagcttatttcttggttcgtaccaatccttacgagctgatcccgagctggacgcgccaatcctcgagctgcttcttcacttggtttgaaccagtggagccataagatatgaacttgtttacagcgttttcgacccccaggtactcgtacacgtcggcctcaaacactggatgaatggcttttaggtcatccaattgtaggtcagctagctgacagttgttcttggagacgcattagagcaacagactttcccactatctcgtgagaagttctgaatggaactcccttc

SEQ ID NO: 37115 - DNA, 1137 bp, Setaria italica
  Peptide Sequence Number=SeqID_103089
tacaagaccagaggtgagggttgtagtagtccaggtagtagccatggtgatggaggcgcgcgcgcccgcgatcagaggtgggatctcggggccggatcactcggacggcgccgccgcgggggcggccatccggggcgaggtgacggggaagagcgggagcaggcgcggcggctcggcgcccctcggggacgggtggaggaagaaccccctctcggcgatggccgcgcgctcggcctcctcggaggacgacgtcgaagccggcgagcggttgaaggggtcgccggtcagcggcgtcaccgggctgctgagcctcagggacgggaagtccagcacgctcggcgagaggatctccggcgtggccctccgcggcgatggcggcgggcccatcgccagcggcgcgatcatcttgaggttcttcatgctgctccgccgctcgtacagcttgaaagacggcttcttgggccggcacggcccgccagccgcctggcctccaccgctggtcccggcgctgccgctgctgcccgcggccgccgccgccgtcgtcgcgtcgttcttggctggctgttcggcgccggtgagcatctggacgacctgcttgaaggacgtggtgtcggcctggacgaaggtggtggggaacggcgtggtgtcgatggtgcgcgggatgggccggggggacggtgggaggttgtggggttgcgcgcggtggtggtgggggtgagacggtgaggtggaggacgacgacgacgaagaggtggaagaggaaggggagttggggtcctgccgatgaggcacggggaggagctgcttggtcgagacctccattgagtgagtgtgggtttccttcctgtttgttgctcaactaatttacaacaacaaattactacgacgacaaggaggaggcggcctcctccaatcgccttcccggcgggctgccgccaccgcggggcagcccctggaccgagctaaggaacgcgtagcacagcaccgtgagcgccacggcagggagcttcccggccaccagcccgacgaggacgacggccaccagaaccagaccagcaggaaaccggcttcctgctctgccctcctcctcctcttcttcctccacgacgaggaccaccgactgcgcgtcatcgattt

SEQ ID NO: 37116 - DNA, 204 bp, Setaria italica
  Peptide Sequence Number=SeqID_103090
cgagtttctagaatcttccagaacctctcgccgccccccaaacgtccctacccctcgctcagcagccggcgccatggacctggaccccgagggcatcttccgcgacgacagcgacgaggacgatgacaacgtgcaggagagggaggcaaaacaaagagatggttgtctacctcgttgatgcatcacccaaaatgttcacccccg

SEQ ID NO: 37117 - DNA, 801 bp, Setaria italica
  misc_feature (757)..(801): n is a, c, g, or t
  Peptide Sequence Number=SeqID_103091
tgtaaaatgatgaatttaattaaaatgcagcctagtgctagtgaacctgtcagccctccttgattaccttgcatgtataataggatttttctatacactcgaaatcttgtgagtacaaaattgtactcacccttgttgcttaaattaaaaatccagagttcgaagaaaagtcacctctgttcagttcgctgccaaaggatgcgggtttcgcaacgtagcttctttctaggactaactccagtcagttgcctgtgggatggtgaggcacactactgtaggatggaagtcctatatttttgtttgcttctgctctagattataatttagctccgatcaaatcttaattttactaacctatttttgtgtgcagttgtgataccggtgatgctgtgtgtacttgcggactgatcatgggacaagtacaataagcacaactggaactgggtatttgcatacccggggtcctgacaatagtcatatagttctatttgaaagaaataatgtgttttcattgaatagatgacaatagatttcttgcctacagcttaaatctttttttcttagttaattcttgactagttctactgttagaatctcttttttcagatattgggattatgatcttattggtgggagtatcaacatgttaccgcctttttgtatctgcgccataaacctccgcaagtactgtactgcagtcttgactcttgagaaacagtgcggtaccataataaggggaaaaaaaaaaaaaaaaaannnnnnnnnnnnnnnnnnnnnnnnnnnnnnnnnnnnnnnnnnnnn

SEQ ID NO: 37118 - DNA, 657 bp, Setaria italica
  Peptide Sequence Number=SeqID_103092
ttagggggggtgcggggggtggactgggttggtgcggagtgcggtcggataaggatgttgccgagttatatactagggttgctaatgggtctttagtgggcccaatggtttcgggtctcgatgaagctccacgcatgattttaaaagcccaccccaaacccgcgctattttgggtaaccgtggataaaaattaggaatcaaaaccgaaacccgtggacccgactcgcggatatccgcctcgacaccaatctgtattgttgtaaaatgtgtagctatttaagtatttatttgtatatttagtgctacactatgagcatcttaaccgtctagtcggtcatctagattgtgttgttgaagtataaaaaaattatcacctttttacaataacagaaccttttaggttgagtcagacggtgcatgcaagctcaatattgtgtagaagaagaaatgaagtagagaccatagaaaaaagttaatgcatatatgggacacatcaatacataaccatacattttttatgctatttagtgaattgatttgaggatagaatggaagaataaaacaacatttttttacctcaggaaggtatgccttgttttttttataatttcttgaaaaatatagtgcaactatgaaaactttgcagctatttaaaga

SEQ ID NO: 37119 - DNA, 356 bp, Setaria italica
  Peptide Sequence Number=SeqID_103093
gaacccgaagtgcttccccgcctccttcccggtcgctgcctgagcaacctgcgttgtcgatgtggtggcggccgcctgctgcgacgcctcgccggcggtaaagtaatataccgagagacccgcatcgctagcgccaccagacgggggggcgtagtattggtacgccgcgtaggggtcgtactgcgcggctacggatgccgtggcggcagggacgggatagtagtaagatgacgagccggcggccaaggcggagggtctgtggctggggccggggcgggttggtggtaagcgccggtaggggtagggtagccggcgtaaggggtgggggtagtgagcgtgttggaatcggaaaccgg

SEQ ID NO: 37120 - DNA, 433 bp, Setaria italica
  misc_feature (398)..(398): n is a, c, g, or t
  Peptide Sequence Number=SeqID_103094
tcggttgcgaggggtttcgcgtcacggccgggcgaggatactgttgacggggaattgaagtgtgagaaatggatccgggatgattacagcaagtcagaagagtcaaggatgaaattgtggttgaaccgtttgattggcaggccgagcatcgattggccatacccatttgcagagggcaagcaatttgttttaacaataacagctggtctggaaggctaccatgtcaatgttgatggccggcatgttacatcgttcccttaccgcactggttacaatctggaggatgcaacagaattgtctttgaaaggagaccttgatatcgagtccgtcttcgctgattatttgcccaattcacctcctagttttgctccacagagttatctcgagatgtctgaacngtggaaggcctcacccttgccaactgaacccgtgg

SEQ ID NO: 37121 - DNA, 539 bp, Setaria italica
  Peptide Sequence Number=SeqID_103095
acctacgaaagaacctacgacgacgggacgtgcgtgacgcccagctccaccacccgcatcggccgcccgtacggcgtcgagcccgccggcgtcgactggatcccgccgccgaagaagtactcgttcccgtaaaccaccacgcccgtgtgcctgtcggtcgatcgccacaggaacagtcagccgaggtttccagatccgaggaagggcgaaggggaggatggggaacgcggcgggcgagctcaccagatggcctcgatgggcttgccgaggaaggaggtggagagctgccgggcgaggccgttgctcaggtcgtacacgttcagcgtaaccttgtacccctcctgccgccattaacaaccaccaccaccatgtcagtcagatctctcccctcaaccgcgcacgccgtgggattgattgcgcgtacccgacgaagagcgaatcaaacaatcgaacgaacgggccttacctccgccatgagagccgatctccgtgcagatccaagtcgcaaattcgcaaatcccttcaagagtcgacggtca

SEQ ID NO: 37122 - DNA, 1146 bp, Setaria italica
  Peptide Sequence Number=SeqID_103096
ttgatcgaacattcgtacaacacataattaacgtatcttgtcaattaatcgcccatcggatgggcaggtccggtcgcaattaacaacccaaatgatcttaaccattgtccagacagacagacatggcgataatctacgttttcaatcttggtacggcggcagcagcatgcacttgacagattcccatgagctgaaatgcgcccacaaagcgccgcctagccctgctgcatggtggcgccgtcgccgtggcgctccatgacccggcgcatcgccagcgccgccgcctcgctggcccgcagcgtcccgctcgccatgatcgccgcgaactccctcatcacctcctcctgcaccttccccctcgcgctcccgagcgggtcagctgcaggagcgggagcagaagcgggagcggcagcttccttcgaagcctcagccgccgccggcggcggcgcgggctcttcccgcttgacggcggccttatcgggcgccgacggcacggagacggaggcgggcgtgggcacgaactgcgtggcctgcggcgcggcgttgttccgcagcgtggactcgaggttctggatcatgggcatgatcagcgggcccatggggctggacatgacctcggaggggaggttgaggatgtactcggggatgccggcgccgacgaggaactgcgcgacctcgttgctgaagttgttgcagttgtgggtgaggaggcggtacgtctccgccgtgaagcgcggcgcgatgtcgcggaggtagtcctcgaagacctcgcgcgggacgtgcgtgacgcccagctccaccacccgcatcggccgcccgtacggcgtcgagcccgccggcgtcgactggatcccgccgccgaagaagtactcgttcccgtaaaccaccacgcccgtgtgccagatggcctcgatgggcttgccgaggaaggaggtggagagctgccgggcgaggccgttgctcaggtcgtacacgttcagcgtaaccttgtacccctcctccgccatgagagccgatctccgtgcagatccaagtcgcaaattcgcaaatcccttcaagagtcgacggtcaatagcaccaaaaacgcgtggatctggcggaacggggggaagacgaggggctcgataaataaaagcaacgcggtca

SEQ ID NO: 37123 - DNA, 883 bp, Setaria italica
  Peptide Sequence Number=SeqID_103097
aatatttcgcgctcggcggcctatccagctctctcccgcacgccacacacgcgcgcgccgagacatgcaaacgagcaccgcgaggatggcatccgttgttctcgcgttctcgcggtggtcgcttctgcttctcttcctgctggcgacggcgtcaccgtctcgggcgctgaagatcggcgacctgctcgggacaccaccggcggggagccagggttgtagccggaaatgcgagtcctcgttctgcgcagtcccgccgctgctgaggtacgggaagtactgcgggatcctgtacagcggctgccccggcgagaagccctgcgacgccctcgacgcctgctgcatggtgcacgaccactgcgtcgacacccacaacaatgactacctgaacacgcggtgcaacgagaacctgctgagctgcctggacagtgtgagcccggcggggccgacgttcccggggaacgagtgcgacgtcggccagacgacgtccgtcatccgtggggtcatcgagacggccgtgctcgccgggaagatcctgcacaagcgcgacgacggccagtagccggcgcgccccggcccggcgggctcgctcgcgcggttggtactaggagcaggccatagttgcaagcagagcaataaagccgcatgggcgcgcgtgggcgcggcggcgcccgtccgtggcggtgcggcaaagcagcatgtgctggattttaaggtcatggacgctggaccaccgcggttgcgtgaagcatgtgtagatttatgtgtggatgtacaagaatgtagactgtatacagattggtaggattgatttggcgggactccgagcaaagtggcaatggttgtaagctgtaataatattgttttttgaaggttaaaatattag

SEQ ID NO: 37124 - DNA, 483 bp, Setaria italica
  Peptide Sequence Number=SeqID_103098
tttttaattggtaggcaggttaattgaagcaaacaaccttagttgacaatctaatgttgatgacagataaataggtccactccacagtaaacgaaggctagaatgccatattcccacacgaaagacaacggtaaattaaagtctaagagcataaagaaacaatgaaactgaatcctggcgatttcttaatcttgggctgggcaactccgatctcggtgaattgatctgtgcagcaaacagcaaaatcggtcagcttggcttggagaattcaccagtgcaaatgtaagctatttttaatatctgcttggtttgttatatatcaatttctggcaatccaacagcaaaaaataaagtgatggcttgttgggatgtgtaagctattgtacttctgtttttttgaaccaagactctagttctgtgccagttgctcagtatcaaggtatcataaattcataatgcacggaaaaaggaagaatacaggaa

SEQ ID NO: 37125 - DNA, 298 bp, Setaria italica
  Peptide Sequence Number=SeqID_103099
aagggtggagttgccacggcacgtgataggtagggtttgaccattgccgactggaatgaaggagtgagagggagggaggcgggaaagaagaataccatccgaagacgccatgtggctggaggcaccagagtcgaccacccagccaccgttctgcagcaccatctggttgagtgcagcaaccagcccagcctggtcccatgttggagccagaggggacgcctggaggggagcgaacgccgtgtgagtctgcggaggtggtccgaggaggcctggagtagaggcacgccagcccctaccg

SEQ ID NO: 37126 - DNA, 1415 bp, Setaria italica
  Peptide Sequence Number=SeqID_103100
ggtccattatgatttagtaccagcaatttatataaacttgaatgttttctactagtttgagaaagaatgccacactgagccactcaccggtactaggagctgtgaaatggttcttcacgtgcagccacatgcaatcctcatctgagattaggttttattatgtgatctcattaagtctattgtacataggatagcagcacttgaccgtgaaatttttattcgagtgtcttcttccaaggttacaactatcataatttttgtagctaatctagcctaatatccagcactagctccctaaaacctcctacacgtaaactaaataagaaaagaaggagagccccagctcatgcagctgttcagctcacacctcgttaaccaatcttctttcttcacccattgcattgccgttttgttcctgatttcttgtgcaaccaataaaggtaccaaccttctcaccaacaatagcctttgcaatgtttcctggcttttgcaagttaaacacgacaacaggaatgttgttttcttggcatagtgtgatggcagtcatgtccattaccgagagatctcttgtagtcacttcatgatagctcactgtctcaagaaggtgagcatttgggttatgcctggggtctgcatcgtacacaccatcaacatttgttgctttaagcactacctctgcattaatttctgcacaacggagagcagcagctgtatcagttgtaaagaatgggttccctgtcccggcagcaaatataacaacccttcctttctctaaatgcctgacagctcttctgcgtatatatggttctgcaacctctgacatacggaaggcagtttggacacgggtaggtattccaatgctctccattgttgcttgaagaaatatagcattcatcacagtggccagcatgccgatgtaatccgctgatgagcgatcaagcccactacatccagcccaagaggccccacggaagatattgcccccaccaacaacaatagcaacctctacacctagcttggtgacagaagcaacctctcttgcaattgccattgtaatctttgggtcgatgttttcggtgcgatctccagcaagagcttccccacttactttaagcagtacacgttgccatctgtatggccttttcgacctagaagaaccttcatcaagcgtaaagctgaacggcggcaacagtgatgtttgattcccgaagttggaggagtcggaaccggcggcggcggcggcggtggcgcgggcgcgcggctttgcggagagtgagaggggagtgttgatgcgaagggctctcgggcgcgaggggagcagaggagacagggacggtggcgaggagagagccggcaccacggcggcggaggcggccatggttggagtaagcaaccgtcgctccaggaaggtgggg

SEQ ID NO: 37127 - DNA, 776 bp, Setaria italica
  Peptide Sequence Number=SeqID_103101
gttctgagatcttctgccggagagccaaaccaattcccttcggtgctcacaagctttgcaatcaacttcaaagctgaagtgatacatagtttttgacgcgccttgctaatgtttgttgcgttcgtgttggtatagctcatgaagcctatgatcttcggtatgagtccggctgctctgttgatttctgcacagttgtcaggattgtgagtgagtttctcaaggattatcatcccctgcacaggaaacgaatcctcatccgtccaaggttcttttccttcttttggaactgacagcatccccttgacggatagcaagaatttccatgttttgcaccaccatttgctgttggcttctgcatgggctgaataatcttttattatttttactgtttgataaggaacttccacccccttcatgtccactgtggtagctgaatcgtgacttattattagttgcccattatcattggactgttcattgttatccactatttgagctgaattgctttgcttgaccaaagaattctttgcatcagaatcaagaagagaagataccatttgtattgtgcctgggatgccaacaattaggagatctccagcaagctcagcggcaatctttgcagcgaaaaacctgataatctgatcgtctggaccagtccaacgcagcatgctgatcaaggtgacaaccgcctttgtgcaggtggttctgtctgagtcaggcaatttgttagaggcctctcgtggcagaagaagggagtgcagaatttggaccgcggc

SEQ ID NO: 37128 - DNA, 1854 bp, Setaria italica
  misc_feature (1)..(52): n is a, c, g, or t
  Peptide Sequence Number=SeqID_103102
nnnnnnnnnnnnnnnnnnnnnnnnnnnnnnnnnnnnnnnnnnnnnnnnnnnntttttcgggggggggggggaatgaagagcttcttatacagtttattcatctgcacagttacaagaagcaaattgctgctggtgtatatactttccacctgctccactgaaaacagagcggcgtctcgcaaatctcgacggcaccgtggtgcatagtgccagtacaaacatccacgccgcctctcgagtctcgacacgcgacgccaagtggacggatggacccccatcccccggcgcaaccgacaaccgcgcgttgccgccgttcccggcgtttcaactcgtcgcagccgccgggtttccagctcgggaagcagcagcggcgagccgcgggtttccgttgcccgttgctccactacttgccccaaaacgagagaccacgggatcggaagagagaacatgcctcaagcaaacgaacgattctagcagtgcgaagtgtatcagcttcagcctcacttgttgtagcattgcaggttgccgcccgggtgaccgcccaaagcacatgccgcgagaagagcgtggacttgccgaaggaagggagtggagtggcggagtgatctttttctttctttttgtgtttgggttttatgggaggcaccgatgatctgtgttgcacggtagcggcggcatcagtcgagggggtagcatgtgtcctcaccgccagtgttccacaggaagtgcgcgtaggccgccgcgtggtgcgcgttgccggggtcggcggcgatggcctcctggtacgtctcctccgcggccgcgaggtcgttgcgcgcctgccacaggaacgccgcgtaccgccccatcgcctccgcgtccgccggctccgcgcgcaccgcccgcttgaagaagtgctccgcccggtcgtggtcgccttgcacctggtacaggaactgagcgaagttggcaagcagcagcgagttgctgggctcctcggacacggcctgctcgtatctctgcgccgtggccgcgtgctctgccgagtactccacgtccagcttcggcgcctccaccggcgcgacgagctgctccagaatttccgggtccatcagctcctcggcacgcgcgctcgcttgcatcctggtggcttcatcggatatccgcttccagatgaccagctcgtcctgtacatcctcaacggccattgagtcggacacggacgcctccgagccggcgcccagtggtgtcgcctgctgtgacgcgtcctgaggcaagaccgttccgctttgtctgtacgacgactcgtccgactggccgtcgccggtggagccggcgaccggccgcaccttgccgcccccgtcgccgttcccgcccaccgaggccgtgcggccaatggagaacgtcttgagcgcggcggggtcgaaccgctgctgggaagaatgggattgctccggttgctgggtgtccaccatctcgacggccgccacggcggcctggggaggcgggatcgtggcggcggtcgcgacgctgtcgcccatggagtagacggtgaagttggcgaggagcagcatgagggagaccatgagcgccggggtgccggagaagatgtgctggaagagccagacaaaggaggcgtgcatctctgcgtggacgcgcgccaggaccccctgcaggtcctcgtagaagagcgcctcccgcatctgcagcgtgaagctctggagctcccggatgatgagcaccatcgacgcgaaggcgcgccccaccgcggcgcgcgcggactcgccggcgcggtccacgagccgctcgtccctccgcccctgctccagctgctgctgctgctgcttccgccgcttgagcatccgcagcgacagc

SEQ ID NO: 37129 - DNA, 447 bp, Setaria italica
  Peptide Sequence Number=SeqID_103103
cagaagcagaagaaacgtcaaaatcttctgctcctgctgtggtcgaaaatagttggtttaaaagatcactaccttcaaagacttggaagataaggtacaatccaattcctttcctgcctcttatcactagtagtttgctgtacttctgcatgttatgtggctgttttttgggtttctatgtcaggtgaagtttcttttagcctcctttgaatgaaaatgctaagccacaaaagacaaagcctcctttgttatgtagcaatcttaatgttgattgctaagccacaaaagataaaacctgtttatgaacacttagcttaaagctgcttgaatcatccacattaagattgctgttatatgtgggttagagtcagcttaatagctacctagttagctctttacttccttttctgattagactagaacttagcacagactggatacattcta

SEQ ID NO: 37130 - DNA, 1159 bp, Setaria italica
  Peptide Sequence Number=SeqID_103104
ggggaaggagagagggaaggggtcggagaggccaggagggggagcctgcagccaccatggattccgacctctggatctcgcgcctcatggccgccaaacggcagttcgccctgcagcgcgcgcagcgccagcacgccaccccggcgtcccatcacgagcggtttggttatgatgatattgaacctgaggacgagggacgctcagacttctcatgtccttactgctatgaagatcatgacattacatctctttgtacccatttggaggatgagcacccttttgagtctaaagttgtggcttgcccagtttgctcagccaggatttcgaaagacttgttggatcatataactcttcagcatggctacctgtttaaactgcaaagacatcacaggttacgtagagttgctggttctggcaaccacactctctcctacgcagggagagatcttcaggagacctacttaaaggtgcttcttggaaatagcggtcgaagcagcagtaccaatacatctagttcagtcactgattcactgctatcgtcgttagttttaaatttatcttcaacagaagcagaagaaacgtcaaaatcttctgctcctgctgtggtcgaaaatagttggtttaaaagatcactaccttcaaagacttggaagataagtgctgctgattccaaccttagtcatgaagagagggagcagaggaggaggcgagcagcagtgagatcagcctttgtacagcatatccttgtcactacccttttcgatgactagcagaacagagctcatgcacctgaatcatgtgggccttttgcccactcatttatctggatgaataatgagctaataatcttcggtatctcgaagttgttcatccgactgaggctggtacctgattccatgaagctcgacgataaactgaagatgcggagggcctcttatatgttatggaagcagctctgaacctttgttttccagatcaaattcagactgctaggctattgactagtgttcttatagtagagtcttaatgttttttcattgtatttcattctgtgctgcaggtgtcgtaccctgtctaatttgattattactatggacatttgaatgttggctttccaactttggtatatgcgtatgaaatctgtctgccaaatccttta

SEQ ID NO: 37131 - DNA, 316 bp, Setaria italica
  Peptide Sequence Number=SeqID_103105
ccgccgaggacgggaacctgagcttgtccgccgccttgatccccattgttgccaccttgcacaccatcgagcgaggcccccgcgcgatcaaagagcctccccgcggagcatcttcaccggcgtacgtaaaaaatccaccgagaacaacagggaggggggatcgcctcgcctccactcaatgcatcgtaagcacgtcgctggccacagcttctcccacccgcggcgccgccaatgcgctatataaacgcgagctcgcgcgccgaatgagcgccccgaatcggaaagcgatcaggagaaatcccagactgacgcggaa

SEQ ID NO: 37132 - DNA, 2064 bp, Setaria italica
  misc_feature (2045)..(2064): n is a, c, g, or t
  Peptide Sequence Number=SeqID_103106
gcagtgggcggaagcacgggctgcctccctcctgctccgccgccgccgctgtcggagtcgccgcccttcgccgccaccgcgggctccctcgatgtctcgttcccggagcggcttcttccccatcacctcctcctcctccccctcgtcccggcgattccagggagtatcttgtgtagcaagggaatacctgcctctaaaaaccaggttgctgaagccagcaaggacaccaatgccaagaaaatcggcccacctgggaacaaaattcgtatacgcctgagaaagaggttggctgagggtgttcagaccacgagcactgtagtacctgaggaaactaaaaaccacctggctaaagaagtattcgaacatactgataacgacactccaagcacgatctttgtggatactgaagcgaaggctgaggaggtattcagcaaagctacaggagaagggcagtgccaagaggcaaacagcaacagcctgatcaaaactatgtcaaaggacacactacctgaagaggctaatttgattgtcttgagcttgaaccagacaaccgccactgaagtgcaggttaaagaggaaatcagttaccctgaaagaaaggagctgtgtgaagagggacacaaaaacatcatgagcaaggtgctgcctcatgaggacagcagcaatacacctaggaaagaatcgtatgtaggagctattaacaataccccatgcaagaaccagtcaatcatcagcgtgcatggtgaagtggaaaagaacaactccagcaacatcacccggagcaagaggctgctgtatgagacaaacagcaatccctcaagcaaggaggtaactgaagaggctaaggtcaacaacccaaggaagaatgtgacgtctgcagtgaagggcgaggaggcaaatgacaactctctggggaataacctgtttgaagaagctagaaagaacatttccactgcaaagctgtcaactgaggctataaactgtgccccaagcagaagaccagctgatccagttaatgacaagaaaactatcaaaaagctgcgcacctctgcagtgcatgctactggcaccagccacaatccttctggaatgaaactttctacctctgctgccccagctgtgggacgaagtaccagttctgcatttttagaggccacaaaagaatataaagagtttgaggagaaggtcaagagaaccgtataccttgacaacttgtctctcctagcaacagatgcagtcataaggatggctttgaaccaatttgggaatgtaaaaaatgtcaactttgtgaccaactacacggttccatttgacattcctcaatctgcattagtagaaatggaaactgagaaggatgctgagcatgtggtcaacatgctagatgagttcccattcatgatgtccggaatgccaagacctgtgagggcgaagcgagccacagcagaaatgttcaatgaccgtccatggaaacctggtagaaagttagaattctgttgggtgggtcctacggaccctgattgtcaaaatgtcagaaagtttaagataatgtccaagagacatgaggtggagaatttatcactgatcaagaatcaactgcatgaggaggcattgctagcaaagcatcatcaggagaacctgaattgcaattacaggaagcttgaaagtatagaaagtgtcattctgactggctgggttaatcgccttactcgcatttataacctcaatttcgatgaagtgtactgaaggcggctggtgtacatgcccctgttttgaccgtggagcatatttgttgggaggaaattttttgaccttggaatgcaatatcaagatcttgctaaagactgtttcaatgtttgtatagctgctggtatcaatcttacgtagtttgctacatactcgcaatgtggactacaggcaggagatatagctgccttgtttttctctacattttagcattgaacgatctgttgattggtgctgtatacatggagtaatcgagaacttaaggtgctcagattttcactgggctgatacagcaataaacnnnnnnnnnnnnnnnnnnnn

SEQ ID NO: 37133 - DNA, 459 bp, Setaria italica
  Peptide Sequence Number=SeqID_103107
ctcccttgaagtacaaaagggtggggcgatccttattctctgataagggcagtgtgggaagtaaatgtgtgtaaggaacaataacatccttaagtaatgatacttgagtgtgctgtatcatatgagacgagtttctgcttgcagtctttgaatcaagtttgtaccagcctccaaaatcaaccaccaaaagaattgctggagcaatctcagtccggacgtgccacatagccacagggtctgtcaaagaatgcttcagtatttaacataacctgtgaggacgaagatatggtcgcggccgccggacctccgccacgcgggtggcggtgacgcggtcgacgacctcccgctgccgccggttaatccttcgttcccgtcctccttgcggaacgcgcccttggttcccacccgagctccatctccgcggaaagcgtcgcgaagaagggcacgaaaacgacatca

SEQ ID NO: 37134 - DNA, 388 bp, Setaria italica
  Peptide Sequence Number=SeqID_103108
gaatgagatttcttacattgctccatcaactcctttggtacttgcacaactattcaatgtgccaggagtctacaaattggattttcctaatcatcccatgaaccgactaccaaaagtcgacacatctattataaatggcacctataagggcttcatggagattatattccaaaacaatgccacaaccgtgcagagttaccactttggatggctatgcattctttgttgttgggatggactatggattatggacagaaaacagtcgtggcacctataataaatgggatggtgttgcacgctctacaatccaggtattccctggggcttggacagctattcttgtgtttctggacaatgcaggcatatggaatttgcgtgtgcagaatct

SEQ ID NO: 37135 - DNA, 315 bp, Setaria italica
  Peptide Sequence Number=SeqID_103109
ccaaaattcaggctcgggggcctcctgtctcctcctcagacctcccggtcttctccacggcttgtcgcctgccgtcggcaagagcggcggcacctggtgactcacctcccggagatccaccatggattccaacttctacaatggccccccaataaccccaccgggaacgaagcaagaaccgcaggcccccggcggtgtgcagaatccattgaacacgcgaactcctggatcaaacggcaattactacagcggtcccccgaagattcttgaggaggagaagccgccatcgccaacaccgcctgctaaaaagaatgg

SEQ ID NO: 37136 - DNA, 234 bp, Setaria italica
  Peptide Sequence Number=SeqID_103110
agattaagtatggggctaggcgttgttcatagccgcatacagcaatttgatcccacatttcaaattgcacatgatatattagttcctgtaagtgtaatccaactatgagaatggttatctgatatcaccacctgtcatatgtgacaagtggttgatatatcctgttcttgatactagaataaatattggaatcaccttgatagagataacaggccatttctatgtattatcaag

SEQ ID NO: 37137 - DNA, 373 bp, Setaria italica
  Peptide Sequence Number=SeqID_103111
gagaatatgaatcctttcaagatctccagaacagttcattcgtccactggactgtaaacagacctgtgcatcaaaagaagtgggcatgaactgttgcagtttggaaacaatctgcctgtccaacccatctactcttccatgtaaatcttgtaggaccaaagcataagaaaacctcttcggaagcttgcacgactctacatcactacatgctcttgagaaatccacagaatatgcagtacaaaatgccaacagcgagcacatgaaagcaagcctggctaaactactagagctatgacaatccatgtccatatgggatgcagcaaggagatcataactctttgccagatcacttaatcttaaagagcaactagcc

SEQ ID NO: 37138 - DNA, 383 bp, Setaria italica
  misc_feature (33)..(33): n is a, c, g, or t
  Peptide Sequence Number=SeqID_103112
caaggaggcggcccagcaagcagcaagagctgngggcccaggtacgcgtgcagcaggccagcaagcagcggtccacgcagcagcagttgtgggccggcagcgcaacaggccaccaggccgcacgtccacgggccgcacgcaaggcaactttggtctagcagttcaggacttgatgcgctaaaagttctagttgtgttgcatagattgatccaacgcattactactgcttcaagacagtctgttcctgaaagcatgttggccagtgtgtactaacgtcagcctggtagcagtgtatcataaggctattgggacaatttgctagatattgtgatggagttcaacaaagaagaggccttacttgaacttgaaattctaaaagtaaa

SEQ ID NO: 37139 - DNA, 566 bp, Setaria italica
  Peptide Sequence Number=SeqID_103113
gccggacatcgagaaatcggcgagcatcccgctcgtcggcaccgtccgcatgaccgcctccgggatcgtgctccacggcctcgccgtcaccaactccaccgtcgccgtcggggacacaggcgtcgtcgtggccgccacgcttgctagagcgaacctcaccatggagtggagctactcgtacaacgcctgggtcgtgaccatcactgaccgcgggaatgcctcgattcaggttgaaggaatggaggttggggtttccatgggcatgaagaatcaaaatggatctctcaagctgtctgttatggaatgtggctgttatatgaaggagttagacataacattaaatggaggagcatcttggttttatcaagtgtttattgatgctttcagcaatcacatcagaacatcagtggaaaatgcgattacgaaaaaatatggaaggtgcattgaagcttgactcgttcctcggaaaccttccaaagaaatcgaatcttgatagtagttgctgcaatgaatgttactttgttaacgatccaatattcaagagatcctctgttgagtttgatagg

SEQ ID NO: 37140 - DNA, 238 bp, Setaria italica
  Peptide Sequence Number=SeqID_103114
gttgcttctgtaataggttagtcctcgatgaatatattgctctatgccagttggcacccccagctgcaataatgatggatcaaaactttaattagtaattatataggcaagctcatgcaaataattattgtatcatgcagatagtagatgcacgcatacatgacatgcgcaggacgatcccggacgacaaacggatgttcacaaatggcttaaagaaaaatccatttaaagattacta

SEQ ID NO: 37141 - DNA, 388 bp, Setaria italica
  Peptide Sequence Number=SeqID_103115
gaaaaactgactttgtagatgcatcaacatacaacgaggatgcctcagaggcattgttatcctgattctgcgttgctgctacttcaatcccgaaactatgatgtcgcgcagccagagcttttaggtagcagctagtgttcttcatgaagccaccatctagctccaatagttgattgcatatgagcagtccagtccctcagtcatcttctagatcactgaaggatacatcttcctcaccttgttcttactgtcctgatcaattaatggttgtgttgcttctgtaataggttagtcctcgatgaatatattgctctatgccagttggcacccccagcaatactcgcaccagaacaggaagactaggttactaagtacccggtaccgggta

SEQ ID NO: 37142 - DNA, 1286 bp, Setaria italica
  misc_feature (1)..(43): n is a, c, g, or t
  misc_feature (1276)..(1276): n is a, c, g, or t
  Peptide Sequence Number=SeqID_103116
nnnnnnnnnnnnnnnnnnnnnnnnnnnnnnnnnnnnnnnnnnnttttttttgtaccgtgtaaccgtgataatatttgacagctatggatgattctaatatattacatttggaatcccaaaccaacagcagtatgcaggggcgctggtacagcaggaaagcagaacaaagtgtggaactttatgtacagagaaaaactgactttgtagatgcatcaacatacaacgaggatgcctcagaggcattgttatcctgattctgcgttgctgctacttcaatcccgaaactatgatgtcgcgcagccacagagctatgaacttttacattttttaggtagcagctagtgttcttcatgaagccaccatctagctccaatagtttgattgcatatgagcagtccagtccctcagtcatcctctagatcactgaaggatacatcttcctcctcacctgctggagcggtgttgcctgttttgctgggcacagggtccatatcctgtagccaatcatctacttctttttcatcatcatcctctacgaggttggggttagacttctctgtgggtaaactcttgacctcagttttcaccaccagctcttcttgaattacagacttatcaatcacttctgtgtcagtggttgaaattggatgcttttcagcctcaacatttggcacgggatcagaagttggttcttggaccgatggtgcttcagacatactactctcattttggatgctggagggcgacagtgtgctatcttcaggttgtgtagagggagcactcatgttttctgatgatggattgttctttgttggtgaactttgcaataattcttcccttgcttccaggatttgtggtgttgaaagaatttcagcatcttgcttgttgagtttcgaatgtagaagcacaaaatagatcttccaaaagcatgcttcactcataatggtagagcaaagctcagtcctgaggtaggacaggcttggcacaagatgctcaatagccactgcatgtccatactgtgcttctgacagttcaaaatcatccgcgtggcggtcgtcggcgaacaaggggaaatcgagccacgtcttcggatgcttcgagatgtgactcacgaacaccaccacctcctctgtcacgccgaccgcctctccctcctcctgtccctcctcctccccggacccgaacggcaggagcgaggacgcgatcctggaaatacatgccacggcgccggcgttcgacagcatcgagatgccagtcctcaccctgccgcctatcnccgccaggtc

SEQ ID NO: 37143 - DNA, 243 bp, Setaria italica
  Peptide Sequence Number=SeqID_103117
caagtttctttttgcccggctggccatctgcctctcggagtctccggacgggaagcccccgcccagcttccaggaaacgaattcttccattggatggaggcgatcgagctctccagggccagcgtcttcggtttcgattccactggaattgggccggctacgattcgatttgattcggttcgatccatcgaatccccatccatcagatcgaggctcactgtgagcagctgcgtctgcccttaa

SEQ ID NO: 37144 - DNA, 187 bp, Setaria italica
  Peptide Sequence Number=SeqID_103118
ggaggagatggtgccagtggagaattcagcggtggaaaccccctctgaaagggggtatccttactcgatgctctggaatgtgaatcatttcggaatcttttcgtttgctcagtaacagtcttctgactctgatcgtagcaaaccttgcagtgagtaccctgtttaaccaatttatgtcttgattttc

SEQ ID NO: 37145 - DNA, 452 bp, Setaria italica
  Peptide Sequence Number=SeqID_103119
taacctaaaattactagctgcaggttccacaggtagctccatggagacatttgaaatagtttgcaagagtgatacacgattaactgcccatagtgcagagtttggttccacttgagaacaagctttacctctgtcatcttgtccaacattatcaaggagtttccagtggtgggacaggaacttccagttaaccgattttggtgcaaaggatgagacctcagaaagaagccaccaagaccctataggtgcagtccaattctcaattggcatacgatttctcaaccacaaggattcagaaattgttatgatgttctgcagtgaattagcaagcagtggtttcagcttcttcttcttcccaaggcttgcacatatcttctttatgcatggagcaacctctccatcacaaatgttttcctgaagggacactggatttgctggaaaacatttgtgat

SEQ ID NO: 37146 - DNA, 315 bp, Setaria italica
  Peptide Sequence Number=SeqID_103120
ggacggcgaggtgatgcaagtgtgggtagactatgatggggaggccaaacaaatcaatgtcactctggctcccatgggagtggtgaaaccatcgaagcccctgatctcaaacacatctgacctctcagcagtgatcactgagaaagcttatgttggtttctctgccgcgactggaccgatcaagtcgcggcactacgtgctcgcctggagcttcgccatgaacggacctgctccagccattgatttcaagaagatgccaaagctgccaaaccctgaccacaagacaccggcaaaggccttggagattgcactgcc

SEQ ID NO: 37147 - DNA, 269 bp, Setaria italica
  Peptide Sequence Number=SeqID_103121
acgcaggtgtgcgtggccagcccccacccctccaccgccggcaggcacctgcaccgcggcatcgacttgcgctcgtacgacagcgagtccacccgcggcccgccggagaacagcggcgctggcgtgcccggcgtcgccggcgccgacccgttcggcggcgtcgaccccggctccatcactgacgacctcgagggagctctagctgtttcctctctttctctcttcctctcactctcaaacacacaacttagttttttgggtttttttta

SEQ ID NO: 37148 - DNA, 541 bp, Setaria italica
  misc_feature (500)..(500): n is a, c, g, or t
  Peptide Sequence Number=SeqID_103122
acggacacgtaggcgggcacctggagccaggggaagtggcgcagcgcggcgaaggcgatggtgagggacgggttgaggtgggcgcccgagatgtggcccgtcgacaggatgatgatggtcaccgccagccccgcgcacgccgcgttcccgaacgggctgatcacgccgccgtacttctggttcacgatcggcgccgccgtcgcgaagaagatgaggatgaacgtgcccatgaactccgcgcccagctgcaatcaaaacgcacgcacgcaccagtcgattgctgtcagctacaggagttgtgctacattatcgtttccaatcaatgatcttttccaccaacttttatctgaaattcagaacaacatgcagaaccgcgtatgattgcaaacgacgaaatcagcaaaaaaggacgccggaacgtccggcattcagagcttcaaatgacagcatgtcgttgttttccatcaaccaataatcgcatgccaaaatccaattgaacnccacagtccacagtgctatcattcattcattcagccgcacc

SEQ ID NO: 37149 - DNA, 1370 bp, Setaria italica
  misc_feature (1)..(43): n is a, c, g, or t
  Peptide Sequence Number=SeqID_103123
nnnnnnnnnnnnnnnnnnnnnnnnnnnnnnnnnnnnnnnnnnntttttagagacaaatttatcacacatccagatgcccgtcagccggcgcatcggcgtggcttttattccgacacgatcaccgatcgcatcaaaatcgaacccgagagattgttcaaaacgcatacacgactcttgacgactcagagtaatccacgacacagaccacacaaattcaaagcactggacgcacgccggccggccgttctggacgaagcaaaacggccggggcttattgttacacggtacacgtaccaacttgacactgacacggaacgaacgtaccacggacacgatcgacgtggctgcaagcctgcaagtacgtacgtggaggggacggcgacacggccggacaatgctcgaccgatcgcgtcgtcagcggcggaagctgcgctgcgtccgcggtgtctcgccgttctcgtccctgagcttcacggcggtgtacacgccggcccccgccaccgcgccgagcgtcggcgccagcaagtagatccacagctgccggtagttccccgccgccaccgccggccccagcgtcctcaccgggttcatcgacccgcccgtcgtcggcccggccacgaggatgttcagcgtcacggccgctccgaccgcgatcccggcgagctcacccacagcgcgggtgtcggtggcgacggcagtgacgacgaagaggaggttgaaggtgatgatgaactcggtgaagaacgcctgggcggtggagatggtgacgtccggcacggtgaccccgccggagaggaaggggtggaagacgcccttgagcgcgaagctggcgcagatggagccgagcacctggacggacacgtaggcgggcacctggagccaggggaagtggcgcagcgcggcgaaggcgatggtgagggacgggttgaggtgggcgcccgagatgtggcccgtcgacaggatgatgatggtcaccgccagccccgcgcacgccgcgttcccgaacgggctgatcacgccgccgtacttctggttcacgatcggcgccgccgtcgcgaagaagatgaggatgaacgtgcccatgaactccgcgcccagcttgcgggtgagcgagacgtccggcgcggggatctcgacgacgcaggtgtgcgtggccagcccccacccctccaccgccggcaggcacctgcaccgcggcatcgccttccgagacgactacgtaacatccacccgcggcccgccggagaacagcggcgctggcgtgcccggcgtcgccggcgccgacccgttcggcggcgtcgaccccggctccatcactgacgacctcgaggctgagacacgcaaaaggggataggcaaggcacacagggg

SEQ ID NO: 37150 - DNA, 1028 bp, Setaria italica
  Peptide Sequence Number=SeqID_103124
tagttacttacaatttagaaccgtagtcggcgtttaatccatgcatatctcctttcagtcttgtctaacttggcaagttctgctccttcaaagatctgcctatatgaggtgagttccttgctacaaaagttcttcactagttcttcccttacagatggctccaatgcatcaaccaccaagcaagcatcagatagctgctgcaacagcatgggatcttctgtttccttcccagttcctaagcttgaaaaatctgaaaatacatgagatttgaggattttcttgatgttcttgaatttctctctcagctctgttatcttgggtacatctctatatgcttcaaaatgactgcataactggtttactgcctccagctgtgcagctgcttctttatactgccgttttgacgccataacctgaagttgctcgacagcggaaacaagcatagtaagacggtgaagagcggttattgtagttgttatatgcctcttggcgcaatccaactttttgatatcgcgacatatttcttgaaccattgtttcactttgttcagcctttgtttttatctcatgtatcttgtgcattaattcctgaacagcatttgttgctgccgcaagttcttccttggccttggttcccgagttgctctgctgtcggacggcggcaaggatgctggcgtccactcggcgaatctcgctctgtatcttctgcatcagaggctcgacgcccgacaatgacgcctcagtggggaacgtctggttgatgtactcgagggcgctggacttgtccatttctccggcgagatctctgccccgcgcgcccgcgctaggaggatctggagaggcctaggaggatctggaaggtgagggcggtgaggaggagccgatctggcaggccggcagagcacggccggcaggctgcccctcgcgcgcgcgaggggatgaggtggctggagaggtggaatcgccggcgggtactcgccgtcgtcggcagctcggccgttcaacgggtggcgcccagacccagttgat

SEQ ID NO: 37151 - DNA, 2049 bp, Setaria italica
  Peptide Sequence Number=SeqID_103125
aacccagtggtcgctgctccccgcccaagggccgcggcccgggcgagcacgtcctctcggttcgccagagctcccgtcaaggcggccatgcttggcgtcatagaaaccgctggagttgccaccgatggtgccatctggatggatgtggtggcaaccggtggtgcgaccgacggagccacggcagggtgtttgatggtgggggcaggggcaggggcgtgcttgttgaagtcctccagaatggcttgttgatctgctttcttcaggcccttgaggtcaagtatccgctgaaactcaagaggtgtgccttcaggaaggagagcacggtatgtgtttgcaacagaatcaactggtgacaaaataaccttaagtagtgcttcagctttactcatttctcggctgacaaactttgagtagctagctgcaccagtactctgttttccaagagctgggatatctagaagaatagtcttaaccgcttgagtgtccaaaagcatctgctgtgcaccagtttctgatatatgcttgcacttgtatatgttgagataaaaccgaggaccaagagaggctgcaagtttgtccaggaaatactggaagtaggtaggtgaaagcaagctaccaagcacaggaatactgctggacagaatagagctgataccattcacatattctgattgatcaccaacgctttcaagggtagcccatggaacgcgagtcattgcaaccatttcagcatcaaatttggtttcaagcccatgaacaagagtcattaatgcttttgtgatcacggccgagaactcatcctgaacttcagacatgtccaccttgtcagcaaactgagggttaatcatcttagaaacattctcagctagctcaccagatgtctggtgacaatattctgcagtattgacaatgtagcatatcattctctcgtccctgtccgaggtcctgatctgcccatcggtaccagtggccgctgcaacaataccagttccaccttttggtaacctggcatataacttagctgcataggccttgagtattctttgaaatacctgaaataagttgaataatgtttggttcttcgttaatgcactgcacctctttaagctttttctaatcaccaagaaaacctgcatactgcttgatagaatgtttgtctgacttccttcctctatttcccatctttcttcctggacaagtttttctaattgatccactaaagatttctcctcaagttctatgtacacattcatatatggttcaaaacaagaagatatgatcccatggaagttaaacccagcaccagggactgacaaatctttctgcttgtctttgtcatgtccaacttcatcattgggtgctgccagtttcttctcgtatttcttccgtatgtctgaaacaattttattgtgttccccactctcatcttcatcatcacttgctgattctttatttctagcagttgcagttccaccactgaatttctctgccaattcttcttcaaattcaagggttctctggaacgccagtaacaaagttgcaacatctggcttttctttgagattattaaggataccaacaagctgggtccttgtaatcttacagaactgaatacacagcagatagtcaacatgccaggaaggtggaaatattttccaggtgtcttcatttgaccgtagtcggcgtttaatccatgcatatctcctttcagtcttgtctaacttggcaagttctgctccttcaaagatctgcctatatgaggtgagttccttgctacaaaagttcttcactagttcttcccttacagtattgtaattgatttgtaagatggaagataaggattgatcataagcatagatttgcagctgagacagaaccgattaaagagagaaaaaacagtttgaacacaaggaccgatataatgcagcaaacaagaagtaaaatcaagtgaaaatgctgtttcagttatatttaatattgattttgggcaagatcattaactgcaaaactagacagagtgaaatcagaccttgtaatcttacagaactg

SEQ ID NO: 37152 - DNA, 276 bp, Setaria italica
  misc_feature (72)..(72): n is a, c, g, or t
  Peptide Sequence Number=SeqID_103126
tttacctttattttgttttagttttactttttgttttctttttctttattttatttactttgtatatcttgnggatagaatggagacataaataagctgacatatcccagcaatcacctgatgccagtgtatgattagctgaatagccgtcatgcaggctatctgcacacaagaacatggattggggctcatccagcgacaccaggttcaagtgcagggcatgatttatatagtgagttcaatgaactcctaggacaagatgatggttttgccttg

SEQ ID NO: 37153 - DNA, 754 bp, Setaria italica
  Peptide Sequence Number=SeqID_103127
ttttaaagttttatttacacttggccaagtaaatctaaacaaatgtgaatacaattatacagctgaacctgaagcaacattactacaatgctgagtatacagtacaggttgagtactctccatagggccagaagaagtgatttatatggttagctccatcactctgcctgtaagctgtctgctattgcttgcaagattgcctgaccaggcaattttgacgagggctgcatccaaacaaacccacagtgcttgcatatgtatatcatgacattttgatttacgatttagttatctgatggtcatcttcagaaagcacattctagttgctctgccagtttagacattctcatcaccatgagactgctcatatacttgtatatcttgaggatagaatggaggcataaataagctcgacatatcccagcagtcacctgatgccagtgtatgattatcatattcaggagtcattgccatcccttctgtgcaagctcgatagtatcccggattcagagaccatgaaggcgtacaaggctcgagttgatcataaggcatgtgcatatagggttgtatctcgtataattgtcccaaactctccaaattatcaacattattttgactcatagtactccaacttgtgagaagaaactgtttccggaggctcaacatgaaaatgtagtggttcttcaccaacatgctgattgtagctaaaaataggttgagacgaaatcttactgtcttcattgtaagaaaagaa

SEQ ID NO: 37154 - DNA, 593 bp, Setaria italica
  misc_feature (590)..(590): n is a, c, g, or t
  Peptide Sequence Number=SeqID_103128
aagaacgtagtacagattagcttcagctttatataaactggaaatcagaacatgatgaatatatctctgatcagaaatgcagcaattgctcttgcacatacttggaacataatatcttacaaataaagtttttatttacacttggccaagtaaatctaaaacaaatgtgaatacaattatacagctgaacctgaagcaacattactacaatgctgagtatacagtacaggttgagtactctccatagggccagaagaagtgatttatatggttagctccatcactctgcagtttacacattgagccaatttgttacacaaaaatgaagccagatagcactccagcacaagaagggcagaagcatgtcaaatggaaaaaaaagagaaacttgtatcctgagtcctgatttgctccaaggaaaagtatctattgaaattgccagttcagaccattgtaaaatccattccatgcgtgccactgtcagacagaaaatatagctacgctaaaggtaaagaaaataatgatcatccaatggagtaataggagttcaaaacattctgtaatgtttagcataattgcatcgaagtcanaca

SEQ ID NO: 37155 - DNA, 1814 bp, Setaria italica
  misc_feature (1)..(22): n is a, c, g, or t
  misc_feature (33)..(33): n is a, c, g, or t
  Peptide Sequence Number=SeqID_103129
nnnnnnnnnnnnnnnnnnnnnnagttttttttntttttttttttttttggttattgaatatatctctgatcagaaatgcagcaattgctcttgcacatacttggaacataatatcttacaaataaagtttttatttacacttggccaagtaaatctaaaacaaatgtgaatacaattatacagctgaacctgaagcaacattactacaatgctgagtatacagtacaggttgagtactctccatagggccagaagaagtgatttatatggttagctccatcactcgatttagttatctgatggtcatcttcagaaagcacattctagttgctctgccagtttagacattctcatcaccatgagactgctcatatacttgtatatcttgaggatagaatggaggcataaataagctcgacatatcccagcagtcacctgatgccagtgtatgattatcatattcaggagtcattgccatcccttctgtgcaagctcgatagtatcccggattcagagaccatgaaggcgtacaaggctcgagttgatcataaggcatgtgcatatagggttgtatctcgtataattgtcccaaactctccaaattatcaacattattttgactgttgtatattgagaagttctcatagtactccaacttgtgagaagaaactgtttccggaggctcaacatgaaaatgtagtggttcttcaccaacatgctgattgtagctaaaaataggttgagacgaaatcttactgtcttcattgtaagaaaagaactcctgatattgagattcctcctcattgtagacctcctggtagctctgattagggaaccaggtagtttcatctgaaacaccataggattgttcataagaactatcataggaagggtatgtaggctgtgcatatgcatacgtctcctcttctgtgttcccataccaagacaatcgattactctgataatactgctcctcgctggtgtcgtgccactccacagtcccagtggccggcggcgccacctcgacgacgacggcgtcctcgacgccccccttcctgttggcgtacaccgggaccccgaggcagtcgaccccgatccggcgctccccgtagccgtcggagtgtccgaagaggtaatcgagcccccgcatgcactgcctccagtagtcgcgcccgcacgccgagcggcacggcgcccccggcaagaacggccaaccacggaacacctccggcgtggcgtaggccggctggtaacgcggcgcatccccgtagtcgtacggcttgggccagtagtacggctccgccacgggcggcgggggcgagctcggccgaggctgcgctggcgcaggaggctgaggacgtggggacggctggtgaggaagcggagatcgcggctgcggatgattagctgaatagccgtcatgcaggctatctgcacacaagaacatggattggggctcatccagtgacaccaggttcaagtgcagggcatgatttatatagtgagttcatgaactcctaggacaagatgatggtgttgccttgcaatagttcttcagatataaatcaggcagcccctccaatattcttttgtcttcgttgcttgccatcagcgaagtcataatagtacgaatgatttttgaatcgagagctacattcttgtctctcaattcatgtaccaatttcagaaccttgtttatctgaccttcagcgctataacctttgatcaatgaatcaaacacagcaatgtcgggcacaaagccacttgctgttcaattacttagttttaaagtactaaccgttacttactaagta

SEQ ID NO: 37156 - DNA, 661 bp, Setaria italica
  Peptide Sequence Number=SeqID_103130
atgtaccccaaaatccttttgtaggaatggttaatggaaaagatcaatttgggccaacatttgctgcccccgtctagcattttgtttgtcctttttgtatttattctggagtactccaaaatctcaaaactgttgaataatattgtattcgttgtaaagagctgattaccccatccgcaattgagtggatttttgtagttcatcctcttgtcgattttcaacaataattttgcagtattctcatgtttgtcttcagccgtgtgcttctcacgctcctgaagtgagtagagggcgcttacttttgccctttaacctctgtcaaagtcgatctgttgtcttttcgtgcagatagttcatagttttaagtactttgttgtgcatatattgacttactgattactaacatgttgacccgcaaccagaaaacaagcagtctttatgcggaatataatggctaaagctcaaacattatctgtcaagcttgcttttttaaaagaaaaaactatccgtcacgaaaatgccgttgcttgcagggaaaacggatcagcgaaagacgacaccgtatttgttgctatcacatgtccaggatctctcgagatccccggaaattcgccaggatcctccgacggtgacgcgggtggcatctgttgatcaacaacca

SEQ ID NO: 37157 - DNA, 257 bp, Setaria italica
  Peptide Sequence Number=SeqID_103131
ggccggccatccgcctccgcctccgccatggcgtctcctcccgagcgtgcagtggccgccctcgagagctgcttccgcgccctcccggcggacgccgtccccgccgtagtcgactgcgtcctcgcctcctccgcctcgacctcccccgcccagctcttccacgcgctcgtccgttccccagcttcctccgagcagcagcagggtctccaagcccagtccgatcgtcatgcctccatctcccacgccgctgcgctccg

SEQ ID NO: 37158 - DNA, 382 bp, Setaria italica
  Peptide Sequence Number=SeqID_103132
ctggcgctggatgcatccccccgaatccagccacaggttcatggaagttgctgaacttcagtatgtttggtggctcgaaatacggggcatgatacacagcaaaatgctctctcaagactcaacttatgcagcttacattgtgttcaagacaactgatcgacgtgatgggcttgattatccaccccaggaggcatcaatcaccgttgcaggaagcacatcaactcacaaagtctgcctgcaaagctatgataacgagcatgaggatggtgcagtgcccttaacatggcgatacagtaggagacaccggcgtgtgtttcccggaaacctggtaatacctcagcgaaggactgatgactggatggagttggagatgggtcagttc

SEQ ID NO: 37159 - DNA, 473 bp, Setaria italica
  Peptide Sequence Number=SeqID_103133
tctctggcggtgtaggagtgataatatggctgtcttgtgcaagaaagccaaggaactcaagggaacgtttcttacatttcaaatcaaccatgtgttgagggaattgaactcggatgctgacgttcaagcgaactttgctgtcggacttgcagttgatcaagttgaggagctgtgcgtctgttgagctcccattggcagagaaaacaagacattgagtagagcgattacagctgcagttgaaattagacattcacatgtgtgcagtgtacgtgtactcgaggaaatcagtcagccagccagtcgtgtctaatattctttggaagtcagtgctaggggaatgttcttctgtgccctgccaatatatgtgcacgagacgacgttgtattttgagcggctagtgttggtggtaaaatgaagagccctgttggaattcgctatactgtgccctggaccctcttagtttgctcttttct

SEQ ID NO: 37160 - DNA, 259 bp, Setaria italica
  Peptide Sequence Number=SeqID_103134
gatttcatggaggaggtggaggcggaggggacgggagagcaggggagcggcggcggcgccggccgcagcgtagatgccgtcgccgccgctgtgcgcggccgcggacgaggtcattttagaacggaggaagcatggcctgggaacgttcagttggaacaatgacccactatatacatcgtgacaaggagattcaacatctcagttgcaatacattctggggttgtctgctttgttggaactttgctaagaagtgtgttag

SEQ ID NO: 37161 - DNA, 585 bp, Setaria italica
  Peptide Sequence Number=SeqID_103135
tttttttttgtttagtcttgcacacacatgcagtatatacacagaagaagcgagtagtgatcctgtacaaaggctggacgagctagcttcctaatcgccattggagatcagctaatattctccaggtgagtactaggcacaatcatttacacacataactagagaagaaagtgaagggataatagcagctctagctacaaccggcggcggtcggaggaggcgaggccgtcgtcgaagttctgagagtagctctgcaggtcgtacccgaagctcaccgcggcccgacgcctcggccgcgcggcgcgtctcctcctccacgtggacctcagcctcgacagcagctgcttcaccgccgccgccgaccggccgccgctcctcctccggctgttgctgccgccggtgtacaggcccagctgcagagacgccatcctctcctagctctctcgatcagtcgatcgctaacacgatcacagtcggagcgttatgttatgatcagaacgcagacttgtcgcgctcgcaagtcgcaactagctgcccgcggcctctctgctcgtagctacctctgcaatgaagcttctcctacaa

SEQ ID NO: 37162 - DNA, 339 bp, Setaria italica
  Peptide Sequence Number=SeqID_103136
cgcttggtaacatacattagatctgagaacgagatgttgtggacaaaaaagagtacaaaatgagtaataagaatctcatgtactataatagatgatagaagaggaattcaagaagaacaggtacaatttaatccttaacagataaatataaaaaatccagaaaatcatacctgccttttcagaatagaaggaaaatgagtcacacttaattatattataagtttataacaagaaatggtgaaaatataaatgagaaaacaggcagatcccaacaaaattagcaataaactgtcaaacaaattgctagcatccaagaaaaacataaaatagccatgacct

SEQ ID NO: 37163 - DNA, 1261 bp, Setaria italica
  misc_feature (1205)..(1261): n is a, c, g, or t
  Peptide Sequence Number=SeqID_103137
gcgatgagcccccgcgtggtcctcctcttcctcgccgccgccctccgcccctgcgccgcccttgtacgcctccattccaactccttctccttcaccttcctcgacgccccggcgcgctttggtcctcgagtgggcagcgatgggatctgcggttcgctgcgcgccgccgaacccgccgaggcgtgtgagcccatcaaagacagcggcggccgccgcggcgcgggccggaaggcttttgtgctgatcgcgaggggcaactgcagcttcgagggcaaggtgcgggcggcgcagaaagcggggtttgacgccgccgtcgtgtacgacgatgaggaaaaagccagcctctactccatggttggtgactctgagggtatacacatacctgcaatattcgtttccaagatggctggagaaacactaaagaagtttgccaggggtgaagatgatgagtgttgtataaactcatcgatggatgagactgcagggacagtattggtaatgtcattcgtatcacttgttgtcatcatatctgttcttgcatcttttctatttgctcgaaactgccgacttctacgtcatggagttgataatcacccaccttacgtcaagaaacatgtggtggaaaagcttccatgctcagcatatagtgctccctgttctagcgaagatatttttcaggaagcttgtgcaatttgtttagaagactacaataatggcgatatgcttagacaccttccatgcaaacatgaatttcacaagatctgtattgattcctggctcacaaaatggggcaccttctgccctatatgcaagcttgaagtaacgtccagttaataggcatatttggtcactgcatccaagtgctggcagttgtatgaaggtttaccgaattgttcatccattgcattattgaagattaatctgaacagttgatcttgcggacgaagtacaaattgcagttcctcaggttggactcataccctttgaggttaatattaggattatcttgtttggtgtgtggaaggccacaacaaactctgctgctgataaatgtggcgtgcattatcctgtatcctagaggaactaggtgttgtgtaagtgtaatcttaaatccaacataagccccattgtataccgaattacatgactgttttcattttgggaaatcaccgagaaatgtttgaaggcacagaaaaaaaaaaaannnnnnnnnnnnnnnnnnnnnnnnnnnnnnnnnnnnnnnnnnnnnnnnnnnnnnnnn

SEQ ID NO: 37164 - DNA, 1554 bp, Setaria italica
  Peptide Sequence Number=SeqID_103138
ttattcggtggacctacattgattcgagctgcagccaagaatcataaggatgttcttgtcgttgttgatcatgaagattatcctgctctattggaatatcttgaaggcaagcaagatgaccaggatttccgcaggaggcttgcatggaaagctttccaacatgttgcttcatacgattctgctgtttcagagtggttgtggaagcaatcaaataaaggagatacatttcctcctagctttactgtgcccctcacactgaagtctacacttagatatggtgaaaatccccatcaaaatgctgcattctatggtgacaagagtctttctctagtaaatgctggcggtattgcaacagcaatccagcaccatggaaaggaaatgtcctataacaattacttggacgcggatgctgcatggaactgtgtctcagagtttgagagcccaacttgtgttgtggttaagcacacaaatccatgtggagtagcatccagacaggacatccttgaagcatacaggttggctgtgaaggcagatcctgtgagcgcattcggtggcatagtcgccttcaatacgacaatcgatgaggatctcgcaagggaaatccgcgagtttatgagccccacagatggcaagacacggatgttctacgagattgtcgtcgcacctaggtacacggagaaggggcttgagatcctgaaggggaaatcgaagatgctgaggatactggaggcgaagccaagcgggaaaagcatgctgtccctccggcaggtgagcggcggctggctagctcaggagtccgacgacttgaccccggaagacatcaccttcacgaagatgtcggagagggccccagaggacagtgaactctcggatgcaaaatttgcctggctctgcgtcaagcatgtcaagagcaacgccatcgtgatcgccaagaacaatcgcatgctgggcatgggcagtgggcagccgaacaggctggagagcctgaggatcgccttcaggaaggccggagaggaggccaagggagctgctcttgccagcgacgccttcttcccgtttgcttggaacgacgcggtggaggaggcgtgccagagcggcatcgcggtgatcgcggagcccggtggcagcatccgggaccaggacgccgtggactgctgcaacaagtatggggtgtccctcctattcaccggcgtcaggcacttcaggcactgaagaagcaggggcagagaggattctgactggaggcagcctgcaataaagctggtggtcctgattgagggcatgcttgggtagaagagaaactgttacatatcagtggaggagaaacgaatcgatagcgtcttcttcggaccccttgacgggcgcttttatccagtatactacactctttcttatttttttcaggatttggcgcaagtttcgaactaaagtcaaaagatttgaattcaaatctcttctacccaagcatgccctcaatcaggaccaccagctttattgcaggctgcctccagtcagaatcctctctgcccctgcttcttcagtgcctgaagtgcc

SEQ ID NO: 37165 - DNA, 514 bp, Setaria italica
  Peptide Sequence Number=SeqID_103139
gctttttttagttttttttttgttttttttttgatcagcatttcccttaagcaagaaacatttcatccaacagcctgtgacaaaatgtacagtaagaaactgttacatatcagtggaggagaaacgaatcgatagcgtcttcttcggaccccttgacgggcgcttttatccagtatactacactctttctaatttttttcaggatttggcgcaagtttcgaactaaagtcaaaagatttgaattcaaatctcttctacccaagcatgccctcaatcaggaccaccagctttattgcaggctgcctccagtcagaatcctctctgcccctgcttcttcagtgcctgaagtgcctgacgccggtgaataggagggacaccccatacttgttgcagcagtccacggcgtcctggtcccggatgctgccaccgggctccgcgatcaccgcgatgccgctctggcacgcctcctccaaccgacgtacgttaccaaagacaaaacgggaaagaaaggaca

SEQ ID NO: 37166 - DNA, 947 bp, Setaria italica
  Peptide Sequence Number=SeqID_103140
aaaagggccaaaggggtgccaataattacgaggatgccactttatctcgtctcctctcccgccgccgccgccaagctcgccgccggcacgcgcgcgtaccctcgccgacgccgccagctcctgttcccagctcgccactgtctgggccgccgcggctccctgtcgtcgttgtcttcgtccgcggagcgcttggcggggcgcgcaatggatgctgcggaggccggcacgtcgacggcgccggaggcgagcttcagcgccacaggagtgaagcaagcactgatatcattgtccgataaaacagacctggccaatcttggaaatggtcttcagcgcttggggttttctattatttccactggtggcacagcatcaagcttggaagcagctggagttagtgttacaaaagtggaggaaattacacattttcctgaaatgctagatgggagagtcaaaacattgcaccccagtatacatggtggtattcttgcacgaagagaccagaagcatcatctgcaagcattgaacgaacatggcattgggacatttgatgtggttgtagtgaatttgtatccattctacaataaggtcacctcaagtgcaatatcttttgaggatggcattgaaaatattgatatcggtggacctacattgattcgagctgcagccaagaatcataaggatgttcttgtcgttgttgatcatgaagattatcctgctctattggaatatcttgaaggcaagcaagatgaccaggatttccgcaggaggcttgcatggaaagctttccaacatgttgcttcatacgattctgctgtttcagagtggttgtggaagcaatcaaataaaggagatacatttcctcctagctttactgtgcccctcacactgaagtctacacttagatatggtgaaaatacaacaactagaaagtactaacaacttaagaa

SEQ ID NO: 37167 - DNA, 441 bp, Setaria italica
  Peptide Sequence Number=SeqID_103141
tggtgagtgcggcgccaccgcccgtgccacctggcttgccatcgagacccagtttctcggcaaccgggagacacgggccctctacctcgacgcctagttccacaacttcgtccaaggtgatctgtccatcacggattactgcaggcgcttcaagggcatggccgatgccctcggtgatcttggcgagcaggtctccgaccgcaccctcatcctcaacatcatccgtgggctcaacgagaagtttgccgccgtcggccacgacattagctgcagccggcctctccgcaccttcatggaggctcgcgatgacttgctccttgaggagctcacgatggtgaatcctactttgactccgtctacgacgctccttaccggcaccggccccgggctctcctcctcatcctcgcatgcccttggctcctcccaccaatctactagtcg

SEQ ID NO: 37168 - DNA, 694 bp, Setaria italica
  Peptide Sequence Number=SeqID_103142
aactatctcaacagcagcagcaccagcagcttcttcctcttgagatagttgccgcctgaacgtcgccggcggcagcgatagccggccatcgaagacgaacagattccccacccaccccgcaggcccctccgccttgagatagttggacactcctccctccagtgtgtacagattccgaaagcccttcttcctgagaattgttgaatatacgtcgcatcttatcccgccggtgcagtacatcagtatatccgtcttctctttgtctacgccattcagaggatccgacatctcttcggagagcccaaaggaagtgcttctgaagcagtccacgttagggcgctcagcaccttcaaaatgcccaacatcccattcatagccatttctgacatcaagcagcagaagcctcctcccagatgtatctccaggcgtttcacttgagggcacatcaaggcatgccttagctttaagtctttccttccactttgatggagtcaatggcgtcgcgcgcatgctagggtccagcaatggaagatgcaaactccctccttctaactgaacaagtgatggcttgtaccgcaatttcagtcgaggaaaggcatgcccagttaaagctggcgaggtttgaacaagcatatcacaaaaccgataatctttttaacccagtctgcatatgccaatgcatctttgacagaca

SEQ ID NO: 37169 - DNA, 505 bp, Setaria italica
  Peptide Sequence Number=SeqID_103143
cctatcccctgtgtgccttgaggggtggccttcctgcctcttactgtatcttgctttgctttccagagtcggtcccactatcatcatcagagaatgttatcacaaggttatcacttggcacaggcttctgccatgaaagatttcggttcgtgccaggtttgaattgcccttgattccccctcatgaccttcttgtaacttggagcagctgatttgtgagccatagcattcgagacactcaagctattaccgcctttaccaaggagagttgccgatggaacttgagaagcagcctccgcaaactttcgaagaatggatgaagcagccctccgagtttgcagagcctcgtcgtcgtcggcgccggaggagagctcgccctcctcacgcgccctcgccgccgccgacaccggcggcggagggggaggaggacgaggcggggcctggggcacgctagggttctgactggcagcgggcgcgggcctcgggcccgacagtggggaggaggc

SEQ ID NO: 37170 - DNA, 558 bp, Setaria italica
  Peptide Sequence Number=SeqID_103144
agaatagggaataaagacctagttctgtatttcaagctatctgacagtttcgacaaggagatctctcctcaattgcaggacagcatcaagaggcttatgaatgatgaaatggaaaaggtgaaggggttcccagtagacagcacggttccctacacagagaggctgaaaattttggctggtttggcaaaccctgatgacttgcagctcagcacagctgagaggaagcttgtgcagacctacaaccagaagcctgtgctatctcgcccacaacacaaattctacaagggtccaaattacttcgagattgatctcgatgtgcatcggttcagcttcatatcgaggaaagggctcgagaccttccgggagcggctcaagcatggggttcttgatcttggcctaaccattcaggcagccacacagaagactgaggagctgccggagcatgtcttatgctgcatgaggctgaacagatcgacttcgccgacaacgggcagataccgacgctgataacggcagctgatgagtaaatctgtcatgtcgctgcaatgcactaacttt

SEQ ID NO: 37171 - DNA, 1181 bp, Setaria italica
  Peptide Sequence Number=SeqID_103145
accaacagcagaagaagaaaacaagccgtggtcaggctctcattcaggagaaggtcatacgagggtgacgagatgactgaactgactggttctgcaaattatttgtaccgtccgagggcgggtttcacagtgccctgctccacaaacgagaagatttcagatggttgctggtcggtacttgagccgtcaaacttcaaagtccgaggggagagtttcttcaaagataagaggaagtcccctgctccagactgctccccctacaccccaattggagcagacatgttcgcatacacaaggaagattcaccacattgcacagcacctctcgcttccatcattgaagactcatgagacgtttccttccctcctcattgtcaacattcagttgcctacctatcctgctaccgtgttcggcgataacgacggtgatgggataagcctagttctgtatttcaagctatctgacagtttcgacaaggagatctctcctcaattgcaggacagcatcaagaggcttatgaatgatgaatgttagtactagtctacggtttcccttactactagtagtaggtcttgtaaaaggctagtaaacttggttttggtctaaacccttgtgttgactttgcagctcagcacagctgagaggaagcttgtgcagacctacaaccagaagcctgtgctatctcgcccacaacacaaattctacaagggtccaaattacttcgagattgatctcgatgtgcatcggttcagcttcatatcgaggaaagggctcgagaccttccgggagcggctcaagcatggggttcttgatcttggcctaaccattcaggcacagaagactgaggagctgccggaggcatgtcttatgctgcatgaggctgaacaagatcgacttcgccgacaacgggcagataccgacgctgataacggcagctgatgagtaaatctgtcatgtcgctgcaatgcactaactttcaggaaaagcaaaggaagagagcgttgttcgtagatgttcttgagatgctgttgtatagatcggcagatagtcgtaggaaccaactaactcatgacatgttcgtgcagtaaagtgcacgcagatttgtgtaaatactcgttgatcattgccccaaaagaaagaaagaaaaatgacattgggagcaaacaaaaaaaaacaaaaaa

SEQ ID NO: 37172 - DNA, 796 bp, Setaria italica
  Peptide Sequence Number=SeqID_103146
ttctaggagaggcccatgagcgtggccgggacggcgaggccgagcgcccagctgacgctgctctggaggtagatgatgaacgtggcggagatcatcatggcgatggtgaaggtgaagtagtaccagttgaagaagctggtgattcctcttcgtccggccggcgttcgcgggtcgaactggtcggcgccgaaggcgaggttgcagggcctgattccgccggctcccacggcaagcagcccgaaggagacgaggagcacggccatctgtgtcgcggagggccccatgccgtgcgggtggagggaggggacggcggcggtgagggtgaggaggatcatgccgacgaaggaggcgatggaggcgaggccgatggtggtgtagcggccgaggtaggagtcgctgagaaaggcgccgaggataggggcgaggttgacggtgccgtcccagaggctgagcagcgtggcggcgctggcgctcttcatgccgtagacggtggtgaggtagacgagcaggttggccgtggtgccgatggtgccaagcttctcgcatgtctcgttccctatgacgtagggcatggacttccatccccggtagtcgccggcggcaccgtcgtcgtcgtcggagaggtgcctcttcttcatgttatcgccatccgcgacgacggcaaaggcgtacgccttgtgctcgtcctccggcttatcgccggtggcggctttgtccatcataatatctgccctgccctcaattaattcttgcttggctcaggattgaagacgagaggagaggctatccgatctgc

SEQ ID NO: 37173 - DNA, 439 bp, Setaria italica
  Peptide Sequence Number=SeqID_103147
tgacttatgttccatcatcatgtggtcatcagtatttaggacatggaagacttcattgacaggaaaaagaacatggctgttatcatggctcactcgaacttttctagcaagatccaaccatccaaactttttcagaatgtcctttgctaatttagcatacttcttttccagttgaagaaccagagggcctgaatcagtaaaaccaccagaatgagaatcattttgtgacttatcatgaccctttttttcatctcttgataagtcaacagtagggattgcatcacaactttgtacaggcgtgccatccttcttgtcatcatgtttaaacatagagtccactgaatgcagatcaactattattggttgattaaatttggtcccaaatgcatagcaagatgcaccaccacctaaaataacaagatgatcttcaatgacaatc

SEQ ID NO: 37174 - DNA, 404 bp, Setaria italica
  misc_feature (1)..(12): n is a, c, g, or t
  Peptide Sequence Number=SeqID_103148
nnnnnnnnnnnnttttttttttaggttaaccaagcagggaactccattgtatttccatatgaaatctgaaaacttcagaggactttcatagagagccatgtgaaattgttcgagacaaaaacagagaaaaagggaaaaagaatcacgtggactctcgacaacggtcatgaacgatttagttaagtactgacagatagtaggacattacattacacagtgtaataacaaacaaatggagaaattagcacactactaatgtaaactcacagatacatagctgaaagaaggcaaagagcttcagaagccgaaggctgaaagagcaacgcagcagccgagagccagcgccaggacggacgccaccggcaccggcagcgccgccgcgccgttcatggtgttgtgaggcc

SEQ ID NO: 37175 - DNA, 582 bp, Setaria italica
  Peptide Sequence Number=SeqID_103149
agcttcttctgaagcttggaaccaaaatacagagatctgagcatcatagcggctgtttgatggcttcaggtcttggggatccaactggtacttagggagagattcgacagaatcaaagtagaagaactggaaaagcggatggaatttccctgaacatgccttcacaacttcctgaccaacaataccaccaagcctagcccccattgggttcaaaacagctcgagaaccacttgcaaaatgccggagcaacttctcatcaatttttccagcttagaatcaactgatgcttcattaatatcagcagcaaacttcagaaagctttgagcatcctgctcacaaccagcagtaggatatcgcccatgcgctttcttaaaattatccagtgcttgaaatgctaggtgaagcacaggggaccgttcaaattttgaaaagtcactcagaaggaaatcgccaggatctctcatagcatctcttagtgccttgaaacgtagaacctttggttccttcacttgtgtaacaattccaccttttgtataaacaccataggtacttgtatcatcctcgatgcagaatgaaaatgga

SEQ ID NO: 37176 - DNA, 361 bp, Setaria italica
  Peptide Sequence Number=SeqID_103150
cctcggtatcctctgtcatagtatccacaatttctgcctgcttctgggttatccttgcagtcacaaaccctccaaaagccatcaagacctctctctgggctgcccctgtttttgcactcgcttgcggtgtagtcatactcctcgttgctaatagtgctgcacttggtattggagtgcttgtagttgtattcgtcgttggagcaggactatacagttgttgggcctctggtccacgtcttcggcatgcctctgagctgctttccgcttctgtcactggagcacacttgccaccttctacttcttgctttgttatctttgtccttcttgcaatgtttggctatatggccttctggacagttgc

SEQ ID NO: 37177 - DNA, 700 bp, Setaria italica
  Peptide Sequence Number=SeqID_103151
tgtgtacgccacccgccacgtcgggatgacggcggcggccgcggcgagcaggtgctcgagcggccacggcggcttgaaccgcgggctgaccccgcacatggcgccgttaagcaccgccccgtcgcgccacaggtccttgcggcggaggtggaggagcagcgcgatggcgaccccccagggactccccgtagaggaagcaggggagcgggggcgggtggtcggcgcggaacgccgcgaaggcggcgtcgcagtcgtcgaggacggggccgatgtcggggatgtggccctggaggccctcggagaagccgtggccctggtggtcgagggcggcgacggcgaacccggacgcggcgaggtggacggccgtgagctggaccatccagctggactcgccggtgaagccgtgcacgacggcgacggcgccgaggacgggggtggtggcgggcgtccagcgctgggtgaagatgcggaggccccgcgggttgacgaaggaggaggtggtgtgggtcaccccgtggcgcgcgtagaactcgtccggggtcagccggccgaaggggctccgctcgtcggcctccgcgatcggatgcaccatcttgccgacgccgccgcttgctcaggctcctcacagctctcctctccgctcttgtagtggaggtggaaacaagggggagggggagggggaggcgttggtgttggactg

SEQ ID NO: 37178 - DNA, 427 bp, Setaria italica
  Peptide Sequence Number=SeqID_103152
agtcaaaccagaatatcaacaatgtactattgcctactacaatactatcattactatgcaattatgcatgtccagctgaaaggaagtgcaattcataaattaacagtatgaacgaatttctaaccagtatgtatagcaggaggcattaaccaatagttgcatacctcattgctcggtacagaggcctataccacatcaagtaagacaaagggatgccaagcataccatagatagtagccaggaaaaatagtttggaatctccccctctgatccaacagactatgacagcaataaaattccagaagagacaaagcacaatgccaagccagctcgcgaacgcaagatactgcaacttctgagcgtttgctggtatctcattggcaatgtcgtggtggatgattgggaagaattggttggagtagtttct

SEQ ID NO: 37179 - DNA, 1421 bp, Setaria italica
  misc_feature (1)..(73): n is a, c, g, or t
  Peptide Sequence Number=SeqID_103153
nnnnnnnnnnnnnnnnnnnnnnnnnnnnnnnnnnnnnnnnnnnnnnnnnnnnnnnnnnnnnnnnnnnnnnnnngttaagctgtaatctccaagacagggagattaattcaacgtcacagaacatacaaatgagatcccaggaggccaggatggttgctatcttgggttccaacaaccagggctcttgttgtgaggcaccaacagacacttaaacggctcagtcacactagcaaacagaagtgagcacgacgtgtactttgtatactagtaaataatagatcggtccagaaacgacactacaatataatggcatacccctccaaaatacaaactttaaatgttaaaaattacattgtcattgtcataacatacaacgactgacatgtacttatgtgtatgcacagaaccgcagcgcaagcatatgtattggaaatccttccatggcctacttgtgccctctgaagtacatgtatactttctgaagaacccatatgctcacaagtgtctccaagcaaaacaaggcaaatccgacaaagtaaaagatcccaactatcgcatgatctgagaaagtgtcaattgcagccaatatacccgttaatgattttccacggaatataattggaggagcaatggcggcaaatacgcaaaagccaatgtggagcaggtagcagaggaaaaaccatccaaagctgaaagcactgtcagttctcattgctcggtacagaggcctataccacatcaagtaagacaaagggatgccaagcataccatagatagtagccaggaaaaatagtttggaatctccccctctgatccaacagactatgacagcaataaaattccagaagagacaaagcacaatgccaagccagctcgcgaacgcaagatactgcaacttctgagcgtttgctggtatctcattggcaatgtcgtggtggatgattgggaagaatggtggccagttcttgtcctccatgggcaccccagcgctcctgagggcttcctccctcctcctgatatccgcatctcgcctcctgagatctgattcccactgcgacagctccttcgccttgcccttcgaatcgttcatggtgtcgagggggatgtcgacggtcgcgtcgcccctgccaccgccgaacccgacgggctccgccggccggaacccgaactgcgacttgccgcctccgccgcgcgctcccccacctcctcctcctccattcgagaaggggttgtcgtcggcgccctcgtcgaaggggttgggatcgtggttcatgctcgctgccggcgacgacgggtggcgggcggagcggcgaacgggctgctttgatcgcggtggcttgggtcgttgatgtgcgtggagactggactactggagtagagagggaagcggtggggaggggtgggcgtgtcgggcgtggtgg

SEQ ID NO: 37180 - DNA, 438 bp, Setaria italica
  Peptide Sequence Number=SeqID_103154
acgtacaacgttcgcgagcgagcaggcgatgcgcgacgccatcgaggggatgaacggcaaggagctcgacggccgcagcatcaccgtcaacgaggcccagtcccggggtgccaagaagatccgccgcctgttcgtcgtggggtgaagcggcggccggcgacgtcgctcgccggagagattgctatcctcatccagtgctgatcgatccactcgccgcacgtgcgcgcggcttgccgagctcggttgcggcggcgcgccattggacatctgctgcgactgcgagcgggatcgaaggacaatttcttgggcttcttgaaagcacagaagagtagaagacaccatggccatgcgcctatgtttcgtcagagcttactgatcgattgtgtgtgcagtgcgctgcttctcagatcggtcgagtctgaataatcgaattgtaaa

SEQ ID NO: 37181 - DNA, 125 bp, Setaria italica
  Peptide Sequence Number=SeqID_103155
ggatgtctctacagtagtgacatccagctctgtcaatcgcttgctcagagttgatagaagatcatacacgagatcacttgacagagctggatgtcactacttgtaagagacagtccagctctgtc

SEQ ID NO: 37182 - DNA, 701 bp, Setaria italica
  Peptide Sequence Number=SeqID_103156
acctggatcatcaccccgcagcttcattccgcagcactgtaggatggtcactactgtagagacatccagctctgtcaatcgcttgctcagagttgatagaagatcatacacgagatcacttgagatgacaccaaatatacacagatagcagaagagtaaggtaagatttctcagagatagaccatcttcttttgagtactcatcctcaaacgtcttagcaatggacgcaaggatcttggcgctgaagtcaataccaaccaagcaagacatgcctgcaacaaaggctgcaaaaacagcagcatactgttcattgccacgaggtcctcgggaacagctagccaaaacttcatcaccaattatctgagagccaacacttcgtggaacagatcgaaaaagcgtggcaatttcctgagtaatagactccacatttgactctgagagtctgttcagaagtcctcttactctccgacgcatctgagcaatctcttctgattctgaattggaagcagcacgcaaacttggaggtacatacttcccttttgattctgtgggtgcaatcacattagcctctccatcctcagattccagaactgccccatcattctcttcatccatgtcaacacccccgtcatctggatcttcaacctctgtgtcatccttcttcaccttcttcttcttctttacgtaatcaggttcctcca

SEQ ID NO: 37183 - DNA, 1564 bp, Setaria italica
  misc_feature (1)..(120): n is a, c, g, or t
  Peptide Sequence Number=SeqID_103157
nnnnnnnnnnnnnnnnnnnnnnnnnnnnnnnnnnnnnnnnnnnnnnnnnnnnnnnnnnnnnnnnnnnnnnnnnnnnnnnnnnnnnnnnnnnnnnnnnnnnnnnnnnnnnnnnnnnnnnnntttttttttagaagacaaacaaacgcattaattgcaactcgatacgaagttgttaggaccggatggaacttcatgtaaaacttcgggatagcattttctctaattcctagtatgggtacagggaggactttatcctttctttctccgaaagaacaaagcgaaaaatgaaaacaagggtgtcgaagatgcaaaaaatggcaatgggcttggaaggcaccgactttgaagtttgaaccccacttcccatgcaacttacatcaggactccagcagcattgtcaagtgccttctttgcaatcttgaatttgctagccaagtccttcccagagtcctcagcaatcacatgccgcttgatgaacagcacaatgccatctctcaatatctcgagctctggaagaccagcgatacgggtgaagacattccacaccagcgcatcgtctttccgtagtaaggtctcaaacagcatttggaaatgggtgatcctctccggagtcatctccactgggtttgacaggttgacaaccttcaaagttgcgagggagagggtgaaatttgacaacatctctgcaactagttttgcaaggttcatggttcggtttggctccatattgtctagctccttgaaatgatcccagatgcagtactgcaagctgaacttgtgatttttctcatggctgcatagcttggaaacaaggacagtgtagtacttattgaacatcttttcttgcagacaacagtcaacaatgacccttataatttctcgatcctgcttcccagaaagacccagcctcaagagcttctcaaaagcatctacatagtcttcggcactcattataatacaaaagattgctcttcgtatgtccgtgttcatccgctgagctgctgcaagctgaagaagcttttgtgtctccgcaacatccttgcttattacagcagcaacatcttcaatattacctgctgtggatggaacatccccagacaaccaccattgccctttcttatcagggtccaaaagcctactccatgttagccctcgcaagaggacatcttctgccttaagcttttgaagccacttttttattcgagtatggtttgaggagtgtgaaggatcatctttaggccttttcttattgttcttaatgtcacatatggtattgagcataaattccattcttttgccgtgtctttctgtttctccgtcttctcgaacaccagagtgcaatttcaactgattcgcagagttctgaataccgaggacaaaatctttcatagcacctggatcatcaccccgcagcttcattccgcagcactgtaggatggtcactactgtagagacatccagctctgtcaatcgcttgctcagagttgatagaagatcatacacgagatcacttgagatgaacttgggctaactttctaacttgtacttcgtctgttagcggtaa

SEQ ID NO: 37184 - DNA, 371 bp, Setaria italica
  Peptide Sequence Number=SeqID_103158
caaagttcaaatgctaattgtgcctctcaagatcctgagcagtacggtggctgtaatcgtaatggtataaatgctcagccatccaacctgaggttacatccgtataggacattcctactaggtgcagagcaaacagactcttttactttgaatcctagtgaaaatcctttgggtgatttttcattaatgcaagaaggcattgatcaaagaccagggagttccctggatggtcgccggctagcatgcaagagaaaaaatattgaaggagccaacgggcagggttcagcaggtgctagcacaagttattcccacaggaatgataatgccttccataacattgcttcttcaagttacaatcctgctcctatcag
